United States Patent Application Publication US 2006/0134663 A1 - sequence listing, part 6

SEQ ID NO: 20080 - DNA, 1500 bp, Homo Sapiens
  misc_feature (1229)..(1238): n is a, c, g, or t
cccgggctgcaggaattcggcacgaggttttactttttaattttgctttttctcggcacgtggtatctccaccatttcttctgcacaaagatgtcttctgttcatcctgaacatttttaaaaaatgcagaattttatgtgactgcttttttgcctcacaattatgctgtgaattttacaaaaatttattttcttttttgataatttattgtaccaaagctgtttttatagcacatagatgtctgtaaccaataatgtagcagttctgcactttgacacaaggtgtaactagaccatttttaaatgtcagttgaaaattatggctgtactattgcttatacaaaactggaactgttgttgaatccatagccaatacatttacagcaatctgtgtactgaacatagtagattgacatctaattcaagattacaacatctgttacattctaagtgtgttcaggcttctgaaggtaaagggacactggatccagaagctatggaaccagcagttgattcttgtattcctgattaacctacttgtaaacttgaaagcaagaccttgattgcaccaacaggtccagagtatgagtgcaagcaaagcagaactctcatgcgtgacctgagcagacaggctggtatttaacaggtgcctcgtgttgagattacgctgccttaatgtaacacagtctggcagttgctaaatttgtgttcccattttaaattgaccaattttggggtgtgacacttttgagcggttgaattgggagaatgaagataagtaatttacctgtccaggatcaaaagaagcctagaaaagaagcagtaatctacctctgccgataacctgtttaagatgactcagcagaacaccgcgtttcattctattggtcaattccatgtggctgactaggtcaattttttttctgaacaaaagcaggtttttatatgtaaacagtgagaaaagaaaggctaaacactatgtaaatgtgaatggaaacttggaaatactcgtttttataaactacaaaaactttttgttgtttatcaggaaatccatatttattttgtaattaactgtcaagcctgtggatgatttttttgaacttggtagttcataaaggtttacagtgaataaaaggatatcatcttgagtatagcaatatcaaaaggaattcagtagttactgctgtttaggaatataaggttaagatatcatatgggtcaggtcannnnnnnnnnctgtgctggttgccacatcttagcaagcaccaaaaaactaaagcagtttttaaaccgatatttacgtaaagaaaatcataaaatccaatgcttctgcatactgtgttatgttacagtccagttttgtgtgctttactacacagtttggtacaggacttctgtgcattgtaacataaacagcatggaaaaggttaatacctgtgttcagattgtaagatctagtccggacttgctgtgatattgttaccgttaaatgaaaaaa

SEQ ID NO: 20081 - DNA, 837 bp, Homo Sapiens
gcacgaggaagacagggaaggtgaatttgtgaagcttcgtgtgtaggagaaacctgtagccaggaagttactgaggctggcccttcctggcatttctgttgatggccttcacaccccttcctccaggtggcgcccctcccaatgtggatcctgaggcctactcctggttccagtcggtggactcagatcacagtggctatatctccatgaaggagctaaagcaggccctggtcaactgcaattggtcttcattcaatgatgagacctgcctcatgatgataaacatgtttgacaagaccaagtcaggccgcatcgatgtctacggcttctcagccctgtggaaattcatccagcagtggaagaacctcttccagcagtatgaccgggaccgctcgggctccattagctacacagagctgcagcaagctctgtcccaaatgggctacaacctgagcccccagttcacccagcttctggtctcccgctactgcccacgctctgccaatcctgccatgcagcttgaccgcttcatccaggtgtgcacccagctgcaggtgctgacagaggccttccgggagaaggacacagctgtacaaggcaacattcggctcagcttcgaggacttcgtcaccatgacagcttctcggatgctatgacccaaccatctgtggagagtggagtgcaccagggacctttcctggcttcttagagtgagagaagtatgtggacatctcttcttttcctgtccctctaaaaaacattctccttgcttgatgcacactgttccaaaaaaggtggagagtcctgcatcatagccaccaatagtgaggaccgggg

SEQ ID NO: 20082 - DNA, 914 bp, Homo Sapiens
gcacgaggcacatatgggaactatgaggagcctctgatcaaattggctacaatcttggagctgcttggacggattccttggcagccgggttagcatgtgtgactttcaggctactgttcttgacaatcatctccaatggaaagcttttcagtgttcccaaagtgaactctcaaatccaaaatggttatctttgagaccatccattctcctcagtggcttctccagggaattcttacagccaagttgtgacagtcactgcatttgcctgcttctttccagaaaccaaactaggagatgaaactggttcctacatcctaaggttcttgctttctctctcatgcctcctgaggctgtttttggctgttttccctctgctgcttttggggaatgaggggaagccattttccagtgacttgcaatccaggctgttctcagcgttttgagtttaaaacctgggatcctgactaagcctttgacttaagggttgcttgcttgccctccaaatgtcctttctcagaggggccagctaacccgtgcagaaccagcactaaggtggacagcagacaagagggcaagcctctagtgtaccaagtgcttcctacaaagacgcaaggtgtgctctgagccacagatgggcaaaccctggtgctttccttcatctcccacgaactcaagggttttccaggtgtagctaacagttgccacatcacacagacctcgagtttctggtaagactgctggttgacatcagacccaacccatgaaggctggaaggcagcagcatttgctaaggcagctgatccaggcaatcgttctgctggccaagaagttaaactattttgagcattagaatggaggaaatccggtcagccaagtgcagagttcagacttcgctaaggcttgtttttcttcag

SEQ ID NO: 20083 - DNA, 1895 bp, Homo Sapiens
agtggaccacggggaccctttaaaaaaggtcgtggagggcccccaagacccaacagagggatgccgcaaatgaacactcagcaagtgaattaatctgattcacaggattatgtttaatcgccaaaaacacactggccagtgtaccataatatgttaccagaagagttattatctatttgttctccctttcaggaaacttattgtaaagggactgttttcatcccataaagacaggactacaattgtcagctttctattacctggatatggaaggaaactatttttactctgcatgttctgtcctaagcgtcatcttgagccttgcacatgatactcagattcctcacccttgcttaggagtaaaacaatatactttacagggtgataataatctccatagttatttgaagtggcttgaaaaaggcaagattgacttttatgacattggataaaatctacaaatcagccctcgagttattcaatgataactgacaaactaaattatttccctagaaaggaagatgaaaggagtggagtgtggtttggcagaacaactgcatttcacagcttttccagttaaattggagcactgaacgttcagatgcataccaaattatgcatgggtcctaatcacacatataaggctggctaccagctttgacacagcactgttcatctggccaaacaactgtggttaaaaacacatgtaaaatgctttttaacagctgatactgtataagacaaagccaagatgcaaaattaggctttgattggcactttttgaaaaatatgcaacaaatatgggatgtaatccggatggccgcttctgtacttaatgtgaaatatttagatacctttttgaacacttaacagtttctttgagacaatgacttttgtaaggattggtactatctatcattccttatgacatgtacattgtctgtcactaatccttggattttgctgtattgtcacctaaattggtacaggtactgatgaaaatctctagtggataatcataacactctcggtcacatgtttttccttcagcttgaaagcttttttttaaaaggaaaagataccaaatgcctgctgctaccacccttttcaattgctatcttttgaaaggcaccagtatgtgttttagattgatttccctgtttcagggaaatcacggacagtagtttcagttctgatggtataagcaaaacaaataaaacgtttataaaagttgtatcttgaaacactggtgttcaacagctagcagcttatgtgattcaccccatgccacgttagtgtcacaaattttatggtttatctccagcaacatttctctagtacttgcacttattatcttttgtctaatttaaccttaactgaattctccgtttctcctggaggcatttatattcagtgataattccttcccttagatgcatagggagagtctctaaatttgatggaaatggacacttgagtagtgacttagccttatgtactctgttggaatttgtgctagcagtttgagcactagttctgtgtgcctatgaagttaatgctgcttattgtctcattctgacttcatggagaattaatcccacctttaagcaaaggctactaagttaatggtattttctgtgcagaaattaaattttattttcagcatttagcccaggaattcttccagtaggtgctcagctatttaaaaacaaaactattctcaaacattcatcattagacaactggagtttttgctggttttgtaacctaccaaaatggataggctgttgaacattccacattcaaaagttttgtagggtggtgggaaatgggggatcttcaatgtttattttaaaataaaataaaataagttcttgacttttctcatgtgtggt

SEQ ID NO: 20084 - DNA, 1072 bp, Homo Sapiens
  misc_feature (812)..(820): n is a, c, g, or t
gaattcggcacgaggtggacctgtcttttgaaactgctgctctttcacttctcaggcgtcaccgagagctcagcacccaggctgaactctgtaccatttggaagaatggaagctgatgcatctgttgacatgttttccaaagtcctggagcatcagctgcttcagactaccaaactggtggaagaacatttggattctgaaattcaaaaactggatcagatggatgaggatgaattggaacgccttaaagaaaagagactccaggcactaaggaaagctcaacagcagaaacaagaatggctttctaaaggacatggggaatacagagaaatccctagtgaaagagacttttttcaagaagtcaaggagagtgaaaatgtggtttgccatttctacagagactccacattcaggtgtaaaatactagacagacatctggcaatattgtccaagaaacacctcgagaccaaatttttgaagctgaatgtggaaaaagcacctttcctttgtgagagactgcatatcaaagtcattcccacactagcactgctaaaagatgggaaaacacaagattatgttgttgggtttactgacctaggaaatacagatgacttcaccacagaaactttagaatggaggctcgttcttctgacattcttaattacagtggaaatttaatggagccaccatttcagaaccaaaagaaatttggaacaaacttcacaaagctggaaaagaaaactatccgaggaaagaaatatgattcagactctgatgatgattagagctcaataattctttgtaaattgtcnnnnnnnnnctgcttcagatttaaatgtgtttttaaaattctattaatgtctatacattggtcacctaaatactcatattctcgagttttatacagttgtatcacatcgaaaagtgtcttttactgttttctgtgtggccatcatgtttaagttgaggaaaactcagttcttaaattatctgggaaagggtctgggattctctatttttggagattgactttatcacatatgattcttacatctttataccatttacaatt

SEQ ID NO: 20085 - DNA, 958 bp, Homo Sapiens
  misc_feature (98)..(106): n is a, c, g, or t
gcacgaggggaaaatattgccaccatttgtagaccacgtaaccttcaagtatgtgctacttttttgtccctgtatctaactcaaatcaggaactgtannnnnnnnnaatgatttgcttttgaaacttgaagtcttgaaaacagtgtgatgcaattactgctgttctagcccccaaagagttttctgtgcaaaatcttgagaatcaatcaataaagaaagatggaaggaagggagaaattggaatgttttaactgcagccctcagaactttagtaacagcacaacaaattaaaaacaaaaacaactcatgccacagtatgtcgtcttcatgtgtcttgcaatgaactgtttcagtagccaatcctctttcttagtatatgaaaggacagggatttttgttcttgttgttctcgttgttgttttaagtttactggggaaagtgcatttggccaaatgaaatggtagtcaagcctattgcaacaaagttaggaagtttgttgtttgtttattataaacaaaaagcatgtgaaagtgcacttaagatagagtttttattaattacttacttattacctagattttaaatagacaatccaaagtctccccttcgtgttgccatcatcttgttgaatcagccattttatcgaggcacgtgatcagtgttgcaacataatgaaaaagatggctactgtgccttgtgttacttaatcatacagtaagctgacctggaaatgaatgaaactattactcctaagaattacattgtatagccccacagattaaatttaattaattaattcaaaacatgttaaacgttactttcatgtactatggaaaagtacaagtaggtttacattactgatttccagaagtaagtagtttcccctttcctagtcttctgtgtatgtgatgttgttaatttcttttatgcattataaaataaaggattatgtattttt

SEQ ID NO: 20086 - DNA, 950 bp, Homo Sapiens
gcacgaggatccactttacatcatttttatgttgttgaggtagggaaattagggttcagtttatcactggacattcaggaggcaagtcaatcttttttatttccttataaaattaactcttcaaaagccgttaaacagagagttatcttaatttttattgcagtaggaggaaatatatttaaaatatttgtagatttatagcaaatagagactcgttatttaaaggttaaataacaatttgttcttttgttgtttttgccagtttagggcagtagctgcttttgtcataaatatcttcctaccacatcaaaaatgctgcttttaaaatttttgtttataaattgagaaggaattttctctctataagtttctgtcattgaacagatcaccattaaaaagaatattagaatccagcatgaagataatggctaataaaaatgaggtacatactttataaaaccattaatcagatttgaatgaggaatgcttcccacatccttgaaagaaaaactgtggcttacgttttgaagtattctgagaatgaagtattaagatccaatttctataagcaagatcagacttgttaagtatgccgcaagtaagagctaattcattcattccatgtgtgccactaaataaagagattgagcaagtgccactgtgtggaacatatttctttttttaatattggactttccaattttgaaattatggataaagtcctaaattttctatagtggcttcttttctgtctgcatattttgttaaaattgtggatctaaaagccatatcctgtctttggtggtggcctggtaggaatggcttgtcctagttcttcaaaggtaagattgaccaaagcaagttctcattggtggtctgggtttacatcttccgtgtcagatattttaaagcatgaaaaaaagccattcttgccctttttcgtgtgtttg

SEQ ID NO: 20087 - DNA, 994 bp, Homo Sapiens
gcacgaggctacaagtggtctcagtggtgaaaatctaatcacaagatctcagtcaagtgaactcacaaaatggtataaaggactatgtttattagaacaaattgattcctttaagcctccccagcgatctattgacaaaccttttagattatgtgtgtccgatgttttcaaagatcaaggatctggattttgcataactggtaaaatagaagctggttatatccaaactggtgaccgactactggcaatgcctcctaatgaaacttgtaccgtgaaaggaatcactctgcatgatgaacctgtcgactgggcggcagcaggcgatcatgttagtcttactttggttgggatggatatcatcaaaatcaatgttggctgcatattttgtggccccaaagtacccattaaagcttgcactcgtttcagagcccgaatcctcatctttaatattgaaattcctatcactaaaggatttcctgtgctgttacactaccaaactgtcagtgaacccgccgttattaaacgattgattagtgtcttaaacaaaagcacgggtgaagtcacaaagaaaaagcctaagtttttgactaaaggccagaatgcattggtagagctacagacacaaagaccaatagctcttgagctatataaagacttcaaagagctggggaggttcatgctacgttacggtggttctacaatagctgctggtgttgtcactgagataaaagaatgatgggtcagaatttctaccacgtttctggatacagtgaaatagctaacctctgtttcaagaatgcagttattaagtcaaggaacaatgtgcaattgatatgtttttagatgagagagaaaaattaaagctaaaattagctgcaaagaagtattaataatcacctctgcaaaaattctaagttgccaactggcaaagaaagtctaatgttaaaaacaactttgcctttgaaacgttaataaatggatttactttgctaag

SEQ ID NO: 20088 - DNA, 873 bp, Homo Sapiens
  misc_feature (810)..(830): n is a, c, g, or t
ccgggctgcaggaattcggcacgagggtgagcgctttaaagaatgatggagaatctagtgtagcagcctccaggcaggattcagcacaacactggggagtcacccttccctcgggcctctgcctaccaacaactgggcttatcactgggaaaacacaaaaaattacacaacccagcaacaacaaaagaactagtcctcttagaatttcttgcgctttgatttttttagggcttgtgccctgtttcacttatagggtctagaatgcttgtgttgagtaaaaaggagatgcccaatattcaaagctgctaaatgttctctttgccataaagactccgtgtaactgtgtgaacacttgggatttttctcctctgtcccgaggtcgtcgtctgctttcttttttgggtttctttctagaagattgagaagtgcatatgacaggctgagagcacctccccaaacacacaagctctcagccacaggcagcttctccacagccccagcttcgcacaggctcctggagggctgcctgggggaggcagacatgggagtgccaaggtggccagatggttccaggactacaatgtctttatttttaactgtttgccactgctgccctcacccctgcccggctctggagtaccgtctgccccagacaagtgggagtgaaatgggggtggggggaagcactgattcccagttagggggtgcctaactgagcagtagggatagaaggtgtgaacctgggagtgcttttataaattattttccttgtagattttatttttaatttatctctgtgacctgccaggnnnnnnnnnnnnnnnnnnnnntgctgtttgagcacatgacaaaataaaataaaatggatgattc

SEQ ID NO: 20089 - DNA, 1399 bp, Homo Sapiens
ctggggtcccatcatagcccttggtgttatagcaatatgttctaccatggccatgattgactctgtgttgtggtattggcccttacatacaactggaggaagtgtgaatttcatcatgttgataaattggactgtcatgattctttataattacttcaatgccatgtttgtcggtccgggctttgtccctctggggtggaaaccggaaatttctcaggataccatgtatctccagtattgtaaagtctgccaagcatacaaggcaccacgttcacatcactgcagaaagtgtaacagatgtgtgatgaagatggaccatcactgtccttggatcaacaactgttgtggttaccaaaatcatgcttcgttcacactgtttctccttttagcaccactgggttgtatccatgctgctttcatttttgtgatgactatgtaccactttgtttgccttgggattagctttaggaacaaccatagctgttgggatgttgttttttatccagatgaaaataattctcagaaacaaaacttctattgagtcatggattgaagagaaggctaaagatcgaattcagtattatcaactagatgaagtctttgtttttccatatgatatgggaagtagatggaggaactttaaacaggtatttacgtggtcaggggtccctgaaggagatggacttgagtggccagtaagagaaggctgtcaccaatacagcttaacaatagaacagttgaaacaaaaagcagataagagagtcagaagtgttcgctataaagtaatagaagattatagtggtgcctgctgccctctgaataaaggaatcaaaaccttcttcacaagtccctgcaccgaagagcctcgaatacagctgcaaaaaggggaattcattttagccacaagaggtttacgatactggttatatggagacaaaattcttgatgattcctttatagaaggtgtttcaagaataaggggttggttccctagaaaatgtgtggaaaagtgtccctgtgatgctgaaacagatcaagccccagagggggagaagaaaaatagatagctgctgttaaaacaaaattatcctttaagtctgcttaattacttgaaaattgtacatattactaaagaattatgcaatgagcctactctggttaagatgttcttttcctcaaaggtgccctagtgccatgatttaaatatttttattaccattttgaaatggagaagccattctgcatatgcctttgaattcctgcccctcttttaccacctcttcctccccctcaaaggaaaaaccatttcatccaagttagtttaccggcattttctgtaaggattttcttatgcactgcaccactctggacctcacctgcagatacagttccccccttg

SEQ ID NO: 20090 - DNA, 1561 bp, Homo Sapiens
  misc_feature (1403)..(1414): n is a, c, g, or t
gcacgaggggacaacgactatctgctacatggtcatagacctcccatgccctcctttcgaggcttgcttcaagagcatcttccgcattcatacagaaactggcaacatctggacccatctgcttggtttcgtgctgtttctctttttgggaatcttgaccatgctcagaccaaatatgtacttcatggcccctctacaggagaaggtggtttttgggatgttctttttgggtgcagtgctctgcctcagcttctcctggctctttcacaccgtctattgtcattcagagaaagtctctcggactttttccaaactggactattcagggattgctcttctaattatggggagctttgtcccctggctctattattccttctactgctccccacagccacggctcatctacctctccatcgtctgtgtcctgggcatttctgccatcattgtggcgcagtgggaccggtttgccactcctaagcaccggcagacaagagcaggcgtgttcctgggacttggcttgagtggcgtcgtgcccaccatgcactttactatcgctgagggctttgtcaaggccaccacagtgggccagatgggctggttcttcctcatggctgtgatgtacatcactggagctggcctttatgctgctcgaattcctgagcgcttctttcctggaaaatttgacatatggttccagtctcatcagattttccatgtcctggtggtggcagcagcctttgtccacttctatggagtctccaaccttcaggaattccgttacggcctagaaggcggctgtactgatgacacccttctctgagccttcccacctgcggggtggaggaggaacttcccaagtgcttttaaaaataacttctttgctgaagtgagaggaagagtctgagttgtctgtttctagaagaaacctcttagagaattcagtaccaaccaagcttcagcccactttcacacccactgggcaataaactttccatttccattctcctagctggggatggggcatggtcaaacttagccatcccctcctcagcaaggcatctaccggcccctcacagagacagtactttgaaactcatgttgagattttaccctctcctccaaccattttgggaaaattatggactgggactcttcagaaattctgtcttttcttctggaagaaaatgtccctcccttacccccatccttaactttgtatcctggcttataacaggccatccatttttgtagcacacttttcaaaaacaattatataccctggtcccatctttctagggcctggatctgcttatagagcaggaagaataaagccaccaacttttacctagcccggctaatcatggaagtgtgtccaggcttcaagtaacttgagttttaannnnnnnnnnnncttggcagagtaatgtaaaatttaaatggggaaagatatttaatatttaatactaagctttaaaaagaaacctgctatcattgctatgtatcttgatgcaaagactatgatgttaataaaagaaagtacagaagagacttggcattc

SEQ ID NO: 20091 - DNA, 946 bp, Homo Sapiens
tcggcacgaggatctgcagcaccctggacctcttctttgccggaaccgagacaacttccacaactctgagatgggctctgctttatatggccctctacccagaaatccaagaaaaagtacaagctgagattgacagagtgattggccaggggcagcagccgagcacagccgcccgggagtccatgccctacaccaatgctgtcatccatgaggtgcagagaatgggcaacatcatccccctgaacgttcccagggaagtgacagttgataccactttggctgggtaccacctgcccaagggtaccatgatcctgaccaatttgacggcgctgcacagggaccccacagagtgggccacccctgacacattcaatccggaccattttctggagaatggacagtttaagaaaagggaagcctttatgcctttctcaataggaaagcgggcatgcctcggagaacagttggccaggactgagctgtttattttcttcacttcccttatgcaaaaatttaccttcaggcccccaaacaatgagaagctgagcctgaagtttagaatgggtatcaccatttccccagtcagtcaccgcctctgcgctgttcctcaggtgtaatattgttaagaaagaaaggggcaaggaaagtaagaagacatggcacgtgttctgaaaccactggtgtctgctcagatgtgttgggacaaaatgaaagtgactttcaagaaagatcagaggaatttgactcagagaaaactagatccaaatcccagctctactgtctcgtccgaataaccttgggaaaatcttttatatgctaataatttacctttttatctaggagatgaaaagaggataatgtttccttccataataaagtccttgtaagaatcaataaatggtgagccttaagttgttttgtaaaccataaacatatctataagttc

SEQ ID NO: 20092 - DNA, 1168 bp, Homo Sapiens
ggcagctgccgggcgtatgtgttggtgctagaggcagctgcagggtctcgctgggggccgctcgggaccaattttgaagaggtacttggccacgacttattttcacctccgacctttccttccaggcggtgagactctggactgagagtggctttcacaatggaagggatcagtaatttcaagacaccaagcaaattatcagaaaaaaagaaatctgtattatgttcaactccaactataaatatcccggcctctccgtttatgcagaagcttggctttggtactggggtaaatgtgtacctaatgaaaagatctccaagaggtttgtctcattctccttgggctgtaaaaaagattaatcctatatgtaatgatcattatcgaagtgtgtatcaaaagagactaatggatgaagctaagattttgaaaagccttcatcatccaaacattgttggttatcgtgcttttactgaagccaatgatggcagtctgtgtcttgctatggaatatggaggtgaaaagtctctaaatgacttaatagaagaacgatataaagccagccaagatccttttccagcagccataattttaaaagttgctttgaatatggcaagagggttaaagtatctgcaccaagaaaagaaactgcttcatggagacataaagtcttcaaatgttgtaattaaaggcgattttgaaacaattaaaatctgtgatgtaggagtctctctaccactggatgaaaatatgactgtgactgaccctgaggcttgttacattggcacagagccatggaaacccaaagaagctgtggaggaaatggtgttattactgacaaggcagacatatttgcctttggccttactttgtgggaaatgatgactttatcgattccacacattaatctttcaaatgatgatgatgatgaagataaaacttttgatgaaagtgattttgatgatgaagcatactatgctcccttgggaactaggccacctattaatatggaagactggatgaatcataccagaaagtatttgaactcttctctgtatgcactaatgagaccctaaagatcgtccctctgctgcacacattgttgaagctctggaaacagatgtctagtgatcatctcaactgaggtgtggcttgcgtaaataactgttta

SEQ ID NO: 20093 - DNA, 1310 bp, Homo Sapiens
caattaaaaaaggatcccccgggctgcaggaattcggcacgagggggccgttccacagcgggcgtggaccgtggagcagctgcgcagtgagcagctgcccaagaaggacattatcaagtttctgcaggaacacggttcagattcgtttcttgcagaacataaattattaggaaacattaaaaatgtggccaagacagctaacaaggaccacttggttacagcctataaccatctttttgaaactaagcgttttaagggtactgaaagtataagtaaagtgtctgagcaagtaaaaaatgtgaagcttaatgaagataaacccaaagaaaccaagtctgaagagaccctggatgagggtccaccaaaatatactaaatctgttctgaaaaagggagataaaaccaactttcccaaaaagggagatgttgttcactgctggtatacaggaacactacaagatgggactgtttttgatactaatattcaaacaagtgcaaagaagaagaaaaatgccaagcctttaagttttaaggtcggagtaggcaaagttatcagaggatgggatgaagctctcttgactatgagtaaaggagaaaaggctcgactggagattgaaccagaatgggcttacggaaagaaaggacagcctgatgccaaaattccaccaaatgcaaaactcacttttgaagtggaattagtggatattgattgaaatagcagtgcttcagctctaaggatattagcaacaatgataaaacttggccttgaagaaatttacacaactagttagaacttgttactattgtaaaggaagagtcaactggaaaattcaaggagttaataaaatttgtttacttggtcccagcttttgagagataaatcccttatgaatccctggtctaaaatactttcctacagctgtgtaaaatactggtcaaggagaactttttccttttacctcatgttgtaaacttaagtggctcaataaaaattgatccactgtcttgatctgactgtgatttgtttggtgttaatatattattgttctgattagggaattggaactaaggacctcatcaaaccagggagtaactcccagtaaaattatctggacagattgcctgtataatgagaaggcaaaagcataaggcttgaggggaaacaaaatgctaaaagcagaaaatcttggcaggaagatcaagacctgaatttagaaaaggtgtacttcaaaaccaatgagccactaataaagggtgaacataaggttaatattactaattgatccccccaaaataaattcataaacaatt

SEQ ID NO: 20094 - DNA, 855 bp, Homo Sapiens
agctatggaagttttctttattgattacttaatgtgtaacaataattggcatctttttcacacattacaaaaaattatacttggctcagtatgcaaccttttaagcatagccatattatttaacaaaagaggggaaaacctattctacccaacacagcatttacaaatgcacaaaacatgccactttggcttgtatattgtctaaattaaaaaaaatcttttaacataaataagttagtataatttttcagtgtttttacagagttatgtacacaggtacacttcaaatggtttttccatacacaggcaatgaaatactgtttaaagatgtagtatccatttcacttatcctacaagtgtgcttttctctacatgaaccttcctttaaaaataacactttcctgtggataaatggacagagtaagctttaaattaaaaaatatttcattttttaatgtgaagttacttacagatctttaaaaatatcgagggatttaaaattattttgactgtgtttacacagcccgaagtgaaaagaaaatgagaaaattttgtcaacaaatttaataaaagcagatggtcaattcttaacattcaaaactcccaagcacctcggatttttgccccaaactacctggagtgatcaccattctgctgagtaattaactggtaaattccaactttaagagagactggggagggcagtgaggataggtttctgttgcttttttaaaaagccacatgcagctatctaacaaactttagatagctgggagatcaccagatctccaaatgaaaataaacttcttgtaaaaataaatagcaattatctttagccagtgttccaattttgtg

SEQ ID NO: 20095 - DNA, 717 bp, Homo Sapiens
cccccgggctgcaggaattcggcacgaggtcgacttactagctgcaagcctctgcctgccttcctgcgcgccgttccccgctagtcgctgctgctggcgcgcactcgccgggtttttcctcccacggcctcgagatggtggtgaatgtggcacggaggagccgggccttccaacccggtgggcccgagctccgaaaggccccctcggcagtgagaggggcgggagcccgcgggggccgcgcccttctctcgcttcggactgcgcaacgctgcgctctgggctgacaggcggataaaacggtcccatcaagactgagaaaaagcacaccagctattggcacagcgtgggcagtggggcctacaggatgactgacttagtctacagagatcccggcgtacttaagcaggtagtaatgatggacagatgaagactcttaagatgacagaaggtgatttttctggtgatcgaggacttccggggtaatgacagtgatgaaatgcaggggacctggttgcccccaagtttcctggcagtgtgtgatactgaggaggtgagcttgtttctggagctgtgctttaagattcatgttacatgtaaagctgtcctcatttgtgactatggacctatggagttgggacaatctctatgggaagcagaaggcaaggaccccggtcattttaggtagaaacaacagcatgctaatgcaaaaaattatgc

SEQ ID NO: 20096 - DNA, 885 bp, Homo Sapiens
cgtccgacagtttcgtggtgggaacagccgagggaacagtcttccattttcaactggtccctgtgacatctaacagaactgagaagcagtgggtgcggacaaaaccgttccagcatcacactcatgacgtgcgcactgtggcccacagcccaacagcgctgatatctggaggcactgacacccacttactctttcgtcctctcatggagaaggtggaagtaaagaattactatgccgctctccgaaaaatcacctttccccaccgatgtctcatctcctgttctaaaaagaggcagcttctcctcttccagtttgctcatcacttaaaactttggcgactgggatccacagttgcaacaggcaagaatggggatactcttccactctctaaaaatgcagatcatttactgcacctaaagacaaagggtcctgagaacattatctgtagctgtatctccccatgtggaagttggatagcctattctacagtttctcggttttttctctatcggctgaattatgaacatgacaacataagcctcaaaagggtttccaaaatgccagcattccttcgctctgcccttcagattttgttttctgaagattcaacaaagctctttgtagcatcaaatcaaggagctctgcatattgttcagctgtcaggaggaagcttcaagcacctgcatgctttccagcctcagtcagaacagtggaggccatgtgtcttttggcagtcagtccagatgggaattggctagctgcatcaggtaccagtgctggagtccatgtctacaacgtaaaacagctaaagcttcactgcacggtgcctgcttacaattttcccagtgactgctatggctattgcccccaataccaacaaccttg

SEQ ID NO: 20097 - DNA, 1693 bp, Homo Sapiens
  misc_feature (231)..(270): n is a, c, g, or t
gtgtgagccaccacgcatggccctgaactttctctttttaggaataccaaagttttcaactttttcagctttagaatttgtaaatatttttgtagaatatcatatgactgtaattccagagtgttccaacttgtttatgatatatttgggtaaatttacaactgttcttttatttgccataatctggttataacactgtttgtggtaggaaaggaaaacatgcaaaacatnnnnnnnnnnnnnnnnnnnnnnnnnnnnnnnnnnnnnnnngcagagttgtgattctcagtaccaagctataggaccatgttatagatcagcgtttagtcacctccaggttatatgcatcgagaacctgaataaatcatgccactatattaatttatattacatgtttcatatttaaatcatgttttcctaaaatgtagcaactacatgtgataaaagcaaattagaacattctgtaggactgtcttgcataccttctgtctggtttccactgattccttcttagccatggagagcatttgtgattaattaatttatatatgaaataatggtttccattttatgcgagtatttgtaactgcatataccagtgcgtgtgcgtctacctctgtcagcatgaaagtattccagtctttaatttcaaaaacttcaaattagcctcatgaagagaatttttccctgtgaaaagtaagaccaagaaaaaacaaactaaagacatgtgacttattcaatgaaagtgaaaaagaagctctaaaacagtgtcattgattaaaaagaatatctggaatgtagccccactctttgagtgggattcatttcttactgcttatgaactttcaatttagtagtcagaaaccatggatttattttactgcacaatgtgaagtttacattttattaacacttgagtagtctgatttagagactagttacttctattttttaaaataatggagtaacaaattacagaatagctaaataattttttaaaaatattttacagttgtaaaaaatatccatcagaaaaatgacacacaaaacaaaatatctggacctttacagaagacgtttgctgacccccactttaaaggattggaacagtcttctagaattgaggaatatttattaaaatacctgtaaagaaaatagtgaatcactgtagcaatggctttgattcagaccttaaaatcacataagaagaattacaacatgttatggatttttaagtggcaggtattgtaactgttttttgtgtgcaaaatactgagtaaccactgggaaaatatttcagatgaaagggatgacaaaagcatgttgcgctttgcatcagcaaggcattgacttctgaaaaaatgatctgaaaaaagtttcaccgtttgtcttcttacctcattttaagaagcatgtgaaaatgggatactatagactactgagaatttcagaaattgagaacaatttcataataaaacggctatatttgaagagagaatacattttatataaacaggaaaatacatttgacactttatggaattttatgagactttttgtgggaacagaaggtcttcaaattgtaaaatgtaaagattgctctttttattaagtctttaacagggatgtatttcattgtatgttttgggtatggctttggaataaatcattttatattttatttgaatatcag

SEQ ID NO: 20098 - DNA, 895 bp, Homo Sapiens
tctctgcagcactctcatacctatcgggttgggcgtcttcattcgctacaaatacagccgggtggctgactacattgtgaaggtttccctgtggtctctgctagtgactctggtggtccttttcataatgaccggcactatgttaggacctgaactgctggcaagtatccctgcagctgtttatgtgatagcaatttttatgcctttggcaggctacgcttcaggttatggtttagctactctcttccatcttccacccaactgcaagaggactgtatgtctggaaacaggtagtcagaatgtgcagctctgtacagccattctaaaactggcctttccaccgcaattcataggaagcatgtacatgtttcctttgctgtatgcacttttccagtctgcagaagcggggatttttgttttaatctataaaatgtatggaagtgaaatgttgcacaagcgagatcctctagatgaagatgaagatacagatatttcttataaaaaactaaaagaagaggaaatggcagacacttcctatggcacagtgaaagcagaaaatataataatgatggaaaccgctcagacttctctctaaatgtggagatacacaggagcttctatcttgctgaaatattgcttcatatttatagcctgtggtagtgcacatggttaacataaaagataacactggttcacatcatacatgtaacaattctgatctttttaaggttcactggtgtattaaccaaacgttgtcacaaattacaaatcaatgctgtaatataatttgcacctggaatgggctaacgtgaagcctgaattaaatgtggtttttagttttaccatcaccaatttctatgactgttgcaatacagaatctattaaaaacagggtc

SEQ ID NO: 20099 - DNA, 831 bp, Homo Sapiens
gcacgaggcttcgattcttttctcttttttttcttcattggctccttcttagtggattctcttctctactgccctgggcttcagcctttgtgcagtactctcgatgccctgaacacacaccttccctttgcccaggcggtgcaaacaatccacttcttcaagctccaacacaaatgctgcctcctttaggatgcctgctctgtgctctccctgcctcccctagcccatacctctgctggcaccttctgtaccatgccttcagaaaccttcttatccccctcatctctggggccccctgtggatctggcatacccaagttcagtaaatgtctatcagtaagctgatggtacatgcattttctagaatagagctgggacttcccatgtggcccacatctgacctggcagcccatgtattccggtcattagggatgggaagccatgaggacctggccttctgcccgacccaggcagccattcaagttgagcaatggccacttcgaagactcaagtgcacctgatccctgcgcaacagccacaccaggagaacaggctgtccttggcggcagtaggagcaggcgccaggtttcctggagctcttggcttcagccagcccccagccagagtcctggctaggacagtgacctgatctcctcctcatgaccttctgccctggacaagccccctgaactggatttgggactgtcaaagcaactctacccctgctctggtaaactgagtataatcacaagggcctctgtaaaggaggcaggagtgtcagagtgacggaagaaaatgtatgtaacattggaagcagaggtcagagtgatgc

SEQ ID NO: 20100 - DNA, 1251 bp, Homo Sapiens
gcacgaggggcagatcagctttgagagtggtcctaagcagtaaactggatgatgttgcattagaaaaacatcaataattcatatttaagttttagtagttactactgatttgataatcacttaaattttatatatcttaatgtattttttcagactcctaattaattcccacattcactgtaactaggggcatagtccattctgttaggattatatcctctccttagaaatgttttccatcctgttgtggggatttggtattaatgtttcttcattgattatggaacttttgttccctgaagctagttaactgtgtctaaagttaaataaatacagcagaatgattgttttagcctgctcgaactgatacaaatccctgaaaccatgattggcatatgttagataacaaatgaggatgtctaagagtcatatgctgctttggaggtgtagtgaacgtgtgtacagaagttttcaatcttaactatatagtgttagtgtgatgctatactattggaaaaatagcagcttttttctattttataagttgtatgcataaacataagatttgtaatgtttcatttataaactgccttcttcaacacatgttaatagtgttttctcaaagtattgatagtatgtcttccagaatttcacaatatgcttacagtaaatatttcctagcttgttgaaatgttcaattctttgttggctttcttcttgattctgtgggggtgtataacaagcctgaaggacattgtaatcatttcttacaaggtgaaaattaagaaagattgtgtatgagagcctatatagttgttttatccattatcatctttgattaagactttaaaaaaatgctatttccagttaatgcatttggccctattgaattttcagggaccagaaaacattaaaaagttctgcatcttataatggtaaccaattaagcttgagattgttctgaaagtatcaattgctttaaaactgttgtaagtacagttggcaagatctccaagctgaaacttacacgttaaacttttgcctgtaagaatttgcacatgaatgttaatggaaaacacaaaacttaagatggcccaaaacaaaagccacaaacagttcatcatttggtgctaatctttgtaagggctctctgtggtttgacttaccccagctaccgttaaatgaggacaaatcaccttaaaacatgttcatttgattcataacaaggaaaattgggtctatgattttttg

SEQ ID NO: 20101 - DNA, 1007 bp, Homo Sapiens
  misc_feature (644)..(686): n is a, c, g, or t
cctgcacacactgatgcccgggcaaggcgtgtgcatggagctggcggagatcgaggccatccaggaaagcctgcagccctctgacaaggacgagggtgaccaccccaacaacagcttcagcccctgtagcgcccatgaccgcaggtgcctgcagaagcacttcgccaaaattcgagaccggaggcaccagtgggggcaagatgaaggtcaatggggcgccccgggaggatgcccggcctgtgccccagggctcctgccagagcgagctgcaccgggcgctggagcggctggccgcttcacagagccgcacccacgaggacctctacatcatccccatccccaactgcgaccgcaacggcaacttccaccccaagcagtgtcacccagctctggatgggcagcgtggcaagtgctggtgtgtggaccggaagacgggggtgaagcttccggggggcctggagccaaagggggagctggactgccaccagctggctgacagctttcgagagtgaggcctgccagcaggccagggactcagcgtcccctgctactcctgtgctctggaggctgcagagctgacccagagtggagtctgagtctgagtcctgtctctgcctgcggcccagaagtttccctcaaatgcnnnnnnnnnnnnnnnnnnnnnnnnnnnnnnnnnnnnnnnnnnnagcatgggtgtgcccttggggtaagccagagcctggggtgttctctttggtgttacacagcccaagaggactgagactggcacttagcccaagaggtctgagccctggtgtgtttccagatcgatcctggattcactcactcactcattccttcactcatccagccacctaaaaacatttactgaccatgtactacgtgccagctctagttttcagccttggggaggttttattctgacttcctctgattttggcatgtggagacactcctataaggagagttcaagcctgtgggagtagaaaatctcattcccagagtca

SEQ ID NO: 20102 - DNA, 1395 bp, Homo Sapiens
gcacgagggtgacatctccagcaacatccaggcaatcgtgaaggaacatcctccatcagaaacagaagagaagaacaaaatcactgctgcgatcttttattccatcagcttgacccagcagggactccaaggggtggagctgggaacattcctcataaagcgagtcgtcaaggagttgcagagagagtttcctcaccttggggtgttttcaagtctgtcacctatacctggtttcaccaaatggcttctggggcttctgaactcgcaaacgaaggagcatgggaggaatgaactctttacagattcggaatgtaaggaaatctcggagatcacaggtggccccattaacgagaccctcaagctcctcctcagcagcagcgagtgggtgcagtcggagaagctggtgcgggcgctgcagactccgctgatgaggctgtgcgcctggtacctgtatggagagaagcaccgcggctacgcgctgaaccccgtggccaacttccacctgcagaacggggcggtgctgtggcgcatcaactggatggcggatgtgagcctcagaggcatcaccggctcctgcggcctgatggccaactaccgctacttcctggaggagacgggccccaacagcacctcctacctcggctccaagatcatcaaagcctctgagcaggtcctcagcctagtggcccagtttcaaagaacagcaagctctgacagtaaacctctcctaagcacagggccccggctaagaaaacgatcattttcaggaggggccgggagttatgtatctgaagcagctttccaagcaaagccaaagttgactgtgttcttgtcccgcagccggtccacactgtgaggccaggcctcaacttccctcaccctgggcgtgacatgcacccagtgcaagacggttgtgggtgcgggtgcacacaaatgagtgggttgctgtgctgtctccggaagattctgtcgttgcccttggcctggctccctgcccggggctggtgctgtggtacctacatcttcaggaagctgtgcagcctctgccattgccatcccagggggatctggcatcctcctaaggaccggggcgcgtggcccagataagaataggtgttcctttgtgctcataaaacagaatgcggcgatggttgctttagccgtttctcaccatgcaatgcagagggacaaagggctgtgctacacttcccagttacattctgaagctcataaatgtatgagaaggtttgtgattttgcacaaggtgtgtgtagtaagttaaattgttgaacacaaaaatgttgctgcttgaggcataagttggataataggctttaaatgatcagggattcaggttcataatgaacttcacagtaaagaacacgtttgttctgt

SEQ ID NO: 20103 - DNA, 731 bp, Homo Sapiens
ggaaaaacaaaaacaggcttgttttatttatacacaaaacaacttatgtacagcactccggtatggactatgtacatgaaaatacaaaaagcgtttgtttccccgggggtcactatataaattaaaattataaataccaaggggtaagccccacctgagggcacaaaaccttttctccaaaaatcttcagggatccttcctgcctctctctgcacagcaaaacatgaggcccgtctgggaacaccacaaggggacctgggccggggcagcaaaacagcccccaaaaagcgaggaaaccccagtgcgggacgccagcccagcaccaaagggcaggttcctaaacactcatgttcattccttcctcacattctaacttgttaaaattaaaaaaatggtttttatgtaaacagtgttgttctaatcactgacaacatattaattttaaacacttttgatccaaacccaactccttgccaggaataagacactgaggacttggggtggccctgatgtccttgaaaccacagtcagctgtttatcctcctcatgtcccctccccacccaagttccagccttgcctggggcttgttctgggactctaaaaaaccccaggatgctcacattctcaggccagcaggggcaatggtcatgcaggggactgcgggaaaagttcccatcatctcccgtgttaacccattccacctggaaaccaagcgactgccgtgggctgg

SEQ ID NO: 20104 - DNA, 1299 bp, Homo Sapiens
gcacgaggagaaactcatgtgtgcatccaacaaactgccctggagctagttggccgaggagtcgaggttcacattgttgctgatgccacctcatcaagaagcatgatggacaggatgtttgccctcgagcgtctcgctcgaaccgggatcatagtgaccacgagtgaggccgttctgcttcagctggtagctgataaggaccatccaaaattcaaggaaattcagaatctaattaaggcgagtgctccagagtcgggtctgctttccaaagtataggacatttgaagaactggtatgctactcactggtgaaggacagtcaggtgaaggactgtaagcccacacaagctcttcttatctctactagaattaaaatgttaagtcaaaaacggctccttttttgcgcctcctagtgaaacttaaccagctagaccatttgagtaccagcatttagttacaaacgtcaaaggcttccggtgctgcttaccttccttttttgttaatgtgcttttatttattaaaaaaaattacaatgaagatgcctgttttgtctctactgtgtactctgatcgtatctttccaaagtgcagactcttgtgaagttttcttaaattgttcactttaaagaaaatgacgtaccaacaatgatttggcttttatattactgtaagatgttataatgttaatgtggatgtagtgcttttactttacagattgattggaataagattattgcatatgaatttacccacaggactctgaatcatgttacccactcccctcacaatgttgtccacttagtgagttgcattgatctatccgtaccaaatgatgttgaataattacatatctttcttgactatactgatttcttattttggtcactattactaaatctctgttaatattctctcttttaactgaaaagggatgggatagaagggtttgcaatgccatattattggtggagggctgttttaacatctttgaagtatggcttgctgaatatctttaccaacatcttgaatatatattctagtgtccacaagatttagcaaaaagataaagcttgggtggaatatcattttaaaatgttcatgttctgttctatattttcttcacctactctccaaatattgtaatgcaaaaagtctcagtaatgatttggtagtattaattttgtggtcattgtttctcttcgataaatttattttcattaaatacttattagagggttttgaaatgtttttcaaatatgtgaaatgtgaaactgctgtcttttatattaaagtaattaaag

SEQ ID NO: 20105 - DNA, 1188 bp, Homo Sapiens
gcaccaggcctgctagagctctttcagccgtttggaacagaaatggagcgagcagaagttctaacaggtttaagaactggtcagttgccggaatccctccgtaaaaggtgtccagtgcaagccaagtatatccagcacttaacgagaaggaactcatcgcagagaccatctgccattcagctgctgcagagtgaacttttccaaaattctggaaatgttaacctcaccctacagatgaagataatagagcaagaaaaagaaattgcagaactaaagaagcagctaaacctcctttctcaagacaaaggggtgagggatgacggaaaggatgggggcgtgggatgaaagtggacttaacttttaaggtagttaactggaatgtaaatttttaatctttattagggtatagttggtacaatgcttcgttgtatttagtaagcctttacaagacttgttaaagatgtcagagtgccccaagctgccgttccttcccttcctgccccacaagctccttttcctgaatttcctacctaaatattaaccatatgcctagtctctgaaactaaaaacttggacctcatcctcaattattttctcctttcaactctgttgaccctctgtctggtcttcctctagaaggttctaccgcagaaattgatgtgtgctccctgccctcgtcactgcccaagcccgggcctgcacatactcactggactgttccagttttgacagctgccagtcttcctgcccctttcacactgcagctgaagttcattacctgaaggacgcctcatcatttcattccttggctccaaaccttctgctgcctctaagataaaagctcaacttcttaacagtgtacagtgtgcaacttccaacctttttatctgttctctccaccttcagtttagcgtcattccaaaaccacacccttgcaaagctttgtactccgcaccccagatgatctccaggcagctcagatctctttcctgcctttgccctgcactgttccccggtacttcctcctttattgtagcactcagctccccagccaatctgtacatccctcagaggcagcgatctgatgaattggtttttgaatcccagaaagggtctgccatggagttggcagtcatcacggtagatggcgtatgattttgctgattttaaataaaatgaaaaccataa

SEQ ID NO: 20106 - DNA, 382 bp, Homo Sapiens
  misc_feature (334)..(348): n is a, c, g, or t
gcacgagggaggcctggaggcgtctacactggctccacatccacttcccccgcagctcgtgtgggcgctcgtccacaaacactctgtggctgagaggcagcggatccaggcagcgatgctgagccacctcctccgagccttcctttcacacagaccaccccggaggacacgtggatgatggggtcagagatcactgagctgcccctcaagggggcctggaacccgggtgctggggtcatgctgcctccgtggctccaaggtgagggtcatcttcacgagcaaagagaaccaataaagtgacaacgaacgtctgaggcttccagccctccccccnnnnnnnnnnnnnnngggccggccgctcgcgatctagactagtccggac

SEQ ID NO: 20107 - DNA, 1071 bp, Homo Sapiens
gcacgaggccgcgatggccgaacctgcgtctgtcgcggctgaatctctcgcgggcagcagggcgcgcgctgcacgcacagtactaggtcaggtggtgctcccgggtgaggagctgctcctgccggaacaggaggacgcggaaggccctgggggtgcagtggagcgaccgttgagcctgaatgctagagcgtgctcgcgggtgcgcgttgtatgcggtccgggccttcggcgctgtggggaccgcctgctggtcaccaagtgcggccgcctccgtcacaaggagcccggcagtggcagcggcggcggtgtttactgggtggactctcagcagaagcggtatgttccagtaaaaggagaccatgtgattggcatagtgacagctaaatctggagatatattcaaagttgatgttggagggagtgagccagcttctttgtcttacttgtcatttgaaggtgcaactaaaagaaacagaccaaatgtgcaggttggagatctcatctatggccaatttgtggttgctaataaagacatggaaccagagatggtctgtattgacagctgtggacgagccaatggaatgggtgtcattggacaggatggtctgctttttaaagtgactctgggcttaattagaaagctattagctccagattgtgaaatcatacaggaagtgggaaaactctatccactggagatagtatttggaatgaatggaagaatatgggttaaggcaaaaaccatccagcagactttaattttggcaaacattttagaagcttgtgaacacatgacgtcagatcaaagaaaacagatcttctccagattggcagaaagttgatataggtggacttttttacaggtcagttgaggcaaaaaactatgggttttttcaggtgaacctcccccatttaaatactcagaagataaggtgtgaatgtatgtattattagagtccgaaagtatttttataagttactggttttcacccacgcttttgtgggagagaaaatcattgcaaaatcattttttttgttcggtacaataaagtttactaaaaaaccctcgtgc

SEQ ID NO: 20108 - DNA, 1440 bp, Homo Sapiens
gcacgaggcagacgcggaggctggtggcccctgggcgagatgccgtacgccaaccagcctaccgtgcggatcacggagctcactgacgagaatgtcaagttcatcatcgagaacaccgacctggcggtggccaattcgattcggagggtcttcatcgctgaggttcccataatagccattgactgggttcagattgatgccaattcctcagtccttcatgatgaattcattgctcacaggcttggattaattcccctcattagtgatgacattgtggacaagctgcagtactctcgggactgcacatgtgaggagttctgccccgagggctcggtggagttcaccctcgatgtgcggtgcaatgaagaccagacgcgacatgtcacgtctcgagacctcatctccaacagcccccgggtcattccggtgacatcccggaaccgagataatgaccccaatgactacgtggagcaggatgacatcctcatcgtcaagttgagaaagggccaggagctgagacttcgagcctatgccaaaaagggctttggcaaggagcatgccaagtggaaccctactgcaggggtggcttttgaatacgatccagacaatgccctgaggcacacagtgtaccccaagcccgaggaatggccaaagagtgagtactcggagctggatgaggatgagtcgcaggctccctatgaccccaacggcaagccagaaaggttttactacaatgtggagtcctgtggctctctgcgtcctgaaaccattgtcctgtcagccctctcaggattgaagaagaaactgagtgatttacaaactcattaagccacgagatccagagtgatgtgctaaccataaattaactgcagcttgcctgcttcagcaaaaacggagattcaggccagcagctggatagtctactgttggttgagcttcttggcaggacatcagtaccaactagaagtgggtcatagatagattaccagggatgcagtggtgtttaggcaggataggtctttactggccctgactgctgttaataattggcagcagtgctccccagatcccagaaggtccctgctggagtgtttccagtgcacctgtagggaaccaactagacttctctcctggttagtccagctctttactctaaaccctttctgtccaaaatgagtcattttcagttgtaccttagatgtctggtgttgaggatcaagtgccatagcctttattcagggggcctataaacccttccagttcttgccccagggctggcctgctagcgcttcaaattcccaggtgtccctaatttgagaagtaaccttttggaatagcattagaccctggctgtcccctccccaccaaataaacatgatatttcattctctgtccagcagtcatgaaccccttcacctccaatgacctgatcatttagtt

SEQ ID NO: 20109 - DNA, 1264 bp, Homo Sapiens
gcacgaggacagggcgggagaagcggtggtagcggaggctgtagtggggctggtggtgcttccaactgcgggacaggaagtggccgtagcggcttgttggataagtggaagatagatgataagcctgtaaaaattgacaagtgggatggatcagctgtgaaaaactctttggatgattctgccaaaaaggtacttctggaaaaatacaaatatgtggagaattttggtctaattgatggtcgcctcaccatctgtacaatctcctgtttctttgccatagtggctttgatttgggattatatgcacccctttccagagtccaaacccgttttggctttgtgtgtcatatcctattttgtgatgatggggattctgaccatttatacctcatataaggagaagagcatctttctcgtggcccacaggaaagatcctacaggaatggatcctgatgatatttggcagctgtcctccagtcttaaaaggtttgatgacaaatacaccttgaagctgaccttcatcagtgggagaacaaagcagcagcgggaagccgagttcacaaagtccattgctaagttttttgaccacagtgggacactggtcatggatgcatatgagcctgaaatatccaggctccatgacagtcttgccatagaaagaaaaataaagtagccaattctaaaagtagccctctttctcctggatcttgctgaattagtggcttggggggtgggggagataaaaagaacttaaaatgggtaaagtaagaaatgttaaaaagtccctgttttgtcctgaaattttagtctattctgggtaaataggattttctgacacagatatgagaagttgtagctctgatgtctagctgtagtctccttgatctgctgattgcattattttaatttgcttttctgggaaagcagttttgctaaaagctgtacagactttttcttttgtacctagcagtactttatatagtatagctttgggccatgtagcattttaagactcaattttaaaaaattattaatctgttgctgactcttaattcctatttcaatatgtgtttccttgaagaattcaggatacaacttcttgtgtatgacagctttccttcacacactatttttgtgggtgtgtatatatctgatttgggaagaatttaaaaaacacatagctttttaatttgtttgaaacagactttctgcctgttacatttttgcttttaaccaattaaagaagccaatggcattttagtttt

SEQ ID NO: 20110 - DNA, 1746 bp, Homo Sapiens
gcacgagggggcggcggtggtgcggcggtcgccgttatggccactgggctgggcggctgaccgccgggctaggaaagggcccagggccccgaatctcggtggccgctgctccagcgcggcctgcgccatggcctcctccgccgcctcctcggagcatttcgagaagctgcacgagatcttccgcggcctccatgaagacctacaaggggtgcccgagcggctgctggggacggcggggaccgaagaaaagaagaaattgatcagggattttgatgaaaagcaacaggaagcaaatgaaacgctggcagagatggaggaggagctacgttatgcacccctgtctttccgaaaccccatgatgtctaagcttcgaaactaccggaaggaccttgctaaactccatcgggaggtgagaagcacacctttgacagccacacctggaggccgaggagacatgaaatatggcatatatgctgtagagaatgagcatatgaatcggctacagtctcaaagggcaatgcttctgcagggcactgaaagcctgaaccgggccacccaaagtattgaacgttctcatcggattgccacagagactgaccagattggctcagaaatcatagaagagctgggggaacaacgagaccagttagaacgtaccaagagtagactggtaaacacaagtgaaaacttgagcaaaagtcggaagattctccgttcaatgtccagaaaagtgacaaccaacaagctgctgctttccattatcatcttactggagctcgccatcctgggaggcctggtttactacaaattctttcgcagccattgaacttctatagggaagggtttgtggaccagaactttgaccttgtgaatgcatgatgttagggatgtggatagaataagcatattgctgctgtgggctgacagttcaaggatgcactgtatagccaggctgtgggaggagggaggaaagatgaaaaaccacttaaatgtgaaggaacaacagcaacaagaccagtatgatataccaaggtaataaatgctgtttatgacttctttaaatttacatagtactgtagcatattaataccctgtgaactgcaaaaaaccaaatacatttacagtagtattggtcaccaaaatagaggggaaactttacaattgtgagaatgtgtaaatgttctcattaaggcagtattgacccagacaaccatttagtattcatctatcccctcaatgcctcataattctggaatgcctgttgtgaaacatgtcagtgcacagtgtctcctaaattctcacacgtgcttgattttctgattcatctggtgaactgggagtaggaagttggtcatagacaatatgccctccttctcttgtctgaccaaagcttgaagcaatcacatctactgccaggttagctgtagtcttcgcctcttcctctgaggtggccaactgaggattgacttcaacaagatccagtgctgatagcaaccctggaagaacaaagtgtgacaaaacctcaggttcccttgctgctactctcagtgagggtcatcccactgggacagggagaacaagccaaagtaaaaacaagagtccattttatagtagaaaatacctatttttaggaagccccttgcacctcatcctcttggccatgaatttaagttaaaacactgttgtgctatagtagattaaaagaaaccttttaagataatgaaataaaccatccctgcctcgtgc

SEQ ID NO: 20111 - DNA, 784 bp, Homo Sapiens
gcacgagggcgctgtcctggctgcagcgcgtcgagcttgcgctctttgctgccgccttcctgtgcggggccgtggcggccgcggcgatgactcggacccagggctccttcagtggtagatgtcccctgtatggtgtggccaccctgaatggctcctccctggccttatcccgtccctcagcaccatccctgtgctactttgtagctggggcctctggcctcttggccctctactgcctcctgcttttgctcttctggatctacagcagctgcatcgaggactcccacagaggtgctatagggctgcgcattgcactggccatctcagctatagccgtcttcctggtcttggtgtctgcctgtatccttcgatttggcaccaggtctctctgcaactccatcatctccttgaacactacaattagctgttctgaagcccagaaaattccatggacaccccctggaactgctctgcagttttactccaacctacacaatgctgaaacctcttcttgggtgaatttggtattgtggtgtgtggtcttggtgctccaggtcgtgcagtggaagtctgaagccaccccataccggcctctggagaggggtgaccctgagtggagctctgagacagatgctctcgttgggtcacgcctttcccattcctgaagaataagcggagtgcttcctgcagcccgaagactccatgcccaagtgcctgtaatcccccccctcaaggccctgtttatgttgggagtcttagttttcctttcgttggggggtggggg

SEQ ID NO: 20112 - DNA, 1472 bp, Homo Sapiens
cggccgctctagaatcccattaggaagcccccgggctgcaggaattcggcacgaggaaagcattggccccaggccaaaatcataaacgctttcaattaactaataataattgctggcatgttgccattaaatattcttgtctcattatctctggttgctttatcaaacccataggtcactgaagcccacttttgagacaaagactatttctcccccaaaagtcaagggaaatataaaaaatgaaattagtgattaagaatagaagtcaattaatacattcattttgtcttaattatttaaagtccagttttttccctccagcaaacctgaaaatacactatcctccagctatcagaattatattgagatctactcacatttatgatgatgttcagagattctcattgggaaggaaaaggcacacgctgcggcggtcttgcatgactctgttgttgtggaaattcaatttgttcattgtgttttgggctctctgggtggtcagggctgggctctgggtccttggcaattcctcaggttcccagcactccaaagccaagctcacctcctcatcacacaccctacaggagaagcattagggtgtccgactacgtgggtttcatagctgtggaaaagccaaaggggagactcctgaagaaaggcggtgaagactgtgaagagcgggtcaggaagatgagcacagcactgctactcctgtgggcacagggacagcatgtctccagccagcgccaccttgtttaatacatgggaactcactgaaattcattctgtattttgcccgcaaagttttaaagctttcatccacagtcaggaattaaacttataccaatgagagcctcacacattcaaggatgtactaagcactacaggcctcacagaaacagagatcccatcttggagttttcagtaccacatgggagataaagggttttgaacatgaaatgacaaaaacaacagcaagaagaaaattcttgtcctttttcattactatcagactcaaataaatgtcttggctcttacattacattcattcttcaaccattgtggtctggcttccacttccttcacttcaccaacatggctctgccaaaggaagcccgtgatctctaggccatcactttaattgatctttctacaacatttatcctggttgttaagccctccttacaacattcttctctctttgtttttatagctccatctctcctgcttctttaacttgataatgcatacttgatttttctatttgttatttcataaaccaattaatacacagataaaaatgactgtatatcaaaccatgtttgtatagaaaaaatggattttggatgcctctcatatgtaattagttctattaaacatattaattgtattgtttaatttgtcagtttttgacagaattttgtttacaagtaataaaaattttatctccaattttcataattacacccatt

SEQ ID NO: 20113 - DNA, 884 bp, Homo Sapiens
  misc_feature (734)..(751): n is a, c, g, or t
gcacgagggtcccctggcgctacccggacatctctcagggtgccggcaccatgaagatctggacttcggagcacgtctttgaccacccgtgggaaactgttacaacagctgcaatgcagaaatacccaaaccctatgaacccaagtgtggttggagttgatgtgttggacagacatatagatccctctggaaagttgcacagccacagacttctcagcacagagtggggactgccttccattgtgaagtctcttattggtgcagcaagaacgaaaacatatgtgcaagaacattctgtagttgatcctgtagagaaaacaatggaacttaaatctactaatatttcatttacaaacatggtttcagtagatgagagacttatatacaaaccacatcctcaggatccagaaaaaactgttttgacacaagaagccataattaccgtgaaaggagttagcctcagcagttaccttgaaggactgatggcaagtacgatatcctcaaatgctagtaaaggccgagaagcaatggaatgggtaatacataaattaaatgctgagattgaagaactgacagcctcagcaagaggaaccataaggactccaatggcagcagcagcgtttgcagagaagtgatcgtgacagttggtagacaacatcgggtactccaggtctctccaaactgactatatatttatttgttattttaaaaatacaactatattttgggtagcnnnnnnnnnnnnnnnnnngataagttggtgtaaggctatgtgacttgatcaaaacagatgcagggcctctaataaaagggatcatctgaaattaatgttgtttgaaattactatctgatttgagggttcagtattctgtgaaaatcaacaa

SEQ ID NO: 20114 - DNA, 1630 bp, Homo Sapiens
gcacgaggcatccctcctatcatatcctatcaggctagatatctcattagtagactgaatacaaagctaattttttttacatgtcaatattggcacaaactggaatgaaagaatagtttgattcatacgtgctccattatgtgttgataaaacacatgctatgaccactccaggaaacactatattttttccaaaaaatatgtgattatatatgttaaagtatagataacatttcacacttggatacatatgtgcatttactgtatttcttggtaagcatatttttgggggaaagtgctgctgatatgatacaagtagacaaaatttaaatgaaattttgtcacattctatggaaaatggtttctggtaaactgagaaggatattaaaataagtggcttttttctgggctaccattattgtttgatttctctttgtcaagtgtatagaacctgtcatacattcatgataagtagcactgaaaaattactcattcaaatttcccctgggcacgtaaggcaaaatattgccggttgggatttcaaggtcagtgacgacgcatttcctcccagtacagaccccccagccccccttgctggacatggggaggcagagagtcacttgaccatccagaaatacatgactacaagtcctttatgactgtttgccattttttttaatggtacttagtattttgatcaaactttagtctccagaactaaacaagtccctaagtttccttattttaatttactgtgactagatttgaagcaaataaatactccagatccatgcagctagaacacacttgcttccactactaaatatacagggtatgtcctaacatggagttaactggaatagcagtacactagcaagtatctgtgaatccttagcactgacgggttaacagaaatgctttggtaatacctacttagttaattggaggaagtagtaaataaacattaggtaatctgcagattacttcaaatgggaaaaatctttttgtagactctatagtaccctctctattcactagcttctgaaaagggaggagtatttttagtttgacaatttaataatttaaaaacaagacatctccaggtaggaaaaaatgaaagctatttcatgcaaacattatctaatttagcttaaaagtgaaagtggtaatactgttggtttctgtaaatgttgcagggttttaaactttataattactttaatatttttgataactagaaatctagtattgccataaaggaaactaagtgcccatcaaagatttgtttggtataaataaagaattatttgttttgttttcaatgacagtaagctacaaatcatgatgcttaaaaactttctaaagatgaattgtgtggcagtgattggtctgtttgtggagaatgtatgaaagctattaatattctagaatagattaataaattggctatgttgttccaatgaatgtacagcacttccattaacttttgaaagcaacacagccttaaactcaatgcttttgctttatgacatgggaatgttctgtcatcaatggagtgtattcttgtaatagaattctttatatcgttctcattctatagactttcaagcctatgtatgaatatgaagggg

SEQ ID NO: 20115 - DNA, 929 bp, Homo Sapiens
gcacgagggctgactggagaaaaagccatctacaaacgtcggggtgagctggagccacaacttggcagcccacaacagaaacccaagcgtctgcgcctggtggtagatgtgtctggtagcatgtaccgtttcaacaggatggatggccggcttgagcgcacaatggaggctgtgtgtatggtcatggaagccttcgagaactatgaggagaagttccagtatgacatcgttggacactctggagatggctacaacattggtctggttccaatgaacaaaatccccaaggacaataagcaaagactagaaattctgaagacaatgcatgcccactctcagttctgcatgagtggggaccacacgttagaagggacagaacatgccatcaaggaaattgtcaaagaagaagctgatgagtactttgtcatagtcttgagtgatgcaaatctgtcacgatatggaatacatcctgctaagtttgctcaaatcctcacaagagaccctcaagtaaatgcttttgccatttttattggctctttaggtgatcaagcaaccaggcttcagagaactttaccagctggtcggtctttcgttgccatggataccaaggatatccctcagattttacaacagatcttcacctccaccatgttgtcgagtgtctaagaagtgcccttcatcaccctgatgacaccaggatttgaaataagacaggaataaagagtattctgaaaaaaagaagatatggatgaagtgaacccatgcagtgactggatgattccggcattcctgggtcttcctacacttgctccgtaatgagaattcagagaagcagccagaaggagacttaaacatggaaagatactccactgatgagtttagaagtgattagggcaagctagttgacctgcactttatcaaaggttggg

SEQ ID NO: 20116 - DNA, 2319 bp, Homo Sapiens
cccccgggctgcaggaattcggcacgaggcgacgacctgtctcgccgagcgcacgccttgccgccgccccgcagaaatgcttcggttacccacagtctttcgccagatgagaccggtgtccagggtactggctcctcatctcactcgggcttatgccaaagatgtaaaatttggtgcagatgcccgagccttaatgcttcaaggtgtagaccttttagccgatgctgtggccgttacaatggggccaaagggaagaacagtgattattgagcagagttggggaagtcccaaagtaacaaaagatggtgtgactgttgcaaagtcaattgacttaaaagataaatacaaaaacattggagctaaacttgttcaagatgttgccaataacacaaatgaagaagctggggatggcactaccactgctactgtactggcacgctctatagccaaggaaggcttcgagaagattagcaaaggtgctaatccagtggaaatcaggagaggtgtgatgttagctgttgatgctgtaattgctgaacttaaaaagcagtctaaacctgtgaccacccctgaagaaattgcacaggttgctacgatttctgcaaacggagacaaagaaattggcaatatcatctctgatgcaatgaaaaaagttggaagaaagggtgtcatcacagtaaaggatggaaaaacactgaatgatgaattagaaattattgaaggcatgaagtttgatcgaggctatatttctccatactttattaatacatcaaaaggtcagaaatgtgaattccaggatgcctatgttctgttgagtgaaaagaaaatttctagtatccagtccattgtacctgctcttgaaattgccaatgctcaccgtaagcctttggtcataatcgctgaagatgttgatggagaagctctaagtacactcgtcttgaataggctaaaggttggtcttcaggttgtggcagtcaaggctccagggtttggtgacaatagaaagaaccagcttaaagatatggctattgctactggtggtgcagtgtttggagaagagggattgaccctgaatcttgaagacgttcagcctcatgacttaggaaaagttggagaggtcattgtgaccaaagacgatgccatgctcttaaaaggaaaaggtgacaaggctcaaattgaaaaacgtattcaagaaatcattgagcagttagatgtcacaactagtgaatatgaaaaggaaaaactgaatgaacggcttgcaaaactttcagatggagtggctgtgctgaaggttggtgggacaagtgatgttgaagtgaatgaaaagaaagacagagttacagatgcccttaatgctacaagagctgctgttgaagaaggcattgttttgggagggggttgtgccctccttcgatgcattccagccttggactcattgactccagctaatgaagatcaaaaaattggtatagaaattattaaaagaacactcaaaattccagcaatgaccattgctaagaatgcaggtgttgaaggatctttgatagttgagaaaattatgcaaagttcctcagaagttggttatgatgctatggctggagattttgtgaatatggtggaaaaaggaatcattgacccaacaaaggttgtgagaactgctttattggatgctgctggtgtggcctctctgttaactacagcagaagttgtagtcacagaaattcctaaagaagagaaggaccctggaatgggtgcaatgggtggaatgggaggtggtatgggaggtggcatgttctaactcctagactagtgctttacctttattaatgaactgtgacaggaagcccaaggcagtgttcctcaccaataacttcagagaagtcagttggagaaaatgaagaaaaaggctggctgaaaatcactataaccatcagttactggtttcagttgacaaaatatataatggtttactgctgtcattgtccatgcctacagataatttattttgtatttttgaataaaaaacatttgtacattcctgatactgggtacaagagccatgtaccagtgtactgctttcaacttaaatcactgaggcatttttactactattctgttaaaatcaggattttagtgcttgccaccaccagatgagaagttaagcagcctttctgtggagagtgagaataattgtgtacaaagtagagaagtatccaattatgtgacaacctttgtgtaataaaaatttgtttaaagttgaacctcgtgccgaattcctgcagcccgggggatttttttataggttctagagcggccgcc

SEQ ID NO: 20117 - DNA, 675 bp, Homo Sapiens
cttttcttcaatgataagagctgtcagttttctgtggatgaagaatttcagaaactgtggaggagtgtcactgtagattccatggacgaggagaaaattgaagaatatctgaagcgacagggtatttcttccatgcaggaatctggaccaaagaaagtggcccctattcagagaaggaaaaagcctgcttcacagaaaaagcgacgctttaagactcataacgaacacttggctggagtgctgaaggattactctgacattacttccagcaaatagggaacagttttgccctggaacagagttacagatacacaatcaagagtgttcttgctgatgctcggggtctgaagactgtcttcctatctgcttcttgcggctgaggagaggagcagttcagtttacaaaacaagtgcaaattaccaaactcaaagcttatttgagtagaatgggctcatgggcaatgtgatgttccctgttaaccttctgttactccctgggagaaaggcgctgagcgtggcatgcaggtgtctttgctgtgtttttctccacttctaaatggttcctggttcctttcttcctcgtttgttactttagagcaagtttgcccatagtcttgaatgcaatatttgtttattccaaaagaacatatttataataaaatcactgtagaaggat

SEQ ID NO: 20118 - DNA, 931 bp, Homo Sapiens
gcacgaggccttaaagaaagcactttattttccatttaaacaacttggtcacaggacgttattttacataaatggaagtaatttgtaaaatttccatgtaaaaggccttgtgtctgagtctgaggtgataagaggatatgaatacaagtatataaaaacagtgcaaaatgtgcagcccacagcctccggagttggcttcagaaatcccccttaatgttgctagaccagttacattaaatattaaatgtaacaccaggtaaatattcctgggtttcctttagtctaacatccaacccagatatgcaataaaatgaaaaactcaaaatccctaacaactcaaaccatccaatcacccagaccattaggatcacaatgagttgagactgcaggctctatactgtgacatctcgtcagtggctccatcttaagaaatacagaattttagttgcatcagtaactagaatagactagctctgcttttaaagctttgccttttaaatgtagatttctagaagttcactttcaaggtgccatcaagaaggctaggccactaagaagtcacaagcccaacctagacatcgcagcctcttaagacatttgtcttcactaaccgttcagtctttaacctgctgctgatcctacaatgaaaacacttagtgccagctgaagcgtggatgcttgtctatcagcaacataattaagtgtagctgattctgcaagaaatttatattagtcacagcagacatccacaggaacatactgaatcgtactcagtagtgagtttagatggctttcctgctcccctgcatcacccttgcagtgtttaatacaaaaggtgcacatgtcaagctgccgctgaaaaaacagattccaacaggcgcctcaggaaagtctcttattatccattgcttgcttaagcaactctactttt

SEQ ID NO: 20119 - DNA, 918 bp, Homo Sapiens
gcacgaggtatatatcattctctgaagagcatattttattaatcttcaagttcctcagcatattaataataaaaacttgatatatattatcaacaagtctgactgttatgcccaaagaaaatccagattattttaaggtgagtttgcttctttttcatctgattcatcatccataacctgttctacgccttctacctccggaatataaaactgcagcatgttctgaattccatttttcagagtaatgattgaactagggcagctggtacaagaaccctggagtttcagctgtacaatgccatcttcaaagcctttgtagattacatcccctccatcttcctgcacagttggccgtattctagtatctaacaattccttaatcattgccacaacttcatcatcttcttcagatcctgcttctcctgaaggtgtttcctcagtaaccaggggtaagccagatgcaaagaagtccatgattgttgcataaatatctggtttcagtaaattccagtctaattcttcattttcctttgtgacagtgatgaaatctggtccaaagaagacactttttactccttcaatcctaaataactgcctagccagaggggagcgaaatgctgcagctggggtgggaaaatccatggtccttgtctcaagaactggttttcctggtataaactttaagctgtttggatttggggtatcttgtgtttgaataaacatgtatctcactgggtgataaaaggctgcaggtagtgggaaaagtggtctttgtacaaactgatgcagaggctgtttcttaatggtgtatggattcttcaacatatgacagaaccgcctgcgcagcccggcggcaacagccgcagctccccagccccgcctggccgtcgccgccatcttagtccggagtgcctaagg

SEQ ID NO: 20120 - DNA, 1355 bp, Homo Sapiens
gcacgaggctcgctcgctccccgctctggagtacgtgtctggcttgggagccgctcggacacgctggcttgggtctgccatcatggatgttctcgcagaagcaaatggcacctttgccttaaaccttttgaaaacgctgggtaaagacaactcgaagaatgtgtttttctcacccatgagcatgtcctgtgccctggccatggtctacatgggggcaaagggaaacaccgctgcacagatggcccagatactttctttcaataaaagtggcggtggtggagacatccaccagggcttccagtctcttctcaccgaagtgaacaagactggcacgcagtacttgcttaggatggccaacaggctctttggggaaaagtcttgtgatttcctctcatcttttagagattcctgccaaaaattctaccaagcagagatggaggagcttgactttatcagcgccgtagagaagtccagaaaacacataaacacctgggtagctgaaaagacagaaggtaaaattgcggagttgctctctccgggctcagtggatccattgacaaggctggttctggtgaatgctgtctatttcagaggaaactgggatgaacagtttgacaaggagaacaccgaggagagactgtttaaagtcagcaagaatgaggagaaacctgtgcaaatgatgtttaagcaatctacttttaagaagacctatataggagaaatatttacccattggtgcttccatatgttggcaaggaactgaatatgatcatcatgcttccggacgagaccactgacttgagaacggtggagaaagaactcacttacgagaagttcgtagaatggacgaggctggacatgatggatgaagaggaggtggaagtgtccctcccgcggtttaaactagaggaaagctacgacatggagagtgtcctgcgcaacctgggcatgactgatgccttcgagctgggcaaggcagacttctctggaatgtcccagacagacctgtctctgtccaaggtcgtgcacaagtcttttgtggaggtcaatgaggaaggcacggaggctgcagccgccacagctgccatcatgatgatgcggtgtgccagattcgtcccccgcttctgcgccgaccaccccttccttttcttcatccagcacagcaagaccaacgggattctcttctgcggccgcttttcctctccgtgaggacagggcagtcttggtgtgcagcccctctcctctctgtcccctgacactccacagtgtgcctgcaacccaagtggccttatccgtgcagtggtggcagttcagaaataaagggcccatttgtgggatgccgcattccctcgtgc

SEQ ID NO: 20121 - DNA, 1998 bp, Homo Sapiens
  misc_feature (917)..(984): n is a, c, g, or t
gcacgaggcccagatccagaaagatggctgccaatgcgagaacgttcttactaccggggaagaaagaagggtaaaaagaaggatcagattggaaaagggacccagggagcaactgcaggagcttcatctgaactggatgccagtaaaactgtgagcagcccacccacctccccaagacctggcagtgctgcaacagtatctgcctctacaagtaacatcatacccccaagacaccagaaacctgcaggggctccagcaacaaaaaagaaacagcaacagaaaaagaagaaaggtggaaaaggtggctggtgatgagaatattcttgttgcaggctgtttttaaactagtgtcagtgacactaggaatataataaaggtaacacagcaagaagcacagaactactccctcttcatctccatattttcataatttcttgtgtttcaaatagggaaacatcttcctcaaagtctgcctagtgagatatggcctactggttgcctcatagctttgtacagattatgaggactgaaaataattgggcatttacccatcttggtatctgttgtatcctttatctgtgtgtgctgatttgatcttttttcagtttcacataccttatctaaggtttcccaggatttaaacagaaactacttctatgatttcagctggagtctgaagatacttgtttctgttcaagtcccactttaaattatgtcttaggagactgaaagtggaatcttctgagcattcctaaatatctgcttagaaatatcatgtgataaagagggaccttcttaatacactgatgttcttcactaaatggatggccacaagaaaaataaagtaaatgtcttaaataatttaaccataaattttctgtcatgtgatactggaatatgggatacttttcatgttnnnnnnnnnnnnnnnnnnnnnnnnnnnnnnnnnnnnnnnnnnnnnnnnnnnnnnnnnnnnnnnnnnnnggctcctttgtgccccatgtcattttcagattatggtagcatgctgatacagcaccatgaaagaactcaaggaaaatatatcaatgtaagaagttcactcttagacctagtgttctgaggtcacatgggtttggactgtctcaatcagaaagattaatgactgttatcaagaacatgaacattggcttcctccatagagaagaaatcagtatctgagttgcataccaggcagtattaaaatctaacaggtctgtttggcccattgatagatactcaaatggtgtctccttctggttatggattttgaccattgattacctttctcaatgtaatgaagtattttacagtcaatttgtggtgtaaatgttgctcttgtctttccttgcttacaaactactttcacattgaacagctgtgagacagacatattgagatgcctgcccttgttagtattcattttatgctgcccaagatatcatttaatttagacttaacaagtatttccttgtgattatattactctgtccttgttaataaagtgctgctgtgtttgactctgaacatactaccaaaacttcttcaaagagttttttatgaaagactttcctcctttacaagaaagaaatggggtgctgcctttctgtttagtaaaagcagaatttgcagtggcatctaaaagagatcttttttaaataaaaattatgtattgtggcataatcctttttttgagctctacagagaacagtcttttggtaatagtggcaggtatttattccttctgaatatataccccattataggaataactgttacttatttagggattccatcattgaaaattttgacccaaggcacagcagtgaaaatttatagtttctcaatttagttgtcttattgacaggcatgggtattattattcattgctaaaccaactgaaacttcatcagttcaaataagttttattgtcaaatgaaggataaacactggaaccttctagaaatattccctctttgg

SEQ ID NO: 20122 - DNA, 2232 bp, Homo Sapiens
gcacgagggtgggtctgacggcttgagtagcgctagggagaatccctgcaggtaatatttgacttttgcttcatattaatctgagtggaaaataaaagggccctcttctcctctcgcttccctgccgggcaggcgccatggcggaagcctcggcgacgggcgcctgcggagaggcgatggcagcggcggaaggctcctcgggcccggcgggcttgactctgggccggagcttctcgaactaccggcccttcgagccccaggcgttgggcctcagcccgagctggcggctgacgggcttctccggcatgaagggctgaggctgcaaggtcccgcaggaggcgctgctcaaactcctggcgggactgacgcggccggacgtgcggcccccgctgggccggggcctggtgggtggccaggaagaggcgtcccaggaagccggcctgccggcaggagcgggccccagccccacctttccagccctgggcatcgggatggactcctgcgtcatccccctgaggcacgggggcctgtcactggtgcagaccacggacttcttttaccccttggtagaagatccctacatgatggggcgcatagcttgtgccaacgtgctgagtgacctctacgccatggggattacgagggtgacaacatgttgatgttactcagcgtcagccagagtatgagtgaggaggaacgcgaaaaggtaacgccactcatggtcaaaggctttcgggatgcggctgaggaaggagggacggcagtgaccggtgggcaaacggtggtcaacccttggattataatcggtggagttgccactgtagtatgccaaccaaatgagttcataatgccggacagcgccgtcgttggggacgtgctggtgttaaccaaaccgttaggaacccaggttgctgtcaatgcccaccaatggctggataatcctgaaagatggaataaagtaaagatggtggtctccagagaagaggtggagctggcctatcaggaagccatgttcaatatggctaccctcaacagaactgctgcaggtttaatgcacacatttaatgcccatgcggccacagatatcacaggctttggcattctaggacactcccagaaccttgcaaaacaacaaagaaatgaagtgtcctttgttattcataatctgccaataattgccaagatggctgccgtcagcaaggccagtggacggtttgggcttcttcaaggaacctcagctgaaacctctgggggattactgatttgtctgccaagagaacaggcggctcgcttttgttctgaaatcaaatcctccaagtacggagagggtcaccaagcgtggatcgttggcattgtggaaaagggaaaccgaacggcccggatcattgacaagccgcgagttattgaagtcctgcctcgtggggccacagctgctgttcttgctcctgacagttcaaatgcctcctctgagcctagctcgtgagatgaaagaacagaagttgtttggaccttagagccattgtccacaatcacggatggttctcaagagttgattgtaagaaatttccaaagaaggctgcctgcatagtggttccggctgccctttctaggtgattggaatcagcccatctaaagcagtctttatatgcattccgaggccagagtaacattttgaactttggggggatatttgttcatcacttgggtagaagaggagcaaaaatacctctgttttctcttgccaaagtaagatgaagctattccaggttgagggatttttctttgcacggggttgattaatttctgcacagggagtgagattattaaagtaacacacacacaaagtaaattgcaaaatgaaaaaaattagaagcaaatgagttttggaccaatattgttgataaatctaaattgttaagagagatcttataatgcaacatcaaattctttattcaattttactgaagtactggctctttcctgctctggacaagaattgagcaacttgtctgatgactgggaaaggaggacctgcaaccatctgacttggtctctgttaatgacgtctctccctctaaaccccattaaggactgggagaggcagagcaagcctcagagcccaggcctcagtggtcattaagatgttaagtcttttgcggcagattcctggtgatttgatcaataaagagtaatttcttgctaaataaataaaagaaaccttgttgaaaaact

SEQ ID NO: 20123 - DNA, 1829 bp, Homo Sapiens
gcacgagggggagctggcgccatggtgctgttgcacgtgctgtttgagcacgcggtcggctacgcgctgctggcgctgaaggaagtggaggagatcagtctgctgcagccgcaggtggaggagtccgtgctcaacctgggcaaattccacagcatcgttcgtctggtggccttttgtccctttgcctcatcccaggttgccttggaaaatgccaacgccgtgtctgaaggggttgttcatgaggacctccgcctgctcttggagacccacctgccgtccaaaagaagaaagtactcttgggagttggggatcccaagattggtgccgcaatacaggaggagttagggtacaactgccagactggaggagtcatagctgagatcctgcgaggagttcgtctgcacttccacaatctggtgaagggtctgaccgatctgtcagcttgtaaagcacagctggggctgggacacagctattcccgtgccaaagttaagtttaatgtgaaccgggtggacaatatgatcatccagtccattagcctcctggaccagctggataaggacatcaataccttctctatgcgtgtcagggagtggtacgggtatcactttccggagctggtgaagatcatcaacgacaatgccacatactgccgtcttgcccagtttattggaaaccgaagggaactgaatgaggacaagctggagaagctggaggagctgacaatggatggggccaaggctaaggctattctggatgcctcacggtcctccatgggcatggacatatctgccattgacttgataaacatcgagagcttctccagtcgtgtggtgtctttatctgaataccgccagagcctacacacttacctgcgctccaagatgagccaagtagcccccagcctgtcagccctaattggggaagcggtaggtgcacgtctcatcgcacatgctggcagcctcaccaacctggccaagtatccagcatccacagtgcagatccttggggctgaaaaggccctgttcagagccctgaagacaaggggtaacaccccaaaatatggactcattttccactccaccttcattggccgagcagctgccaagaacaaaggccgcatctcccgatacctggcaaacaaatgcagtattgcctcacgaatcgattgcttctctgaggtgcccacgagtgtattcggggagaagcttcgagaacaagttgaagagcgactgtccttctatgagactggagagataccacgaaagaatctggatgtcatgaaggaagcaatggttcaggcagaggaagcggctgctgatattactaggaagctggagaaacaggagaagatacgcttaaagaaggaaaagaaacggctggctgcacttgccctcgcgtcttcagaaaacagcagtagtactccagaggagtgtgaggagatgagtgaaaaacccaaaaagaataaaaagcaaaagccccaggaggttcctcaggagaatggaatggaagacccatctatctctttctccaaacccaagaaaaagaaatctttttccaaggaggagttgatgagtagcgatcttgaagagaccgctggcagcaccagtattcccaagaggaagaagtctacaccccaaggaggaaacagttaatgaccctgaggaggcaggccacaaaagtggctcctagaaaaagaggaaattctccaaagaagagccggtctgcagtgggcctgaagaggcggttggcaagagcagctccaagaagaagaaaaagtttcataaagcatccaagaagattagatgcaaatggacatcctctgggag

SEQ ID NO: 20124 - DNA, 1390 bp, Homo Sapiens
  misc_feature (407)..(437): n is a, c, g, or t
  misc_feature (890)..(920): n is a, c, g, or t
  misc_feature (1134)..(1144): n is a, c, g, or t
gcacgaggctcgagtctgaggccgttgctgacttagaatccctgtgttaatttaagttttgacaagctggcttacactggcaatggtagtttctgtggttggctgggaaatcgagtgccgcatctcacagctatgcaaaaagctagtcaacagtaccctggttgtgtgtccccttgcagccgacacggtctcggatcaggctcccaggagcctgcccagccccctggtctttgagctcccacttctgccagatgtcctaatggtgatgcagtcttagatcatagttttatttatatttattgactcttgagttgtttttgtatattggttttatgatgacgtacaagtagttctgtatttgaaagtgcctttgcagctcagaaccacagcaacgatcacaaatgacnnnnnnnnnnnnnnnnnnnnnnnnnnnnnnngttgttgggggaggggagactttgatgtcagcagttgctggtaaaatgaagaatttaaagaaaaaaatgtcaaaagtagaactttgtatagttatgtaaataattcttttttattaatcactgtgtatatttgatttattaacttaataatcaagagccttaaaacatcattcctttttatttatatgtatgtgtttagaattgaaggtttttgatagcattgtaagcgtatggctttatttttttgaactcttctcattacttgttgcctataagcccaaattaaggtgtttgaaaatagtttattttaaaacaataggatgggcttctgtgccccagaatactgatggaattttttgtacgacgtcagatgtttaaacaccttctatagcatcacttaaaacccgttttaaggactgactgaggcagtttgaggattagtttagaacaggnnnnnnnnnnnnnnnnnnnnnnnnnnnnnnnctttagacttgaaaagagacaggcaggtgatttgctgcagagcagtaagggaacaagttgagctatgacttaacatagccaaaatgtgagtggttgaatatgattaaaaatatcaaattaattgtgtgaacttggaagccccccaattttactttgtaaattttgattttttttccccctttgtacataatactgaaccccttgtagatttgannnnnnnnnnnaatttactgcatttagggagtattttaataagctagttgaatacttgaaccataaaatgtcccgtaagatcactgtttagatttgccatagagtacactgcctgccttaagtgaggaaatcaaagtggtattacgaagttcaagatcaaaaagggttataaaacagagtaattttgttggttcaccattgagaccgtgaagatactttgtattgtcctattagtgttatatgaacatacaaaagca

SEQ ID NO: 20125 - DNA, 1556 bp, Homo Sapiens
gcacgaggcctcaactggctggacgcgcagagcgggctggcctcggcccccgtgtcgggggccggcaatcacagttactgccgaaacccggacgaggacccgcgcgggccctggtgctacgtcagtggcgaggccggcgtccctgagaaacggccttgcgaggacctgcgctgtccagagaccacctcccaggccctgccagccttcacgacagaaatccaggaagcgtctgaagggccaggtgcagatgaggtgcaggtgttcgctcctgccaacgccctgcccgctcggagtgaggcggcagctgtgcagccagtgattgggatcagccagcgggtgcggatgaactccaaggagaaaaaggacctgggaactctgggctacgtgctgggcattaccatgatggtgatcatcattgccatcggagctggcatcatcttgggctactcctacaagagggggaaggatttgaaagaacagcatgatcagaaagtatgtgagagggagatgcagcgaatcactctgcccttgtctgccttcaccaaccccgcttttttggcgaatcctagtaagagtgacagaagcaggtggccctgtgggctgagggtaaggctgggtagggtcctaacagtgctccttgtccatcccttggagcagattttgtctgtggatggagacagtggcagctcccacagtgatgctgctgctaagggcttccaaacattgcctgcacccctggaactgaaccagggatagacggggagctcccccaggctcctctgtgctttactaagatggcctcagtctccactgtgggcttgagtggcatacactgttattcatggttaaggtaaagcaggtcaagggatggcattgaaaaaatatatttagtttttaaaatatttgggatggaactccctactgacctctgagaactggaaacgagtttgtacagaagtcagaactttgggttgggaatgagatctaggttgtggctgctggtatgcttcagcttgctggcaatgatgtgccttgacaaccgtgggccaggcctgggcccagggactcttcctgtttcataaggaaaggaagaattgcactgagcattccacttaggaagaggatagagaaggatctgctccgcctttggccacaggagcagaggcagacctgggatgccccagtttctcttcagggatggatagtgacctgtcttcattttgcacaggtaagagagtagttagctaacctatgggaattatactgtggggccttgtgagctgcttctaagaggctaacctggaaactaagctcagaggcaaggtaataaagcacttcagggcttgctccccaagtgggcctgatttagcaggtggtcctgcgggcgtccaggtcagcaccttcctgtagggcactggggctagggtcacagcccctaactcataaagcaatcaaagaaccattagaaagggctcattaagccttttggacccaggaccccagagaggaaaaagtgacttgcccaaggtcgtaagcaagctactggcatggcaaga

SEQ ID NO: 20126 - DNA, 977 bp, Homo Sapiens
gcacgagggtgacttgggtacgttggggctttgagcgagcctccccgcaccctcccataggaccccaggacagactgcgtcctcgctgacccgccctaggctgaagaaacacttaaattctggaaatagcgactcagtatcatggccagcagccttaatgaagatccagaaggaagcagaatcacttatgtgaaaggagacctttttgcatgcccgaaaacagactctttagcccactgtatcagtgaggattgtcgcatgggcgctgggatagctgtcctctttaagaagaaatttggaggggtgcaagaacttttaaatcaacaaaagaaatctggagaagtggctgttctgaagagagatgggcgatatatatattacttgattacaaagaaaagggcttcgcacaagccaacttatgaaaacttacagaagagtttagaggcaatgaagtctcattgtctgaagaatggagtcactgacctctccatgcccaggattggatgtggtcttgatcgtctgcaatgggaaaatgtatctgcgatgatcgaggaggtatttgaggcaacagacatcaaaattactgtgtacacactctgaaccagtgaacattttggatgtttccgtgttctcctgtgtcatctctactgggccataggaccgggcaaacctaccttaaaataggcagaggaaagtttcatgagaagtagtgtgtttaacaagacagactttggttgctgtattcaagtatttggattatgactgtggaggagggcttgcttaagatatgtggttgtgtttttttgtggaaaagtaaggagttaggtggcttgataataggcagggaaaccagattgtcgggactatgacctttttctccagtatgctacctgatttgtttggctggccactaagtgcagcattggttctacttctctgctttttagagaatttcaggaggatgatcattccagtta

SEQ ID NO: 20127 - DNA, 731 bp, Homo Sapiens
  misc_feature (357)..(387): n is a, c, g, or t
ccttggctgacatcgcccagaagctgcagttggatagccccgaagatgcagagttcattgttgccaaggccatccgggatggtgtcattgaggccagcatcaaccacgagaagggctatgtccaatccaaggagatgattgacatctattccacccgagagccccagctagccttccaccagcgcatctccttctgcctagatatccacaacatgtctgtcaaggccatgaggtttcctcccaaatcgtacaacaaggacttggagtctgcagaggaacggcgtgagcgagaacagcaggacttggagtttgccaaggagatggcagaagatgatgatgacagcttcccttgagctnnnnnnnnnnnnnnnnnnnnnnnnnnnnnnnacaggctttttcccccttgggggtcccctgcccagggcactgtccccattttcccacacacagctcatatgctgcattcgtgcagggggtgggggtgctgggagccagccaccctgacctcccccagggctcctccccagccggtgacttactgtacagcaggcaggagggtgggcaggcaacctccccgggcagggtcctggccagcagtgtgggagcaggaggggaaggatagttctgtgtactcctttagggagtgggggactagaactgggatgtcttggcttgtatgttttttgaagcttcgattatgatttttaaacaataaaaagttctccacagtg

SEQ ID NO: 20128 - DNA, 1264 bp, Homo Sapiens
gcacgaggcaaaaacctgccacagaaacaagtatgaacacagcttcacattcactctgtgagcaaactatggttaattcagagaatacctactcctctggcagtagcttcccagttccaaaatctttgcaagaagccaatgcagagaaagtaactcaggaaatagtcactgaaagatctgtgtcttctaggcaggcgcaaaaggtagctacacctcttcctgacccaatggcttctagaaatgtgatagcaacagaaacttcctatgtcacagggtccactatgccaccaaccactgtgatcctgggtcctagccagccacagagccttattgtgacagagagggtgtatgctccagcttctaccttggtagatcagccttatgctaatgaaggtacagttgtggtcactgaaagagtaatacagcctcatgggggtggatcgaatcctctggaaggcactcagcatcttcaagatgtaccttacgtcatggtgagggaaagagagagcttccttgcccccagctcaggtgtgcagcctactctggccatgcctaatatagcagtaggacagaatgtgacagtgacagaaagagttctagcacctgcttccactctgcaatccagttaccagattcccactgaaaattctatgacggctaggaacaccacggtgtctggagctggagtccctggccctctgccagattttggtttagaggaatctggtcattctaattctaccataaccacatcttccaccagagttaccaagcatagcactgtacagcattcttactcctaaacagcagtcagccacaaactgacccagagtttaattagcagtgactaatttcatgtttccaatgtacctgatttttcatgagccttacagacacacagagacacatacacattgatcttaaaatttttctcagtcactgatatgcaaaggaccacactgtctctgcttccaggagtattttagaaatgttccacaatttactgaagacatagagatgatgctgctgcttagtgccttttagcaagctatgcaaacaatcctgataaaacaagatacatagagagtcaatctggcttctgagaatttaccaagtgaacagagtacctagttcatcagccgtccagtaaagcaacccaaggaaactgactgggtctctttgcctaccgtattaacattaaacattgatgtttctgtattctgtactttactgcaccccagcagactttcaacaactcattgat

SEQ ID NO: 20129 - DNA, 2013 bp, Homo Sapiens
gcacgagggtgttttcaatccttgggagggtgccatccacattttaacagtacctgtgcctgagaatttaatttttaaaagactttgatgtgtttttgtatgaagtacttttaacgtatgtatttcattgctgtgtcacactctgtgttttgtgaggtgaatgtcttccttttctttctccctaaccactaatgttagaattgatttccaagaatcggcatgtatacttaatactgaatttctttgatttaactgacttaacaactgactaaccattgatgagcactcctgatttttatctagaacattcagatttaccataatgttccttagtggtagaggtgtgtgcctagtgatgtagaaagatacactgacttggtgcaaggccatctgcttaccacatcacaccacttggagatctttgcttccttgcttttatgtttgtacacaacacctaaaaccagttttgctgctataattctatactgttgattcgtctgcgattttatctgttaaccaaataaaacataatagaatttcctaatgagatatatctttatacttaaacagcttttttagaggtgagttttaaagaagtctcttaattctgatgctaggttgtttttaaaaccactatgcaaagaactcaccacaagccaccttttgtagtgttctccactaatactggttatcctgtgctacagagaaaatcaaagcagtcataagctccagttttcgtattgcaaataagactcttacctacaaaatgagattcagtgaactaatttggtttttactcaaccaaattaaaaatttttttaaggaaaattagcagttggtctattcagaatcaaacctttttatattttatactgcactttagtgtattttctgtcactgtaggtatagaagatctgcctcccctgtggaaattggggtctgttggtgggcttgcccctgaagcctggcttgggttgaaaagtgttcccgccctaaggccttggtgccctgaacctctgatgcctaccgggttctcctgatttgagtttcctttaaatactccctttttgagtaattttctgatgggaggaaagtagcagtcatcatctttttgtgtgcaggctgtctcatttatttttagccattgtcgtttcattcattttgtgtaatataaaccgtgtgtcatgtcaaagtgaaagacatttcaaatctgtagcataggctagtgggcaggtccgcacagtcgaagccacacctggtctgttttctgtgcactgtagccttagtgtcacctttcttcttgtgtctccttatggtacactccagcggttgccttttttatcatttctactgaagttgggaaattcaaccccagaaattgacagatgaaaggagacaatggttgtgtagggagatggagaaaatgcttaatctgaggatgagacagggttttttcatttttgtgggggctagaaaaaacataaaatgaggcagttaaataataatagttaatgaaggtgtgctacagaaaataatctggtgttcttgctaactttgcccttcactgttgcttaattgtgaacagccaaaagctatatgttatggcttattgtgtgaaggtaactaagaagtggtgttccatgacttcagagtacatccatgcggagtccattatttgagtttgacatttaataactttgctggaaaatctgtaaaaaagaaaaacaagtttgctagtgactaagccccgcatatgtgagtgaaagtacttcaggcacgctgcctcctggtaacagctatgcagggagggaggacccacactgctacacttctgatcccctttggttttactacccaaatctaaatagatacttttgataatagataactgctcttttactaagacatagtctctacctatagaaatgtattttgaaaacacttattttacacagcaattttgtatccatttaaactaaccttttatcaataaagcactattgtttagatatt

SEQ ID NO: 20130 - DNA, 1771 bp, Homo Sapiens
gcacgaggaatggagtaaaatactggagctgctaagacacatggttgcacagaaggtgaaaccaaatcttcagacttttaataccattctgaaatgtctccgaagatttcatgtgtttgcaagatcgccagccttacaggttttacgtgaaatgaaagccattggaatagaaccctcgcttgcaacatatcaccatattattcgcctgtttgatcaacctggagaccctttaaagagatcatccttcatcatttatgatataatgaatgaattaatgggaaagagattttctccaaaggacccggatgatgataagttttttcagtcagccatgagcatatgctcatctctcagagatctagaacttgcctaccaagtacatggccttttaaaaaccggagacaactggaaattcattggacctgatcaacatcgtaatttctattattccaagttcttcgatttgatttgtctaatggaacaaattgatgttaccttgaagtggtatgaggacctgataccttcagcctactttccccactcccaaacaatgatacatcttctccaagcattggatgtggccaatcggctagaagtgattcctaaaatttggaaagatagtaaagaatatggtcatactttccgcagtgacctgagagaagagatcctgatgctcatggcaagggacaagcacccaccagagcttcaggtggcatttgctgactgtgctgctgatatcaaatctgcgtatgaaagccaacccatcagacagactgctcaggattggccagccacctctctcaactgtatagctatcctctttttaagggctgggagaactcaggaagcctggaaaatgttggggcttttcaggaagcataataagattcctagaagtgagttgctgaatgagcttatggacagtgcaaaagtgtctaacagcccttcccaggccattgaagtagtagagctggcaagtgccttcagcttacctatttgtgagggcctcacccagagagtaatgagtgattttgcaatcaaccaggaacaaaaggaagccctaagtaatctaactgcattgaccagtgacagtgatactgacagcagcagtgacagcgacagtgacaccagtgaaggcaaatgaaagtggagattcaggagcagcaatggtctcaccatagctgctggaatcacacctgagaactgagatataccaatatttaacattgttacaaagaagaaaagatacagatttggtgaatttgttactgtgaggtacagtcagtacacagctgacttatgtagatttaagctgctaatatgctacttaaccatctattaatgcaccattaaaggcttagcatttaagtagcaacattgcggttttcagacacatggtgaggtccatggctcttgtcatcaggataagcctgcacacctagagtgtcggtgagctgacctcacgatgctgtcctcgtgcgattgccctctcctgctgctggacttctgcctttgttggcctgatgtgctgctgtgatgctggtccttcatcttaggtgttcatgcagttctaacacagttggggttgggtcaatagtttcccaatttcaggatatttcgatgtcagaaataacgcatcttaggaatgactaaacaagataatggcagtttaggctgcacaactggtaaaatgactgtagataaatgttgtaattagtgtacacgtttgtatttttgttaatatagccgctgccatagttttccctcgtgc

SEQ ID NO: 20131 - DNA, 915 bp, Homo Sapiens
gcacgaggatctttgtacccctatagtgtgaattctttttattgaaatttaatacacttacagaaaaaaatgtacatattataattgttcatagagctcagtgaattttcacaaactgaacaaatctgtaaaccacacccagattgagaaagggaacatgacaaacaccctgcaagtctcccttgtgccctgtgctggggggtgccaacaccaccacctcctagtctgatgatgtactaggagattcacagactcagcctgtagtcatactcatggctatgttttactacagcgaaaggctaggaagcaaaatcagcaaaggaaaaaagcgcatggacaaagtccagggaaaccaggtgtaagcctcccacagtcctctcccagcagagtcacataggacacaattcctccagcaatcagttgtgacaacccatgtgcaatgttgtatacaagggaagctcattacagactcagtgttcagggttctcattgggagctgctcacctcatcctctgcctaacacatatgaaaatctgactcccagaaggaaagcagatgttgggcataacccacattgtttgtacgaacagtttaggcacagtgagccactcttatcatttagggagtaatgagaaccctcctgaaatccaagctttcagatgccagccaagggccagccttgcaaacaggcctgctttctcatctcttttcacacagtccatctccttattgaggcttctttacagcaaaattattattagtaggaccacatgcaaaagggtgagaccaacctcaaatatggacctcagttcttcctggtaggggtcctggacttaaccagctaaaataaatcccattaaccataaagtctatcttaggaagccaggtggcttcctccttaattcctttttgttg

SEQ ID NO: 20132 - DNA, 864 bp, Homo Sapiens
ctctgctactcgaatcttgtgtggagcccttgtctttcctactattgctacaatagttggtaaattgatgttcagtagtgttaactctaatttacaaaggacaatcttgggtggaattgcgtttgttgccataaaaggagcatttaaagtttacttcaaacagcagcaatatttacgacaggcacaccgcaaaattctgaattatccagaacaagaagaagcataaaactgacttctggttgttctgcagttctctcatccttatgaatctgttgtgttgttttgattccatcattaatgcacttgtggagacttgtgataagctgctgctcctatattttttaagaaatataataaagcacttagggcaggggaaatcatctcggtaatcatggaacctaaggatgtgatttgttttcattgtttgtatgtactacttttatggcagtcatatgaaccattatcttagcatggtaaacctgggttttgttcatattttctccagacagaaatgcaaagatcaaactgtgcaaatattaaaaaaatgcacatgctgttttattcaaatgcctcttttgtacatgttcatgtttagtgttttctcagaatcagcaactcaaggtactatgaggatttttctcactgacataatttgattacatactaaataagaggatatgttaatatgaggaaatgtaaattaaattagttataaataaataacccaaaatgtatgtaaacattccaatgattatctgaacaaatgagattttgtggtgttttcttaacccatgtgatgtcctccaaaatgtgtaggtaaaaattcaagggcttcagatcactttttcatattaagggggggcc

SEQ ID NO: 20133 - DNA, 1287 bp, Homo Sapiens
gcacgaggctgttattcgggcattctacggagggagatattcttgagcttgttgatggtcactttgataccaagattggacacaaagtagagagtgaaagttaccgaaagattgcagacagcattgggtgctcaaccaacaacattttgtttctgacagatgttactcgagaggccagtgctgctgaggaagcagatgtgcacgtagctgtggtggtgagaccaggcaacgcaggattaacagatgatgagaagacttactacagcctcatcacatccttcagtgaactatacctgccttcctcaacctagagaagggttgttaaggcagaccgccctgttccccagagttgtccctgtagtgtctaggtttattctaatggtaaaagtaacttacttaaaaaacatatgtacacatatgtatgcaagtatgtatatatgtgtatgctcagattaacttccataggtacataagtgaaagaagtctcagttcagtgaacacaaaacttatttaaagatgctttatatgtagaaattgtttcaaatcatactctaacccttagtgagggcaaagtgtagttggtagaagaaattgctaaatacctatctaatgtgctatgtttatcaaatcgtgtactaaaatggaaagctagttttgagaaattattcagaagccttgttattttaaaaatgaaatatttcaaagactgaatattttcaaagaaaatgaataattcattgcccttgtgatttagaagattataacagctgtatttcatatttgcctccttatatatatcaaagaccaaggtatttccttctgcttcaaaagaacaaaattgggaaagaaaactcacttgagtcttgatcaaacaagtgtcttttacttaagaagaaacttggtaatcattgtggcacccacagcaagcagttgccttaccagtgaaaaaggtgcactgaggtaacatctaaaacagagatgtggttcttaatgtttaacagaacagttctaatcctgccacgtgttatcattatagattttatagttgcctttctaactacttagcacagtttgagaatacgttaattgctatttactatttaaaaagttttactgaaatcagtccataacattaagatgagccctaatatgtaagattttcctctggaatggatgtgagaaatgtaaattttataacagcagtatttatcctggtttaattctaatacgatgtcatgttaatttcatgttgtgattaataaaagcattttttcttcactcaaaaaa

SEQ ID NO: 20134 - DNA, 802 bp, Homo Sapiens
gcacgaggcccaggcccaaggccaagtgagagagcccaggccacaggacatgctgccattctgccaagagaggctcttctgggggccaggctgggactgggccccggaaaccaaaactccgtgccttacccagccggggccctcctggagccttcttggggtgttgtggctgggaacccgacaggcaccagtgccctgccaggcctggtgccctcctggaccgcctgcacgtgccagcctcccacctgcttcctaaaggcaaccctggcccacacccgcatgcgcccggtgcagcctgccaagggccagtcggggggtgctgcgtcctgccagtgtccaccacagctctgcctgcccttcagcccagcaaggtttaatcaaaatgcaatgctttgcaagtctttactgcttggaggtggctgagttgggggccctgggcaggggtaagctggcaggcagtgccatggcaggccagggtcccctcccatggggtctggcccccgttccagcatgtccagcccctgaagttggagttgggggcggtctgcctttgctgccactgccaggcctctgccctgcagctgaaacttggccatcacatcaacagaaaacccctcccagtgccagctgcccagcgtgggcaggccctggggacaatacaggtccacctgagggggctgcagggtgacacccagcagccgctgccccctcactgcccacccagcgagggcagcctacccgagcctgccccctgccctgtgtgtgccctgaggctggcggctggatgcgtggctcataaaaa

SEQ ID NO: 20135 - DNA, 1206 bp, Homo Sapiens
gcacgaggatcccccccacttaagactgtgtattctagttttgtcaaactgtagaaatgatgatgtggaagaacttaggcatctgtgggcatggtcaaaggctcaaacctttattttagaattgatatacacggatgacttaactgcatttttagaccatttatctgggattatggttttgtgatgtttgtcctgaacacttttgttgtaaaaaaataataataatgtttaatattgagaaagaaactaatattttatgtgagagaaagtgtgagcaaactaacttgacttttaaggctaaacttaacattcatagaggggtggagttttaactgtaaggtgctacaatgcccctggatctaccagcataaatatcttctgatttgtccctatgcatatcagttgagcttcatataccagcaatatatctgaagagctattatataaaaaccccaaactgttgattattaggccaggtaatgtgaataaattctataggaacatatgaaaatacaacttaaataataaacagtggaatataaggaaagcaataaatgaatgggctgagctgcctgtaacttgagagtagatggtttgagcctgagcagagacatgactcagcctgttccatgaaggcagagccatggaccacgcaggaagggcctacagcccatttctccatacgcactggtatgtgtggatgatgctgccagggcgccatcgccaagtaagaaagtgaagcaaatcagaaacttgtgaagtggaaatgttctaaaggtggtgaggcaataaaaatcatagtactctttgtagcaaaattcttaagtatgttattttctgttgaagtttacaatcaaaggaaaatagtaatgttttatactgtttactgaaagaaaaagacctatgagcacataggactctagacggcatccagccggaggccagagctgagccctcagcccgggaggcaggctccaggcctcagcaggtgcggagccgtcactgcaccaagtctcactggctgtcagtatgacatttcacgggagatttcttgttgctcaaaaaatgagctcgcatttgtcaatgacagtttcttttttcttactagacctgtaacttttgtaaatacacatagcatgtaatggtatcttaaagtgtgtttctatgtgacaattttgtacaaatttgtataggtttccctcgtgc

SEQ ID NO: 20136 - DNA, 720 bp, Homo Sapiens
gcacgaggtttttgaagacacaaaaagtcagagagactttatttaaatagagttaatttgaagtaaaccagagagttttgtgtgcagaaccattttgcttaacttagggccatcaccacattatgaactcgtgtgtgtgtgtgcgcacgcacgcgtgcacaggctagtgtccttctgtgggtgtgtctgcgtgaggacccatccatgcatgtttgatctttatggcctccccctgtgcacctgcgcctatggataaggtatagtcttgtcttgattcccagtattcattctccttgaagaatcctgacagccttcagtcaccttcccttttccagtctcccaaaagcaatggcgccttaaatgtgcggtaaggatgaggtgagtcttgaggtagcctaggccacagctgccccttcaaggcaaggcctcagctgagttcaggaaataggagaacctggccccggagcaaccccagaagcgcaggaccacgaacgtcccgacccccagcagcaagaggccgcccaggaccccaaagaagatgccgaagaacgcgtcgagtttcatgctcaggtgctcacagtgctcgccccacgccgtgtaaatggagaaggacacacagctgcagcggggcccactgggcaggtgctggcactggcctccatggtcacagtagccgctactgcacgggggacacgcaggtgaagccgctctgggggctgt

SEQ ID NO: 20137 - DNA, 573 bp, Homo Sapiens
  misc_feature (528)..(543): n is a, c, g, or t
cgtccgccccgtcgttccctttcccctggctgggcagcgcggaggccgcacgatgcctggagttactgtaaaagacgtgaaccagcaggagttcgtcagagctctggcagccttcctcaaaaagtccgggaagctgaaagtccccgaatgggtggataccgtcaagctggccaagcacaaagagcttgctccctacgatgagaactggttctacacgcgagctgcttccacagcgcggcacctgtacctccggggtggcgctggggttggctccatgaccaagatctatgggggacgtcagagaaacggcgtcatgcccagccacttcagccgaggctccaagagtgtggcccgccgggtcctccaagccctggaggggctgaaaatggtggaaaaggaccaagatggcggccgcaaactgacacctcagggacaaagagatctggacagaatcgccggacaggtggcagctgccaacaagaagcattagaacaaaccatgctgggttaataaattgcctcattcgtnnnnnnnnnnnnnnnnccctcgtgccgaattcctgcagcccggggt

SEQ ID NO: 20138 - DNA, 630 bp, Homo Sapiens
ttaaaacatttgaatgaactgtaaagtacagccataccttggacatgcaaatataaatctatggagcattctcaagacagtttgtcatggctctgttgattgcaactccttgtatagcttgtattttgatttagtttatattctgcttattatgtatactgtgttcttatatatgagaaagcacaaatgcgaaagaggtcatgtcttctcaaaatctagcaaaggaagtagtctgcattggtgtgcattacagtattttgcttaatgaaagcctcagttctgaatgttgatatgagtagttaaaaggaagtggggccattttatgtgtttatctgtgtcaagtatttctggtaataagaagcacttaatttacacatattttaatcctgtgaaagattccacatagagaaaagaaagatacctaaccttcaacaaatgttatttttggaaacacaatttttgtcattaaatgttatattatttcacatatataaaacagatgttatgtaagaatgttgtatattttaacataaatcatttagagaaattatctagattcattaattttcatagtgcctttttcacatgagtcagctggaaagtctgcaataaacagtatttgctgtctgt

SEQ ID NO: 20139 - DNA, 910 bp, Homo Sapiens
  misc_feature (42)..(55): n is a, c, g, or t
gcacgaggtataattcagcgttatttaagcacataaagaccnnnnnnnnnnnnnngaaatccaaaagatccaaactttttttaaacttaaaaaatctctttgtagtatgtcagttgcactttttttctgccataatgtaacgtagcttgccccgtcaaaaattcaattaaaattcatggccagcaatcctgttccccctcagcatcctgatttaattttcctgttgcttttgcttgcttctccatttaatagttactgaactttatgcatgttgatctatattgattttcactgcagttgaatgaacaaattatttcagtgtgacagccatgactcaagttccaattagtctgaaaagggtactttggaattgtcccatattaatcagagatggcaaaagaaaaagttctcatattaccaggttgattttgtgtctcatttcaaattttaatttaaaattatggttttcatttttgtttaccttaaagtgatgcttaaaagtggcatgtaattaggacacttaggtttgttgaaagcattttcgacatttgtataaaagaatttgtgataaatatatccaggtgctcaccaaagaaacatgtattaacaacttaaattagatttttctaactgatagttttcactcatttataatcagtaggagagactgtctagatgttggggcagctctatgatttaagtctgtaacatgttataactgaatttagtaccctagttttgttaagctattaggattttctaatagaacttactccccctgcctccccagccttatgtttcttttaatgacttctggatcctgagctccctttgcagtctgaaaaaggtattgcagtcagaactgtgtactgatgataaaagcctctggtagcaataaaaagttgtcctt

SEQ ID NO: 20140 - DNA, 941 bp, Homo Sapiens
gcacgaggcttgatcaaattgtggaaagctgtcttcttcctgagctgaatgtgggagattggcttatctttgataacatgggagcagattctttccatgaaccatctgcttttaatgattttcagaggccagccatttattacatgatgtcattcagtgattggtatgagatgcaagatgctggaattacttcagactcaatgatgaagaacttcttctttgtgccttcttgcattcagctgagccaagaagacagcttttccgctgaagcttaaacaggcattaacgcttctttagatctgaagttgcaggttaagcttgtctggtcaacattccagtgtggaaaaataatttaaacaatcttattctcttaattcttttggcaacaaaaactattagtaatagctatttgggaccagacaaaatcagctttcatctataattcattggggataatgggagatttagataatgtatccagatttaaacctaccagtttgtcctaccccttaagcgtttaaaataaaatatgcaacaaaatggatgacttagtggagatggaagcccattaattgggttccccattaaatcgtttacatacaagaacacagtttttatactaaggatttgtgtttaaagtcttgtaaagttcatgtctttcacccagatatatcaaatgttagaagaccagtgtgacttcattagataacgtttagtgtatttagaatgtgtaaatttgtgctttgaactgtagtttaataaatgtaaaattgcatcatagtatttgttgacctaatgtaacccttgtatgattgcaataaaattttgtgtagatttactgttttttcaggctaaaactttgggaaaggggctagctagcaaaggtagtttgaaatagatgtgtatatggactgtttgaaggtttttttctttatagccca

SEQ ID NO: 20141 - DNA, 1811 bp, Homo Sapiens
ccacgcgtccgggaagtggatatgaagatggattgattcagctcaccttccatgattgcttttgagggaaaagctacagtggccacatttcagatgttcacttttgcaatttgtggagggtggagagaggtagacttttgttgtgtgttttataaagtactctcagtaaggagtgtttgagttgaagagtcatctgattcgaggccactcatgttctttgtaacttaaactttgaccaagaaattcttcacttctcacttcttcacttcttcccaatatacagtaagtacgtgagccagtcatccatacactaaggcctagttgagaaaaacctttgattcaggatggctgggttactaaccttgaaatgtaagagatctggttttgaatgtaaaagttgcaacacacaaacggaagtcttaaaaactttttgctctggtcagttacaggtggatccccaataatctgtttttggttttctgatggaaataatagaattaggggaaatcaaatctggttggtaggtgtctacagtattagaagagggtataagggcactgtttaacactaagttctaatacttccagaaactgtgcattccagatctacatactaaatgctcttatcattttgaaatgggctcttgattaatagacccatattttttagtggcttctatgttgtatatttgtctaaaatgaaagctcttttgcgttctaaaactacaatatatgtcatcttattttccctgagtatccaagtatagtgcagattctatgtaaaactactaaatgacactggaatatgtttagtagattagggggaaaaactataaaggtttatacaattgtttgtagttacatttaggatggacttatccctttggagaagagtgaagtttgttttttcgccatgtgatgaagaccactgtgattttttaaaaaagtagataatacttaaaatggcgtaataattctgcacttgaatttgtactgttaacagcacatttggaagattttaaaactttttattgtcttataaatagcattcacttattattttggatatttaagggttccattaagttaacactgtatttggacaaagtgtgaccaaattagccagtctgttttcttccatgtttaattagaagtgagaggtagaagtacttcaaattcaacaggccagcaagcaatcggcttaaaattccctttcttaaatgttgtgctcttatgttctcggctttttaatgactttatttttacagtacttgttcagtcacttgagatgaaatgcttggggtagcttttccatcctcaaacttaatgtttttactagttcatagtgtttggaacagtatatgccaatcactgagactgcatcagagtttgcaattttgtatgtttcattgccaaagaaggcttagtggttgttgactgtagtataagtcagctttctgtagcataagatttgattttcccatacttacttcacttgttatacatcactgattatttgggttaaactggactcatttcaagcagtttgcttttgttcaaatcgtgatgagaaacctaatactgtaatttgatttgagccataaaacacattttaatattagcttgtattatagttattaagcttgtttttgtggaaaaaaacttactaaaacctaggtaactctagattaggccagttcatgtgtattttgtatctagtatggatcatatcgtaaaaaatagagataagttgggaagatatattgattatgctgttctgttgagggaaaggtcatgtatttagaaatttaa

SEQ ID NO: 20142 - DNA, 1429 bp, Homo Sapiens
gcacgagggaccgcctggccagagacacgctggagcagctcacagacctggtgttgagccccctgtcgggggctgggggtccccccctcatccagcagaacgcctcggaggcagagatcttctacaaggccaccggcttcctcaggaacctcagctcagcctctcaggccactcgccagaagatgcgggagtgccacgggctggtggacgccctggtcacctctatcaaccacgccctggacgcgggcaaatgcgaggacaagagcgtggagaacgcggtgtgcgtcctgcggaacctgtcctaccgcctctacgacgagatgccgccgtccgcgctgcagcggctggagggtcgcggccgcagggacctggcgggggcgccgccgggagaggtcgtgggctgcttcacgccgcagagccggcggctgcgcgagctgcccctcgccgccgatgcgctcaccttcgcggaggtgtccaaggaccccaagggcctcgagtggctgtggagcccccagatcgtggggctgtacaaccggctgctgcagcgctgcgagctcaaccggcacacgacggaggcggccgccggggcgctgcagaacatcacggcaggcgaccgcaggtgggcgggggtgctgagccgcctggccctggagcaggagcgtattctgaaccccctgctagaccgtgtcaggaccgccgaccaccaccagctgcgctcactgactggcctcatccgaaacctgtctcggaacgctaggaacaaggacgagatgtccacgaaggtggtgagccacctgatcgagaagctgccgggcagcgtgggtgagaagtcgcccccagccgaggtgctggtcaacatcatagctgtgctcaacaacctggtggtggccagccccatcgctgcccgagacctgctgtattttgacggactccgaaagctcatcttcatcaagaagaagcgggacagccccgacagtgagaagtcctcccgggcagcatccagcctcctggccaacctgtggcagtacaacaagctccaccgtgacttccgggcgaagggctatcggaaggaggacttcctgggcccataggtgaagccttctggaggagaaggtgacgtggcccagcgtccaagggacagactcagctccaggctgcttggcagcccagcctggaggagaaggctaatgacggaggggcccctcgctggggcccctgtgtgcatctttgagggtcctgggccaccaggaggggcagggtcttatagctggggacttggcttccgcagggcagggggtggggcagggctcaaggctgctctggtgtatggggtggtgacccagtcacattggcagaggtgggggttggctgtggcctggcagtatcttgggatagccagcactgggaataaagatggccatgaacagtc

SEQ ID NO: 20143 - DNA, 1942 bp, Homo Sapiens
gcacgaggtgagcattgattttagtgctgagaatgtaaacggacttacaggatgcttggattagtcatcacaggttcttatgactttgctaccacagttgatatatttctcctcaaacctgttgccctaaggaatatataaaatattgttgatatttctaggtggtgttatcaaggagaagaaattcctgccttgaccagatgtgtggagcatctacaaatgaatgaatagttatttacacacaaaccactgtgtacaaaagcgtccatggagctgtcagtgtctcgagtggtattatgaggcctcaggtgccttggggtacattgtcatgctataagggatgtatatcataaggtatggtggaagaggggccttatgtgaatgattgccacatactgtttctgttgctgctttttttccgattcctttttgtcattggatttgtttgttttgtcatgtggtgaatggtgttttagttattgtgttgctgccagaatcagaatccagttcttgttcttactgccttatagttattgtgttgccaccagaatcagaatccagttcttgttcatactgccttgtagtgagggcagtttaatatctacaaagaagcttttagaagctgaaaaagtcaatgtgattgtgcattctgcttttaagaagctgtttcagctatgaactgtgtatgtgctataagtgtgaggtaccataagttatttaatttttaaaagaggaaactcctgagtgagctgtttaagaaatctgagtgtgatctattgttacgttatttataactaggtaaaatgtctgtcgtgatagatttcttttaacgttcagatactgtggttgggttgtctatatttaatatgcagatttgcctgctggaatcataatccatttttaagtgaatgtaagaaatgaaaactactgcatttgtgtcttttgaaggcaaggatccttggattttaaaggaagagtatgtgctttgaaggcactcagagactagtaatagcatatggtttgaagggaaacccattctctttcaattacaagagagcatcacttagcgtgcagtacttctgttacagcatccgatgtgtcctttattttaaattgtaaccataacagccattaatggctttatttcttgtattgctctcatctgggaaaagtctctacttcttcaaacgtaacataaatctattatgaagcttgtcccctagtatgccattataaagaaaaaattcttcgatggtatgcagtgtatctattctgtttgtaaaagatcatgtcaaaatgttctgcctctataatgataatagatggttttgtctttcaggatatttatccacctactgtcttctttgccttaaagggacacttggccatcatttttaggctcgaacttaacactgttaagaaataactgaaatatgatggtatttacattaatttttgaaattcaatggtgggatagaattaggtcaggaaatggaagttgttccaatggtgtgagaactaggagacaagatgattcactttattatttaaaccaagcttcatttttagtttttgttgtttaaatggactggaaagttaagtttttgcagggattgttttgaaataaagagatatgctaactcacagatgaactttgttaagacccctttatttttatataaagtctaatatttgaaaagcgattgttataaagtaaaattctctcttcctattctaatatatatcatatatttcaggcttctatttgaaaacaggtataagagatgatatgatacaaccctatagataatgttttttgcttgattgacttatataatcactgtttcatgattactgcttttggaataataggaagttttgtgaaatgctggccttgtgtatatcttagaatgcaaatttaataaagtgtgtatacatgcat

SEQ ID NO: 20144 - DNA, 1017 bp, Homo Sapiens
cccccgggctgcaggaattcggcacgagggtctttttccaattagctcctcctttttccttccagtctaaaaaaggaatcctctgtgtcttcaaagcaaagctctttactttccccttggttctcataactctgtgatcttgctctcggtgcttccaactcatccacgtcctgtctgtttcctctgtatacaaaaccctttctgcccctgctgacacagacatcctctatgccagcagccagccaaccctttcattagaacttcaagctctccaaaggctcagattataactgttgtcatatttatatgaggctgttgtcttttccttctgagcctgcctttctcccccccacccaggagtatcctcttgccaaatcaaaagactttttccttgggctttagccttaaagatacttgaaggtctaggtgctttaacctcacataccctcacttaaacttttatcactgttgcatataccagttgtgatacaataaagaatgtatctggattttgtgcctagttcctagcacacagcttcaaaaattctagagtttcctgataggagtgtcttttgtattcataacaagcccttttcacccatgcctgggtttatgctaacaaggttacccatggtgggcccttagtttcaaggaaggagttggccaagccagaaagaccaagcatgtggttaaagcattggaattttcagccccatcccacccccaatctccaaggaggtgatggggctggaaattgagttcaattttaacatggccagtgatttaagcaatgctgcctatgtaaagaaaccccaataaaaactctggacagtgaggcttggggagcttcctgattggcagacattccaatgtactaggaaggtagcgcatcttgattccacagggacaaaggctcctgagctctgggcccttccagtgcttgccaccctacatactctttgtctggctcttcatttgtattctttataataaaatggtgattgtaagtagagcaaa

SEQ ID NO: 20145 - DNA, 749 bp, Homo Sapiens
ttatggtagaaaagaaggaagtctgtacattatgtagctatgcacccatctaaagaagttaggaaaatgacatcaagtagaacatcaaaagaaagaaggaaaggataacttaaaacagaaatgaatgaaataaaaccagaatagaagagacgatctacaaatccaaaagttggtttgttgaaaatactagtagagctgacatacttgtggtgagactgatggaaataatgcagttacaactaaccaatatcataattggaaaggaaatcactataggtgctgtaaaaattaaaaagataatagaatattatgaacaattttctgccaatattattgaaagtttagataaaatggaaaattcatttaaaaatataatttgacagtattatgttatgtgaatactataatgataatcctgtaatcattaaatgaaccagtagtttaaaatttttccatatagggaaggtcagggccagatgtgttcatggttggttctactagacattcaaaaaaataataattcaagtctacacaaactttcctgagattagaaaaaataaagaagagtccccccacctgtttcttactttatgaaccacacctaaaagatagaagactgctttgcaaccaagaaatccttcatgaacacctctttaatcacaagtcctcaattcaaggttagctttatttcaacttttataatacttttcttacttttcttgatagctttaccaccatgtattcattcc

SEQ ID NO: 20146 - DNA, 1403 bp, Homo Sapiens
gcacgaggagcttgttttctgaccacgggaaatatgttgaatctttccggaggtttctcaaccattccacggaacaccagtgcatgcaggaattcatggacaagaagctgccaggcataataggaaggattggagacacaaaatcagaaattaagattctaagcataggcggaggtgcaggtgaaattgatcttcaaattctctccaaagttcaggctcaatacccaggagtttgtatcaacaatgaagttgttgagccaagtgctgaacaaattgccaaatacaaagagcttgtagccaagacatcgaacctcgagaacgtaaagtttgcttggcataaggagacatcatctgaataccaaagtagaatgttggagaaaaaggagcttcaaaagtgggactttattcatatgattcaaatgctgtattatgtaaaagacatcccagctaccctgaaattcttccatagtctcttaggtaccaatgctaagatgctcattattgttgtgtcaggaagcagtggctgggacaagctgtggaaaaagtacggatcacgctttccccaggatgacctctgccagtatatcacatcagatgacctcactcagatgctggacaacctagggcttaagtatgagtgctatgaccttttgtccaccatggatatatctgactgctttattgatggtaatgaaaatggagacctgctttgggattttttgactgaaacctgcaactttaatgccacagcaccacctgatctcagagcagagcttgggaaagatctacaagagcctgaatttagtgctaagaaagaggggaaggttctttttaataatactctgagtttcatagtgattgaggcataactatcaatcacaaaagtatattcaaaaattatattttgaacaactcgaatcactcatttatttccatattaaaatcacaaactcatccattaatgtagataaagcactgtttggatatgagatgtagcaaattccaatacattattggacttccatttggaatcatatgggatactgctggtcttatcctgtccctcctccaggtagagagaccacaagcaggctcaacataacataagctagaaaaattagatgactgaatttctatggcatattgataataaaattcattccatttgctgattgtctgaaattttctagaatactaataaaatacatactatagattctttattagtgaagtatgcactaatcaatactttgaacacaaagcctgtgttactgatttggccgttttgtgaagaaacatttatctttgtacgttcttctattgtgctttctatctaatttttattaatttgtaagagtaagcacctttagaatattaaaaattaattctttaaaacctcgtgc

SEQ ID NO: 20147 - DNA, 1345 bp, Homo Sapiens
gcacgagggtgggtcgaaatcaagatccagctccaggtcccacaggggctcttcttccccacgaaaaagatcttattcaagttcatcatcttctcctgagaggaacagaaagagaagtcgttctagatcttcttcatctggtgatcgcaaaaaaagacgaacaagatcacggtcacccgaaagacgccacaggtcatcatctggatcatcccattctggttcccgttcaagttcaaaaaagaaataatgtattaaaatttacatcttaaaaaaatccagtacagtgcatgaagcatatttttaaagaatttggtgtcttacttggtcagaagtgctaaatctgctagtagaggtgcatgcctttcattgcttttcaaaacaatacagctgtgtttatttgtgaagttaaaagtaaatagcattttaagccataatgtcccaaaatagatgttctgtcattcattatttacaaccatttgcttcatttaaaaccatttcagctataacaaagtactttgcttcctaatttaaacccatttttgtcatttccaaatacatcctgtccattggctaagacaggattacctaggcttgcctgaactttgggcatggaagaaagactggaaactagttggaaacaacatacttatggaaaagaaagtcagcctttttatgctgttaacagatgtcagagtgattctcaccaaaaaaagttaaactatgttgtaagcagccaactgtaaatgtctattttgaaattccctatgctaagggtgccttagaatcattgtgtctcttttatccagctttacttttttgctccacatttaatgcaaaagaatcttgtgatgtctacaaggagagaagtgggatatattttcctttctgacacataatttggggcaaaaaagaaagtcttaagagtttatcttttctctgctgatacggttgcttgataaagacatctcaaaatgtttaccaatgttttaagaagctttgtgtgatattcttccaaatgtagttaccaaatataatatggtagaaaaggctaaatcatacttaatgagcaaattgaagtaagcttttaaagtatatttctcttttggtgaaaggccaatggagacattgtgaatttaagtgaacatttgcctcaagatgttaactataaacacactgcatacaattttcttctgaataacaatgaatgcttattgctgcatgatgtaagcaaagtcattattttcctattcatttgaaaaagttatggcttaaatgctttggagtttatttctcaaattaaatctggtcacatgagctttagtttgttttctggtttaaaaataaa

SEQ ID NO: 20148 - DNA, 866 bp, Homo Sapiens
tttttagaaaaaacaagatttgtattttatttccttgtaaaaatctttacacatgcagacaaaccagtgttaagaaagtattcaccatcatttaaacaaataaccacttaaatagaacagtgtctgcaattttatctgtataaaaataagatacatttttacagaattcacgctccagttcttatagcaataaacaatacacaactataataaagtacaattgaacctgaccatggtttttaattagatactgctagggcattttaatgtgcaaaaaaattaacatagttcttttcaaaagaaactgtcctcagtgttctagagacctagagggtttcaagaaatcaaatcctaatcagtttgcgtttaatgtttttgattgagtccatacatcacactgtagataggcaaaaccaagaactgatgcaggctcaaaggaagagaaagtcagcgcctgtgcctgccatgtcctgagcgactgccaccatggtgcttgcttttatgggacctctcaaaggagcgagatcgttcacgcctgtccctatgatgtcccctttcatgcctgtgtttcttggctgcatctgagtgatcccgagacttgctctgagatcgagaacgagattttttccttttatgaccatgtctgtttgaactttttaaatcatctctggtatgcttgggccttaaggtgaggagaaaccatgattatgatgtcttcgagggctttcactgtgactgccgggacctgcttcttgatctcgagctgtatgttccagatcgactccgcctattaatatagtgtcttcttggagtatgtgatctaaaacgtgatcgtgttcttgacctcaatcgacttgcccttctgc

SEQ ID NO: 20149 - DNA, 776 bp, Homo Sapiens
ttaaagaggtgaggtgacgggaaatacacagcatagctttgaaataatgacaaccaaggacatgaccattagaacagcatgtgcagatcttaatcatcccagttcctaggcaacttgttcaccaggtacgcaagggccgaatagttgagaaatggacatttttacctactcctcctagccccctatccccagtaacagtgatcccttttcttattgtgatttatttcctaattcttgctgagttgactttcccttgtaggaaaagaaaaatatttcaaatagaaacccaccttttatttaagtatgaagcagctgttactttttaaaaaatgaattatctttcaatggtgtagaatgattccaaagtgtctccattagcatatactgagcaggaattaaataaagcatcagatactgatctgagctgtaagctggtagaatctgagccaaagtagactgcttaaattgataagctttgctaaagagttgtatgcacaaaggatgattaattctgggactatactcacaccaaggtctgctgtcttatagccaagaattacagctttatttatagagagtgaattatgggtattttttcagaaaatattgtcatctgatatacacataaaacaactcacattgttggagttaactaattatccccatttcatggttttcagtggcaacttactgacccttgtttttgcctgtgcttgtatgcatgcattttcaagcaagtaataaagcagcctcatttaattctggataatgctggg

SEQ ID NO: 20150 - DNA, 911 bp, Homo Sapiens
gcacgaggtgatagtttaggaatgttgtggggagggttcattaataaaagttcagcaattttttaactgaaatagtttatctcttttacctagtcacaaaaaaggtatgtaaacaaggccattatatgtgtttattgctctttatttccctatctagattttctaagtatcttagctttcttaatataagtttaacttggtacttactgaaaatgcctttttacccctgttaacggtattttgagcttttgaaaagaacttggttgacactgcttttattgtggataaaggagagatggtcagtaattaatggcttgaagtattattggagtggtttatcatttctgaaactaatcgtgtcagaattgactttgaaaagcattgctttttacagaagtatattaactttttaggagtaatttctagtttggattgtaatatgaaataatttaaaagggcttcgctcatatataggaaaatcgcatatggtcctagtattaaattcttattgcttactgatttttttgagttaagagttgttatatgctagaatatgaggatgtgaatataaataagagaagaaaaaagaataaagtagattgagtctccaattttatgtaagcttcagaagaactggtttgtttacatgcaagcttatagttgaaatatttttcaggaattacatgaatgacagtcttcgaaccaatgtgtttgttcgatttcaaccagagactatagcatgtgcttgcatctaccttgcagctagagcacttcagattccgttgccaactcgtccccattggtttcttctttttggtactacagaagaggaaatccaggaaatctgcatagaaacacttaggctttataccagaaaaaagcaaactatgaattactggaaaaagaagtag

SEQ ID NO: 20151 - DNA, 829 bp, Homo Sapiens
gcacgaggcagatactcatattcctaacttctaaatatctggtatagtgtttgaaatatgattaaatgtacctatgcttgggcaaaatagcttttgaaaacaggaactcatgccagaagcccctggttgtctgaaaggtatgctttactcagtctaatggtgctgttggagtctggggagaatgtcatgctaataaatagaacactataaaaatattaagagaatgtcctaatgaagtgtgcatgaaacatgttgacaattttttatgagcaacagaaataaatcattttaaaagttctcagaaaacctatttatgtcatctttgcttttgtgagtttgtgttaccgcacaactcccagacttttaactgcctgtaccttggaaatgtctgctgttcgtaacttcttcagtttgtataacagtgctgcagctgtatttggtttttacctctccctgttcccacggcacaccgtcagtgaaccttcaccaaaccccacgtgcattttatcctcagtgaattgttggtggaggtgcacctgactgctctgtgagaatccgtgccatggctcctttgggtcaaagatgccctcccctccgtcttaggttcttgtctagaaatgagtaatgtcttacaagcatgcctagttctaatcatctcatcctgtgtttgtgatttgatgtttgcctgcctatatgtacaaaccaccattgtgtccaaagcacagctattcatgacttaattttctaatctcaccacaaagaagtggctcatgcaaaataagaaaaccttagtatgcatcagatgctggatcagactttactgggagtt

SEQ ID NO: 20152 - DNA, 802 bp, Homo Sapiens
gcacgaggctgacattcttctaaaatctcatctcttttgggagtcacttcatggcagctttgcctttaccctctgcttccccatacctcttgataggggatatgccttttctttatgggttaattctcattaaaaaagaaatattcttccttccactctcataaaacaatgaagataataaaattactccttacatctttttcatttcttccgttacctaaatcatactatctcagtgatctttgtctagttttccctactttacccagttaaggtgatacttgaggaccaacactgaggctgagatgactctcactagagaatgaccctgtttttcctgttttaattgtgcctatgttttggtctctaccttctaagttgaaaccaagactgaagactgaacctgaagaagtttccatagaagacagtgcccagagtgacctcaaagaagtgatggtgctgaacgcaacagaatcatttgtatatgagcccaaagagcagaagaaaatgtttcatgccacagtggcaactgagaatgaagtcttccgagtgaaggtttttaatattgacctaaaggagaagttcaccccaaagaagatcattgccatagcaaattatgtttgccgcaatgggttcctggaggtatatcctttcacacttgtggctgatgtgaatgctgaccgaaacatggagatcccaaaaggattgattagaagtgccagcgtaactcctaaaatcaatcagctttgctcacaaactaaaggaagttttgtgaatggggtgtttgaggtacataacaaaa

SEQ ID NO: 20153 - DNA, 831 bp, Homo Sapiens
gcacgagggtttaatgtaagatccagtggcttggcagagttggtgcaaaactgtaaagtaccagattaagttctagtcagtgagttagcagcctaggcacttgggcaaaaaaattggccctgctgtcccaagtcctccaaagccctctccgtatcaccagctaggagctccaagactgatatgccactacttggaggcttgagtagaatccacgcgtcctcagtttccaaagtgacaagagactggccccagccatcaaagcagtagaattttcaggacagggttgaggacagtggggacagaactggacatgggggcctgagctgctgaacatttgctacatgcagtagtctaagaggctcacagctggagaggttagcctgtccaccttcccacccatgtgtggtagggaagaaggtgaccatctagttaaagaaaaaaagatccttccaaagctgtatttggcataagctaataccactgctagtgctgccactggccaggcacagatacagaaggccctgaggagttgggaggaagggagaacaatgtgcaggcaaagcaggaaacagccagctcaggtccccgccccaggggcccagaaggataaaggccgtgcagtaaagggaacatacggttcttctctttggtcaggcaaaggcccgaatatgggcctgttaggtgaaagggctgaagggcacaggctctgcccttggaccctagctttaggctcatcacattgaggcggtgatggagcgagacgaaggcaggaagacagagcagtcaggctgggactcgccagctcctaggagctgcccttgtccctcgtgc

SEQ ID NO: 20154 - DNA, 798 bp, Homo Sapiens
gcacgaggatccccttcaattaaggtgattttttgtaattattattattttggtgggacaatctttaattttctaaagatagcactaacatcagctcattagccacctgtgcctgtccccgccttggcccggctggatgaagcggcttccccgcagggcccccacttcccagtggctgcttcctggggacccagggcaccccggcaccttcaggcacgctcctcagctggtcacctcccggctttgccgttcagatggggctcctgaggctcaggagtgaagatgccacagagccgggctcccctaggctgcgtcgggcatgcttggaagctggcctgccaggaccttccaccctggggcctgtgtcagccgccggccctccgcaccctggaagcacacggcctctgggaaggacagccctgaccttcggttttccgagcacggtgtttcccaagaattctgggctggcggcctggtggcagtgctggagatgaccccgagcccctccccgtggggcacccaggagggccctgccggaatgtgcagcctgtgggtagtcggctggtgtccctgtcgtggagctggggtgcgtgatctggtgctcgtccacgcaggtgtgtggtgtaaacatgtatgtgctgtacagagagacgcgtgtggagagagccgcacaccagcgccacccaggaaaggcggagcggttaccagtggttttgtgtttatttttatcaagacgtttcccctgttttcctataaatttgcttcgtgtaagcaagtacataaggaccctccttttgg

SEQ ID NO: 20155 - DNA, 1440 bp, Homo Sapiens
gcacgaggcagcctcccacaggatgtgagagaggaactggggtctccagtcacgggagccaggagccggccagggccgcaggcaggaagggagcgaggctgaagggaacgtcgtcctctcagcatgggggtcccgcggcctcagccctgggcgctggggctcctgctctttctccttcctgggagcctgggcgcagaaagccacctctccctcctgtaccaccttaccgcggtgtcctcgcctgccccggggactcctgccttctgggtgtccggctggctgggcccgcagcagtacctgagctacaatagcctgcggggcgaggcggagccctgtggagcttgggtctgggaaaaccaggtgtcctggtattgggagaaagagaccacagatctgaggatcaaggagaagctctttctggaagctttcaaagctttggggggaaaaggtccctacactctgcagggcctgctgggctgtgaactgggccctgacaacacctcggtgcccaccgccaagttcgccctgaacggcgaggagttcatgaatttcgacctcaagcagggcacctggggtggggactggcccgaggccctggctatcagtcagcggtggcagcagcaggacaaggcggccaacaaggagctcaccttcctgctattctcctgcccgcaccgcctgcgggagcacctggagaggggccgcggaaacctggagtggaaggagcccccctccatgcgcctgaaggcccgacccagcagccctggcttttccgtgcttacctgcagcgccttctccttctaccctccggagctgcaacttccggttcctgccgaatggggctggccgctggcaccggccagggtgacttcggccccaacagtgacggatccttccacgcctcgtcgtcactaacagtcaaaagtggcgatgagcaccactactgctgcattgtgcagcacgcggggctggcgcagcccctcagggtggggctggaatctccagccaagtcctccgtgctcgtggtgggaatcgtcatcggtgtcttgctactcacggcagcggctgtaggaggagctctgttgtggagaaggatgaggagtgggctgccagccccttggatctcccttcgtggagacgacaccggggtcctcctgcccaccccaggggaggcccaggatgctgatttgaaggatgtaaatgtgattccagccaccgcctgaccatccgccattccgactgctaaaagcgaatgtagtcaggcccctttcatgctgtgagacctcctggaacactggcatctctgagcctccagaaggggttctgggcctagttgtcctccctctggagccccgtcctgtggtctgcctcagtttcccctcctaatacatatggctgttttccacctcgataatataacacgagtttgggcccgaaaaa

SEQ ID NO: 20156 - DNA, 886 bp, Homo Sapiens
gtcatatagattttaatagattttctgattaactcatcacagtagtcgtttttactgtaatgatatgcagctttactacactagtataaataaaaacagataaatacagctctaggcaacattacagattaactaagcattcttcgtgaaccaaaactgaaaacaattaattattaagaagaagagatgctgacacccttgcccattctcatcataccttctcaaaaagggtattcaaacaaggcgctacacttattatattggtaaattaatttgccaattagccaggcacaacaatttcatggtctccactatttcattattttggttgaaaaggagacacacttcaatgtatgaaaaagaaaaatggaacagataacaccaaagaaaaccactaaatgcattaaaaatacggcacttttcctgtatttttagcagtaagatagaaatactagggatagaaatataccaaaaaacaaaattaatgctttaattaatatccaccctgaaatgtcagtctctgaagcaagatgggcaattaaaggaggagcagaaataaaaaagggaaatatgataaaataaactccatgtgaagttttacgaagctatctgcaaagaaaccgatttgtcctttgaaggctattaactcaggacaattaagttatccagcagccatgctgaggagttcatagtctagcaatacgttgcacacaggcaaatacacttaagacgagttggagatatacagaactatcatttagaaatgattttactctggatggctcaaaaactttgaaagggctatgaagaaaacttgaagtctgtcaaagagaggagtaataagaataattttagccagatagcacagctaagatgtttcccaaaa

SEQ ID NO: 20157 - DNA, 937 bp, Homo Sapiens
gcacgagggtggtcaagaaccctggtgcccaagagaatggaagatgccaggaggcagaaattggtcctcaaaaaccagattctgctgtttatttaaattcaggtagcagtttattaggtggactaaggaggaatcagagtcttccagtcataatgggtagctttgctgccccagtttgcacatcctcacccaaaatgggtgtcctgaaggaggactgaggttcagcagttaactgacctcttatacaagttagcacatgaaggatagatatgcactgaaacatgtggtctggtctgacttgagagaaaaggaatgttgcacaagggttgtgaatgtgaaagggggaatggaggaatggaaataaaattgggatgagccctaatggaggaagtcgggcaaattgaaagtataaatgaatgggccatgagtgttcagagggagaaaagaaaggtttaatatactccttcagttgagttttcttgtcttgaacataaaaagtgaatacaaataaattcagtaatactaaaacatacagagatactgaacttgctggcacatttacttctggtaagcataaagcagagagaacccaggttagaaggatgggaagagaaaaggagcagttttattgcttatagaaagccgttctgaggggttggtggggtaagctcagtctattactgagacaatagtgagatggcttatatgtttcccctgttaatatctggttaaattatgtatccatcaaatggtatgctcgcagcattagcaaaattaggagtttcatcttttttcattgaatcacaggtggagactcctattttcctttctggtttcaggccctttgaccccctgggagccccaaataccactcaattaatttggatttatgattaataaaagttcattttttaatttgtatattttatacacctcc

SEQ ID NO: 20158 - DNA, 1477 bp, Homo Sapiens
  misc_feature (663)..(678): n is a, c, g, or t
gcacgaggcccatgcatcccttctacacccgggccgccaccatgataggcgagatcgccgccgccgtgtccttcatctccaagtttctccgcaccaaggggctcacgagcgagcgacagctgcagaccttcagccagagcctgcaggagctgctggcagaacattataaacatcactggttcccagaaaagccatgcaagggatcgggttaccgttgtattcgcatcaaccataaaatggatcctctgattggacaggcagcacagcggattggactgagcagtcaggagctgttcaggcttctcccaagtgaactcacactctgggttgacccctatgaagtgtcctacagaattggagaggatggctccatctgtgtgctgtatgaagcctcaccagcaggaggtagcactcaaaacagcaccaacgtgcaaatggtagacagccgaatcagctgtaaggaggaacttctcttgggcagaacgagcccttccaaaaactacaatatgatgactgtatcaggttaagatatagtctgtggatggatcatctgatgatgatggataaatttgatttttgctttgggtgggctcctcttggggatggattatggaatttaaaccatgtcacagctgtgaagatctggcacaagatagaatggtnnnnnnnnnnnnnnnnttttaagtgacagtgccatagtttggacagtacctttcaatgattaattttaatagcctgtgagtccaagtaaatgatcactttatttgctagggagggaagtcctagggtggtttcagtttctcccagacatacctaaatttttacatcaatccttttaaagaaaatctgtatttcaaagaatctttctctgcagtaaatctcgcaggggaatttgcactattacacttgaaagttgttattgttaaccttttcggcagcttttaataggaaagttaaacgttttaaacatggtagtactggaaattttacaagacttttacctagcacttaaatatgtataaatgtacataaagacaaactagtaagcatgacctggggaaatggtcagaccttgtattgtgtttttggccttgaaagtagcaagtgaccagaatctgccatggcaacaggctttaaaaaagacccttaaaaagacactgtctcaactgtggtgttagcaccagccagctctctgtacatttgctagcttgtagttttctaagactgagtaaacttcttatttttagaaagtggaggtctggtttgtaactttccttgtacttaattgggtaaaagtcttttccacaaaccaccatctattttgtgaactttgttagtcatcttttatttggtaaattatgaactggtgtaaatttgtacagttcatgtatattgattgtggcaaagttgtacagatttctatattttggatgagaaatttttcttctctctataataaatcgtttcttatcttggc

SEQ ID NO: 20159 - DNA, 662 bp, Homo Sapiens
gcacgaggagccctgccggccggactttgcgccgcgtccggcgctgctgctgcgctcggggccccgctcggcaccggcggtgaccgggaagcccgcgttaaaggggcaaccgggaccctggcccggtatggctgaagtcagcatcgaccagtccaagctgcctggagtcaaggaagtatgcctagattttgctgtcctggaggactacactttggctcacatcttgcaggaacaagagattgagcatcatttggcatcgaacgttcagcggaaccgtttggtccagcatgatctccaggtggctaagcatctccaagaggaagatctgaaagcgcaggcccagcttcagaagcgttacaaagaccttgaacaacaagactgtgaaattgctcaggaaatttaggagaagctggctattgaggcagatagacgacgcattcaggataagaaggatgaggacatattttgccttttgcaataaaaggagttacaggaagataaaaatataaagaaacatttttccgagttccctgcatcctgtgcttatgcagatagttactattatgaagatggaggaatgatgccaagaatgacgaaagaagctgtatctactccatcactaatggcccacagggatcaggaatggtatgatgctgaaattg

SEQ ID NO: 20160 - DNA, 1228 bp, Homo Sapiens
gcacgaggcttccatcggtatttgcaaacgctacatttgcagtcatgtgacctacttgacatttttggtggaatcagcttcttcccgttggataaaatgacttatttgaaaatccagtcctttattaatagaatggaggaaagcctgaatatagtcaaatacactgcttttctctataacgatcagctcatctggagtggattagaacaagatgacatgagaattttatacaaataccttaccacctccctttttccaaggcacatcgaacctgagttagcaggaagggattctccaataagagcagaaatgccaggaaatcttcaacactatggaagatttcttaccggacccttgaacctcaatgatccagatgcaaaatgcagattccccaaaatttttgtaaatacagatgacacttatgaagagctccatttaatcgtttataaggccatgagtgcggctgtgtgctttatgatcgacgcctctgtccacccaacgttggatttttgccgaagactggacagcatcgttgggccccagctcacagtgctggcctctgacatctgtgaacagtttaacatcaacaagaggatctctgggtctgagaaagaaccccagtttaagtttatctacttcaaccacatgaatctcgccgagaagagcacagttcacatgaggaaaacgcccagcgtgtcgctcacttccgtgcacccggatttaatgaagattctcggtgacatcaacagtgactttaccagagtggatgaagatgaggagatcattgtgaaggccatgagtgattactgggttgttggaaagaagtctgatcggcgggagctctatgttattttgaatcaaaaaaatgcaaacctgattgaagtaaatgaagaggtcaagaaactttgtgcaacgcagttcaacaacatcttcttcttggattgacggatgacggctcaccgagagcatatctaaaaaacactctgcaaacatttggtcacatgcaagttagtggtcatatgacggactgcattcaggacaagggtaaagcaatacttgctttgaagaatcagatttcgactcggtctgctgatctgaggtttttagattttaaatatttatgtggaattaattaaaggtagttggctatatcgctatcatttcattcttttgacattatttgaatattttactggaaaataagactaataaattgttaaaagttttt

SEQ ID NO: 20161 - DNA, 881 bp, Homo Sapiens
  misc_feature (449)..(458): n is a, c, g, or t
gcacgaggcaacctgtggccccggcctcatgagcaccccctgcacaggcccagcccaagccaggcgctagaagggctggttgtggagtgcttatccttgacaggtatggggccaggtgagggcaggggacaaggtgcagctgaggccgagcccaactaggtcctgggcacccctgcaggtgggagtggtccttgtcctcctggtatccagcagacacccccctctccccaccagccccattctcaggtcctttcctctttgtcaccaacaccaagaatctgtccagggttcttggcttatcttttatctcttttcactcctagagaggaattgcaattgactcagaatgacacattttggcaccacgtgtgtagaaagcccccactgttagatgatagcctcgtgaaattcatgtttctgtattctcctatttcttttcaaaaactaannnnnnnnnnagtgtaataaatcctaagagggaactgatttaagaaacaaggccgccaaacaagggcagcagttccgactccagcatctgggaaaggaaggaaagtgaccccactttcactcctgcacagcccactggttacctaaaccaccgtgcaagtcgggatgacagcaaggacttctgggcaggtgggaaaggtgcctggaacgggatgcgcctgtgcgtctcttggccatgatgttcttgtgggcatgttattcttggtgctgcctgggggtgttgctgaccggacaggctctccagctggaagtcatggagaggccagaggctggcggccctgcctgggccttcggagcctcctgcctgcaccctccacctcttctaaacatgatgtggcacattttggtgttaaataaaacacaacacacaaagt

SEQ ID NO: 20162 - DNA, 1086 bp, Homo Sapiens
ccccgggctgcaggaattcggcacgaggctgcagcgctctcgtcttctgcggctctcggtgccctctccttttcgtttccggaaacatggcctccggtgtggctgtctctgatggtgtcatcaaggtgttcaacgacatgaaggtgcgtaagtcttcaacgccagaggaggtgaagaagcgcaagaaggcggtgctcttctgcctgagtgaggacaagaagaacatcatcctggaggagggcaaggagatcctggtgggcgatgtgggccagactgtcgacgatccctacgccacctttgtcaagatgctgccagataaggactgccgctatgccctctatgatgcaacctatgagaccaaggagagcaagaaggaggatctggtgtttatcttctgggcccccgagtctgcgccccttaagagcaaaatgatttatgccagctccaaggacgccatcaagaagaagctgacagggatcaagcatgaattgcaagcaaactgctacgaggaggtcaaggaccgctgcaccctggcagagaagctggggggcagtgccgtcatctccctggagggcaagcctttgtgagccccttctggccccctgcctggagcatctggcagccccacacctgcccttgggggttgcaggctgcccccttcctgccagaccggaggggctggggggatcccagcagggggagggcaatcccttcaccccagttgccaaacagaccccccaccccctggattttccttctccctccatcccttgacggttctggccttcccaaactgcttttgatcttttgattcctcttgggctgaagcagaccaagttccccccaggcaccccagttgtgggggagcctgtattttttttaacaacatccccattccccacctggtcctcccccttcccatgctgccaacttctaaccgcaatagtgactctgtgcttgtctgtttagttctgtgtataaatggaatgttgtggagatgacccctccctgtgccggctggttcctctcccttttcccctggtcacggctactcatggaagcaggaccagtaagggaccttcgatt

SEQ ID NO: 20163 - DNA, 1021 bp, Homo Sapiens
ccccgggctgcaggaattccgcacgaggagagagttgggtagtgtccttcaggaatgaaaggaggggcaaaggagtcaccagaggtcctgcatttccatcagggtttccacagtcatcagggcttctctcttgagttgctgataggagatgtgagttatgcccagagatgtcttatcgtgaggaaaaagaaacttccttttgttcacattcaggactctcagtgccatatgaagtagcaaaaggcagtatcggccagatcagtgttacattgattctaaaattacagtgtccccattagacaactattttaggtgctggagtatgtttgaagagtgtgctgggaaaaaggaagcatttcttcattgatttaaatcagtatgaatattatatgcctaaataaaaaatttgcacaggtaaattctctcacttgtgaatgggagaagctgccccaggaatctgtgaggatggtattccctggagtctggctttgaaagatttcattgttggtagaaataacaggttgagaaagagggagttagcatcacctaaaacctgcacgtgaacaagggttgacatgatacactatggccttagaaaagggccaggtgaaaccccaagctaatcactgcggtctttcagagccggacagacaggtgccagcagagcccggggctcactctcctttcagtcattcctcagcccttcgaagggaagcccaaacactttgcacgctgtgctgcagacattctggcctggtgtgtctgaaagttgcatcagtcctcacggtgcaaacacagttgatttaggaagtcacacaatgacactgaaatcctacagaccaaaatccacttgtcagcaggagcagcagcccaggcccagcaccagcggtcttccggctccctgagggctgccacgttgggcgaggggagcctgccaagggtccaggctgctttagccatctgtgccccactcatctggggaaagatgggtttttcttattgtaaattgtggacttttaaa

SEQ ID NO: 20164 - DNA, 1671 bp, Homo Sapiens
  misc_feature (1192)..(1237): n is a, c, g, or t
  misc_feature (1608)..(1618): n is a, c, g, or t
gcacgaggagttacctggcagggacgctgggactctcagcagatcaaacatctggaaattaccttaatatgcaagactctcaaggagtactttcttcctttccagctcctcaggcagtgcaggacaacccagctatgcccacatcctcaggctcagaagggaatgtcaagctttgctccctagaagaagctcaaaggatatggaaacaaaagtcggcagagatttatccaataatggacaagtcaagccgcacacgtcttgctctcattatctgcaatgaagaatttgacagtattcctagaagaactggagctgaggttgacatcacaggcatgacaatgctgctacaaaatctggggtacagcgtagatgtgaaaaaaaatctcactgcttcggacatgactacagagctggaggcatttgcacaccgcccagagcacaagacctctgacagcacgttcctggtgttcatgtctcatggtattcgggaaggcatttgtgggaagaaacactctgagcaagtcccagatatactacaactcaatgcaatctttaacatgttgaataccaagaactgcccaagtttgaaggacaaaccgaaggtgatcatcatccaggcctgccgtggtgacagccctggtgtggtgtggtttaaagattcagtaggagtttctggaaacctatctttaccaactacagaagagtttgaggatgatgctattaagaaagcccacatagagaaggattttatcgctttctgctcttccacaccagataatgtttcttggagacatcccacaatgggctctgtttttattggaagactcattgaacatatgcaagaatatgcctgttcctgtgatgtggaggaaattttccgcaaggttcgattttcatttgagcagccagatggtagagcgcagatgcccaccactgaaagagtgactttgacaagatgtttctacctcttcccaggacattaaaataaggaaactgtatgaatgtctgtgggcaggtacatgtgtatggtcgggagtgtgggaaggttgaggaaagggtactgaaagtccatttgagtcaagaactctaggtttacaggctgagaatccttaatccaaaaattcgaattttgaaatgctctaaaatccaacactgtgtgagcgcccacatgatattcaaaggaaatgtttannnnnnnnnnnnnnnnnnnnnnnnnnnnnnnnnnnnnnnnnnnnnnagtaagtatacagctgaattccaatatacaaaaatatctgaaatttgaaatacttctggtagcatgcattttggataagggataatcaagccatatacagaaaatactgaagtaatgcctttcttctggtcagtgcagagcacgttgctcttctcccaaagtttttcatttagaccccttttgagattcatctgatattggcctagaagtggccgtaagactacaaaccctcacttttggatgtttctctccttcacctcagcagggtatatttaaacatagcatgtggtctttccttttaaaattgtgtatgttcccattggtggtataactttataacttgcatgtctttaacaaattctttcctatgnnnnnnnnnnnaattatttcttttctcataggaggtgaagagatccttctgtaaaggttttgga

SEQ ID NO: 20165 - DNA, 863 bp, Homo Sapiens
gcacgaggctgattaatgaagatgtgaatgagcaggttatgcaggtattaggacctgaagacctccagagcattatctacaaattggaagaacacgaggaatttttcccagcatttcaggcatttactaatgatctacttgaaatcttagaaattgatgacttggatgccattgtacctgcagtaaagaaattaaaagtactttcatactgaaaacaaatcaaatcatttttactgtgtaaattgtattcttaacattttgtattttgtaggattgatcttattttgagacaagggttgtaaaatgtatttgctctcagaattcatccccttcttagtattaggtcattcttcatctgtgtaatttttattaactttgagattcttatacagaaaatagttgcaagggtaaggtaattaactttagatcccttcatttctaaagcaattattgagtgcttaaaatttaaggttgttttagagtggagtttgtgagtaaaagaggagcccagggagacagattgcaagtagtaggttgcaatcttttagattcagcttgtaataatctttgagccacaccaaaaggaatgccaagggctctctaaatttagccagtaggaagctactgctctcctggcaaggattaattggcacattctgttaagatatccctcatgacagttgccctttcaaagcaggaggaagaaaaggaagaaagaaaaactgtttcatcatttctgttagggtaggaaatgaatcatagggtaaaatggatgagtagatagaagtctctcatttaaaaagtgtcttttgcatcttgatgtaatgcactttttataaggactgagatctcaaataaaattt

SEQ ID NO: 20166 - DNA, 661 bp, Homo Sapiens
gcacgagggaagagcaggctaaatattatgaattagcacggaaagaaagacagctacatatgcagctttatccaggctggtctgcaagagacaattatggtaagaaaaagaagaggaagagagagaaactacaggaatctgcatcaggtacaggtccaagaatgacagctgcctacatctgaaacatggtggaaaacgaagctcattcccaacgtgcaaagccaaggcagcgaccccaggacctcttctggagatggaagcttgttgaaaacccagactgtctccacggcctgcccagtcgaccccaaaggaacactgacatcaattttaccctgaggtcactgctagagacgctgatccataaagacaatcactgccaacccctctttcgtctactgcaagagccaagttccaaaataaagcataaaaaggttttttaaaaggaaatgtaaaagcacatgagaatgctagcaggctgtggggcagctgagcagcttttctccccccatatctgcgtgcacttcccagagcatcttgcatccaaacctgtaacctttcggcaaggacggtaacttggctgcatttgcctgtcatgcgcaactggagccagcaaccagcacatccatcagcaccccagtggaggagttcatggaagagttcc

SEQ ID NO: 20167 - DNA, 873 bp, Homo Sapiens
gcacgaggcttccacatcaagtgccgagcttccggcttggtgcccaacgtggttgtgttagtggcaacggtgcgagctctgaagatgcatggaggcgggccaagtgtaacggctggtgttcctcttaagaaagaatatacagaggagaacatccagctggtggcagacggctgctgtaacctccagaagcaaattcagatcactcagctctttggggttcccgttgtggtggctctgaatgtcttcaagaccgacacccgcgctgagattgacttggtgtgtgagcttgcaaagcgggctggtgcctttgatgcagtcccctgctatcactggtcggttggtggaaaaggatcggtggacttggctcgggctgtgagagaggctgcgagtaaaagaagccgattccagttcctgtatgatgttcaggttccaattgtggacaagataaggaccattgctcaggctgtctatggagccaaagatattgaactctctcctgaggcacaagccaaaatagatcgttacactcaacagggttttggaaatttgcccatctgcatggcaaagacccacctttctctatctcaccaacctgacaaaaaaggtgtgccaagggacttcatcttacctatcagtgacgtccgggccagcataggcgctgggttcatttaccctttggtcggaacgatgagcaccatgccaggactgcccacccggccctgcttttatgacatagatcttgataccgaaacagaacaagttaaaggcttgttctaagtggacaaggctctcacaggaccctatgcagactcctgaaacagactactctttgcctttttgctgcagttggagaaaaactgaatttgaaaaatg

SEQ ID NO: 20168 - DNA, 887 bp, Homo Sapiens
gcacgagggtaggaaaggagacgccaccagacatcttcaacagacaagattctttctgcctttttcaaaagatgctctctgcagcagtaagactatagatagagttgattggaatatcatgtgacccagtatgctactgctaggcataattatcaaaaattcatttttctcattaaatattgttaattgctcgccacataaagagaagctagagctcaccagtcttggtggtgtcctagaccttcctctaaagcagtcttgggaagctggatcatcagatctttagcctagacagagtgtcgctggtaaataaaggagacacaggtaacccagagtggacagtgatttgcgtggggagacacagtggatctggggcctctgatactttgcttcctaaaacagcccccagttttcggcttgccctatgagatgatgttcatgtgcttccttgaaaccaggtggaaagaaaggggaagaattaattttctcattctgttgctgttgaacgtaatgtaatcttaatactgtagccttcctagaagcccttccctctttttcatgctgtaaagtcaaatatttgatatccttaacataaattttaaaaattaaggtcattaggaagcaaatgtctatttccaaagcaatgagcttgttgtgactgtgattttattcttctatagtatttttttcctcattttaatttgagaggagaaaataatactcttttgcaatatccttaggttctccccttccccctggtgccccttctagtgtcttaagactttgtcttaacaggtataacattacattttgttgttaaaactttcgaaactgtattcagtgattcttccaagtttatctgctctggactatttcacaataaaccc

SEQ ID NO: 20169 - DNA, 1186 bp, Homo Sapiens
gcacgaggcaagaagaagggatttgaagaggagcacaaggacagtgatgatgacagcagtgatgacgagcaggaaaagaagccagaagcccccaagctgtccaagaagaagttgcgccgaatgaaccgcttcactgtggctgaactcaagcagctggtggctcggcccgatgtcgtggagatgcacgatgtgacagcgcaggaccctaagctcttggttcacctcaaggccactcggaactctgtgcctgtgccacgccactggtgttttaagcgcaaatacctgcagggcaaacggggcattgagaagccccccttcgagctgttcctttgggtaccatgctggtggctggggcaaacctccagtggatgagactgggaaaccgctctatggggacgtgtttggaaccaatgctgctgaatttcagaccaagactgaggaagaagagattgatcggaccccttggggggaactggaaccatctgatgaagaatcctcagaagaagaggaagaggaagaaagtgatgaagacaaaccagatgagacaggctttattacccctgcagacagtggccttatcactcctggaggcttttcatcagtgcctgctggaatggagacccctgaactcattgagctgaggaagaagaagattgaggaggcgatggacggaagtgagacacctcagctcttcactgtgttgccagagaagagaacagccactgttggaggggccatgatgggatcaacccacatttatgacatgtccacggttatgagccggaagggcccggctcctgagctgcaaggtgtggaagtggcgctggcgcctgaagagttggagctggatcctatggccatgacccagaagtatgaggagcatgtgcgggagcagcaggctcaagtagagaaggaggacttcagtgacatggtggctgagcacgctgccaaacagaagcaaaaaaaacggaaagctcagccccaggacagccgtgggggcagcaagaaatataaggagttcaagttttaggtcccctcacactagccctttttttggccctacgtctggatgcctgggcttcacacaagaaccacctctcccgcagttcccaagacttgtcatttcatgttcttattttagacctgtttgtaataagctgtttcccaaggaaagagatgaatattt

SEQ ID NO: 20170 - DNA, 964 bp, Homo Sapiens
gcacgaggatctcttcatgctggaaacagtggattctgtgaagttggcagacaaagtgaacagttcctggcagagaaaaggttctcctgaaaggttaaaggttatggtccagattaacaccagcggagaagagagtaaacatggccttccaccttcagagaccatagccatcgtggagcacataaacgccaagtgtcctaacctggagtttgtggggctgatgaccataggaagctttgggcatgatcttagtcaaggaccaaatccagacttccagctgttattgtccctccgggaggagctgtgtaaaaagctgaacatccctgctgaccaggttgagctgagcatgggcatgtccgcggatttccagcatgcggttgaagtaggatctacaaatgtccgaataggaagcacgatttttggagagcgggattactcaaagaaacccaccccggacaagtgcgcagcagacgtgaaggccccgctggaggtggcacaggagcactgagccagggaatactgagagcactaactatgcactaacctagattttcatttcgatattccctgtgtcccagcgcagtcctgctctcctgtgacctgtggagagcactaatgatcacgtgtgttgatggaaaccatctgtgcttagtctctgacataggaagcttgcttcaggcaatggctttggattgagtttgagaaattcaaacatttctgcagaacagataccaaatcaatagctaggaatcatgttcaatattgaattctgcccaggagcatgaactgatccatgaatgccttttccaggttaaaatttggtcactgatgcctataatcgtggaagtcagagggattcccctttttcatctcattttaataggaaaatttcttatggttaacatctccctacaaactcctactacgtcgtctaaattgctgctctggaataaagtgatttctg

SEQ ID NO: 20171 - DNA, 1501 bp, Homo Sapiens
  misc_feature (174)..(184): n is a, c, g, or t
gcacgaggaaacaagttgccatatttcaaagccttgaactaagactcaattaccaacccgcagttttgtgtcagtgcccaaaggaggtaggttgatggtgcttaacaaacatgaagtatggtgtaataggaataatatttatccaaaagatttttaaaaatagggctgtgtttnnnnnnnnnnncaaaacaagaaaagcagcagtgattatagagaggtcacactctaagtggggtcgcggcgtggccacgcttcacggtcacgctcgtccgtcctgcagtggcgtgtttacatggtcacacgtgtgtgtatcaccagtgggtcaactgcttgtcattcctcccgtggcagtttgtgtagacaatcttactgagcaaaaggcaatgaaaagtcttggttcccacactgcgatatattggaattttcacctcagtttatgaagtttatttcgaaatccatagtcatctaagaatgaatacctgtctgccatgtatttcaatcttagtgagccaaaattgtttgtttgttactacagaatagagatgactgttttttgccacagccctatggaatttgcaatctgtgattgccttgtaaaaaggagagtgcatatggcactgcattaaacgtgtggtgtttctagtcaatgatattggtgagcacaatgtattcatttaatggcatagaccataccagacctaatttgcaagtattgggtcttaaacttcaagtgcaatgtatatgaaaaccaatctgagccttgtatctcttaaatatttattttttttaacgtgtgagatgttcgagagaaggttctccattcatttcagtgctgcctggaggaaactcggcaatgatttctttcagttgtgaagttcctttcgtgttacaccctccactgaaccctcaaccttcgaaatactccagttttgtgggtttggtcatttttacttataaatttacctttttgtattttgcaatttacatgtgtttggtttgttttaaattctgtgaaagtggcttgattaaaagactccttttaaatggaagccaccagtcagcagaatggaagcttagaggaacttgcctgtgagcgctggtctttgtgtttggttttgtgatgtaacgatctttgctggggttttttgctttgttttgagggaaatgtcttggagtaaattttaagttcctggagttaatttgttttacaggaattttgttttttaaaaaaataggatcattctgaactttggaatgacccccttatatattttctgaaaatgaaaacagttacatgaaaaaaatttccaatgaagatgtcagcattttatgaaaaaccagaagttattagatgaaagcagcgagtgaatctttaaacagacttgatcacgcacacacaataagtctttctctccgaaacggaagtaaatctatatctgttaaaatatgtacccaaagaattgtaaatttgaggatttttttgcaatagttttaaaaaata

SEQ ID NO: 20172 - DNA, 927 bp, Homo Sapiens
gcacgagggtcagtaatcaacctgggaagggaaaagacgacagtaaatattaccccctgtagagccgggaggcatttacacctggaatggccttcttaactgatttctgcctggccccctcacccccagccaagtctgaacctgagcaataccaggcacagagaggtgtctacttgtaactccaacacttgacaaaaaacaaaactgaagctgtgattggtttaggcagcaagtggccaggtgcaacttgtttgtttttatttttgttttccccaacagtactgagatcacttgcacttttcctcatttcttaagaaaatccagtttgcttgccatgacttgtttagcgttaggtttacaaagcttgttgttgaatgttgaatatttgtccaaaggagtttgacaaaatagaagctgcttggtccctgttctgcctgctaggtcataaggatgaaggccatgtggctggggtacttatgtcaagtccagaatggggcagtgtccctctcctacctctctgcggagacgcaattgaaggtcaagtagactcagtgtagggcaggcagctgtcatgctgcaaagaagtttagaggagtctttgggttggggaggtgacaggtaggtaggacaggatctcttaagatgggaaagatactggggagaggagggctgcttggcctcagggaactgcagtgaggtggaactgagctccgctcctgaatctccaaaggagcccatgctgcccggcttccctgagtcattttttccagcatcctgtcagatccctcaatgtactgatttcccccttgtgttaactataccgatattatttttttagcaattgaaatgcacttttttatttcaactcatcctgattttaagtataaaaatttatagattggttaaactacttttttgtgtattttt

SEQ ID NO: 20173 - DNA, 1450 bp, Homo Sapiens
gcacgagggacatatcaaagagttgcaacaagaaaacaaagaattacgtacatctctggaagaacatcagtcggccttggaacttataatgagcaagtaccgagaacaaatgtttagattgctaatggctagcaaaaaagatgatccgggtataataatgaagttaaaagagcagcactccaagattgacatggtacatcgtaacaagtccgaaggattcttccttgatgcatctcgacacatccttgaagcacctcaacatggactggagagaaggcacttggaagcaaatcagaatgaactgcaagcacatgttgaccagataactgaaatggcagcagtaatgaggaaagccattgaaattgacgagcaacagggttgcaaggaacaagaacgaatatttcaacttgaacaagaaaacaaaggcttgagagagatccttcaaataactcgagaatcatttttgaacctaaggaaagatgatgcgtcggaaagtacttctttgtcagcattagtgaccaacagtgatttgagtctgaggaaggctgaagagtttctgagtctgtgagcttcttacatggctccaaatggtcaaataagtgaatgaatgaatggacagaaaattcaatcctttatttttttctctgtaaatatgtacagtgcacgggctatgagatagcaacaaaaaatgcatagttaatggtcatagactttattccaaaacataattggaaaatagaaactgagccattgccaaatggtaaagaaatgaaaagttttcacagtgactactgaatataccaagagcttttggcagtactgctggctttctgggtgattaattaggtaaacttgaatattcccagtaaatgtttgagaatgcataaaattataccaatttaaaaatataaatttttgccactgttttgtgaacggaggatttgtacgctaaatttcatccttatttggcgtcaaagttgatgcaaagtttatgtaccatgagacttctagtgattgcctactttcacatttatttaaatttttgtgaaagaaaatacagttttaaaggctataggaatgtgttatatgtaccttaaacagataatttaattttagcaatttatcataactgatacttagctaacaattgtccataacttgtttaagtgtaagaaataccatttcaggaatgaaaaagaaggaatactactttctaagaaagaagatcttataatagacatatttagtaggttaaactactcctttgaaagaataagttttggttcaaagtcaataatgaagacggagatttgtttttctcttctctggctgattattaaaggatattatgtagttcatttagttaacagaattgaaaatgtttgatatggcagataggtatgggtaatttcaaagtgaattgggaaattcctctgggctcatagaaccc

SEQ ID NO: 20174 - DNA, 652 bp, Homo Sapiens
gcacgaggtaaaaactggatttctacataatggccgagccatggggaatatgaggaagacctactggagcagtcgcagtgagtttaaaaacaactttttaaatattgacccgataaccatggcctacagtctgaactcttctgctcaggagcgcctaataccacttgggcatgcttccaaatctgctccgatgaatggccactgctttgcagaaaatggtccatctcaaaagtccagcttgccccctcttcttattcccccaagtgaaaacttgggaccacatgaagaggatcaagttgtatgtggttttaagaaactcacagtgaatggggtttgtgcttccacccctccactgacacccataaaaaactccccttcccttttcccctgtgcccctctttgtgaacggggttctaggcctcttccaccgttgccaatctctgaagccctctctctggatgacacagactgtgaggtggaattcctaactagctcatcgtagtgcgggccgtattagaagcagtggggtacgttagactcagatggaaaagtattctaggtgccagtgttaggatgtcagttttacaaaataatgaagcaattagctatgtgattgagagttattgtttggggatgtgtgttgtggttttgc

SEQ ID NO: 20175 - DNA, 134 bp, Homo Sapiens
ccccgggctgcaggaattcggcacgaggctgatcttggctatttcttgttttctgctagctttcaggtttgttttcacttggttttctgttcttttaatcaagatgttaggctgttaacttcagatctttctaa

SEQ ID NO: 20176 - DNA, 892 bp, Homo Sapiens
cagcaatggcggcgggcggcggcggtagctgcgaccccctggcccctgctggggtcccttgcgccttctccccgcacagccaggcctacttcgctttggcctctaccgacggtcacttacgagtatgggagacggccaacaaccggctgcaccaggagtacgtgccttccgcgcacctcagtggtacctgcacctgtctggcctgggcgccagcgcggctgcaggccaaggaaagtccccagaggaaaaaaaggaaatcagaagctgtaggaatgagtaaccagactgacttattggctcttggcacagcagttggtagcattttattatacagcacagtaaaaggagagttacacagtaaattaataagtggtggacatgacaacagagtcaactgcatacagtggcatcaagacagtggctgtttatatagttgttcagatgataaacatattgtggagtggaacgtacagacatgcaaagtaaagtgcaaatggaaaggggacaatagcagtgtcagttccctatgtatcagcccagatggaaagcagagtcaaaacttttcagaaactttcacaccttcatggaaagcttattcttctaattacacaagtaacagcatcagagaagacaaagggagcaacttcccctggacagaaggcaaagttggtgtatgaagaagagtcttctgaagaggagtctgatgatgaaatagcagataaggattctgaagataattgggatgaagatgaggaggagagtgaaagtgaaaaagatgaggacgttgaagaggaagatgaggatgccgaaggaaaagatgaagaaaatggcgaggacagagatacagcaagtgaaaaagatttaaatggagattctgacttaaatcctgaaa

SEQ ID NO: 20177 - DNA, 1584 bp, Homo Sapiens
gcacgagggacgaggaggaatcatggcggctgcgctgttcgtgctgctgggattcgcgctgctgggcacccacggagcctccggggctgccggcacagtcttcactaccgtagaagaccttggctccaagatactcctcacctgctccttgaatgacagcgccacagaggtcacagggcaccgctggctgaaggggggcgtggtgctgaaggaggacgcgctgcccggccagaaaacggagttcaaggtggactccgacgaccagtggggagagtactcctgcgtcttcctccccgagcccatgggcacggccaacatccagctccacgggcctcccagagtgaaggccgtgaagtcgtcagaacacatcaacgagggggagacggccatgctggtctgcaagtcagagtccgtgccacctgtcactgactgggcctggtacaagatcactgactctgaggacaaggccctcatgaacggctccgagagcaggttcttcgtgagttcctcgcagggccggtcagagctacacattgagaacctgaacatggaggccgaccccggccagtaccggtgcaacggcaccagctccaagggctccgaccaggccatcatcacgctccgcgtgcgcagccacctggccgccctctggcccttcctgggcatcgtggctgaggtgctggtgctggtcaccatcatcttcatctacgagaagcgccggaagcccgaggacgtcctggatgatgacgacgccggctctgcacccctgaagagcagcgggcagcaccagaatgacaaaggcaagaacgtccgccagaggaactcttcctgaggcaggtggcccgaggacgctccctgctccgcgtctgcgccgccgccggagtccactcccagtgcttgcaagattccaagttctcacctcttaaagaaaacccaccccgtagattcccatcatacacttccttcttttttaaaaaagttgggttttctccattcaggattctgttccttaggattttttccttctgaagtgtttcacgagagcccgggagctgctgccctgcggccccgtctgtggctttcagcctctgggtctgagtcatggccgggtgggcggcacagccttctccactggccggagtcagtgccaggtccttgccctttgtggaaagtcacaggtcacacgaggggccccgtgtcctgcctgtctgaagccaatgctgtctggttgcgccatttttgtgcttttatgtttaattttatgagggccacgggtctgtgttcgactcagcctcagggacgactctgacctcttggccacagaggactcacttgcccacaccgagggcgaccccgtcacagcctcaagtcactcccaagccccctccttgtctgtgcatccgggggcagctctggagggggtttgctggggaactggcgccatcgccgggactccagaaccgcagaagcctccccagctcacccctggaggacggccggctctctatagcaccagggctcacgtgggaacccccctcccacccaccgccacaataaagatcgcccccacctccaccctcaaaa

SEQ ID NO: 20178 - DNA, 1519 bp, Homo Sapiens
  misc_feature (464)..(472): n is a, c, g, or t
  misc_feature (764)..(794): n is a, c, g, or t
ctggctgagtttggaacttgtaatctcattgttttctaaataatgtttcatttttcttcagtgttgaaaatagttgatttacttaagaatggcatgatcatgatgttccaagattctgattagtttctttcaaagcattctgcgcctcttcaatgcccacactgctgagcactataataatagatgttgttaggccaaaggatgtcagatgtaaagtatgttctctagccccactcttagaaatgttttatcaatgactcagtccacttgattttcaaaaagtcaatgccatcccattaaacaagtaaccccttaggtacagaataattaattcctgcctgagtcactttaacagccttctatagagtgacatagtcttgctttttttcacaagcaatagctgaaaagaacaaatctcaactgtaagaactgtcagtacattgtagggataaagcactttttgnnnnnnnnntctctggcatgtattagacagactgaacatgagatagggttggggtgggctgagccttttggtgtcattaactgaatacacaagaatgaacctctcatcagatatcaggaatccatgtcatgcaagtactacaataagataacagtaaattcaggaatgttactggggaaaaggaagatagcctcactgagaatttaatcatttaacattaaaaaaacttttacattggttcaagaaggtaaaactgtaagaatcagattaggctcaaactggcaagaagccatctaaatcnnnnnnnnnnnnnnnnnnnnnnnnnnnnnnngtccatagcgccgtctgcgctgtttataaaggtgacgaaaatttatgtataaacctaaaaatatcattataagataaatctgaagaaaaaaggaaaatctaactttgattttcactggatatggcaatgtgaaactgaatcgtccggtctcattgaatattggaatggactgaatcactgagacagcttccgccaaacatcccagtggatataagggaatccacagagtgtaacgaagccatgtgagcaccttccaatccatgtcaatgcacgtcagcatgtagaaagagtacctgaaaatttcaattgcactccacaaataaaacacaaagaaaaccacagctttgttctgcatttcttccatggtgccaaagatgataaacaaaataaaatttcttccaagaagctggatcagagaaggcagcaccggtgacgtagtgactccaattgctgcattgatagtttccacaactgccagcatctggcagaaatacatcatgtcagccacagtatggaatgtgtcataaaaggactcttttcccaagatacagaatcgcacagtcaggttgacaaagatccaggagaatcccaagaattgcacaagattatacataaacaggtatcctttccttaagtttgtaagagtttcaggagagccttcgctttccagtcggagtttatttaggcgctcttctttccttagctctgagctctcggacgcgtgg

SEQ ID NO: 20179 - DNA, 1172 bp, Homo Sapiens
gcacgaggaatagcatattttattttaatctaagaacaatgattaaattcaaaggtcagaaatataaaagattatccaaaaagtttaggatcataactgtttcttaaacaacattggcatgtacttgagctggttctgtggctccaaaggcttgatttttaccttgcacagtttaaataagcaagaagccttacgcgatgctccacaagcatcacaacatcacaaaatcattctacaaggcatgtctcaggggatttggggccatgaagatctttttccaaccaaaagtctgagccgagatagaatcacagcttgaagttcctgctctcagactgtcctccaaatggttccttaagacactgggtgccctgagctctggggcccaggcctgagggtggcagctggttatgcacgcagaccagttctgttggtcactgtgtgggcattccactcctatccttctctgccagtgccactcggatgaatttcccattggcaagttctcgtacccttgatgcattcagaaaagcagaaaggaaccgtggggaccctcaggcacctccccccggctgccaacaccagccccgggggcaccacgtatccggctgtaccttcagtaaggagactgctcataattggttcaggtgaagattttaccttccggtagccctggggtggaccaggtaggaggatcaggagaataatgtccacgtgtaggaggaaaaccaggcagacaagcctgttagccagctcggtcacaccgagactggatttacattttggaaggatgggcccctcccaggcattgtgactggatttactgcctcgtaggcagcctcccaccatccgaacgactttctgggactcattcaagccccagggcaaaactcaaaacagaagcttaaaatggaaaagcaaagatcctttgagccaaagtatcacaccaacgacagtttgaaaatattatttcctccaggggaactacctgcacttaactggatagctttagtggttgcgtgattcattgtatgagcaagatctctggaaagcaaaacaagacaaactaacagaaaatcccaagaaacaaaccagcccatgcatgttaactgcctgtagggtcggccgtacatcacaaacttccatggacatgtggagcttccaacatgattcca

SEQ ID NO: 20180 - DNA, 1353 bp, Homo Sapiens
gcacgaggggatgatgtcagctttcacccctgcatccggttcaagcgttgggaatctgaaagagttttgtcatttattcctccagatggaaatttccgactcatatcataccgtgtcagctcacaaaatctagtggcaataccagtgtatgtgaaacatagtatcagctttaaggagaacagttcttgcggcagatttgatataacaattggaccaaagcagaatatggggaaaactattgaaggaattacagtgacagttcacatgccaaaagttgtgctgaacatgaacctgacacccacacaaggcagctatacatttgatccagtcaccaaggtactaacatgggatgtgggaaaaattactccacaaaagctcccaagtcttaaaggactggtaaatttacagtctggagcccccaaaccagaagagaatccgagcctcaacatacagtttaagatccagcagcttgctatttcaggcttaaaagtaaaccgtttggacatgtatggggagaaatataagccatttaaaggagtcaaatacgtcacgaaagctggaaagttccaagtgaggacatgagaagaggccaaaattcctcaggaccagtttgttttccaagtgtcattacgatgtatcactattaggtaccaagtgagtgggaatacatattctagttaaagcatttgtgtctagctacacaccgctaacaaagttacttagttatcaatgtaggattcttaaggagctttaagctaaggaaaccttttagtgacttagcttattttgtatcttttcacttaggaagattttggaggtgatttttttccataggaggataccatctggcggctgcacattgtaacagtaaaggcagaaagctgtagtgataacctctctcctaaaagagttaactggtctcatccagcagaagctatcttaaatctgtgatgtgtcaggtgcagccaaatatcacaccttctgatcttagccatcccaaaccagtatctgtcccgagaggaaattccccccacccccagaagtttacagaaaactgcctcttcaagtgtttgccttattcagcttttcacttgtgccattaagcaagcactgtagcaaaagccacttccacatggccctggcaagggagcactgctgctccatgctccattctcactgtacttggtattgtattttttataaataagattttatgtaaagcttagaatttgatttacaggggactttgctgcagtaaataccatctcaatttgtgccactggttcactgttagcacagtaaaaaatcattttgtatcaaaggggcaaatgctttattaaggaataaaaggga

SEQ ID NO: 20181 - DNA, 556 bp, Homo Sapiens
  misc_feature (375)..(387): n is a, c, g, or t
cccacgcgtccgagtggaaatcaggattgttatgaagacttaaggcccagtatttttgaatacaatactcatctaggatgtaacagtgaagctgagtaaactataactgttaaacttaagttccagcttttctcaagttagttataggatgtacttaagcagtaagcgtatttaggtaaaagcagttgaattatgttaaatgttgccctttgccacgttaaattgaacactgttttggatgcatgttgaaagacatgcttttatttttttgtaaaacaatataggagctgtgtctactattaaaagtgaaacattttggcatgtttgttaattctagtttcatttaataacctgtaaggcacgtaagtttaagcnnnnnnnnnnnnnaagttaatgggaaaaatttgagacgcaataccaatacttaggattttggtcttggtgtttgtatgaaattctgaggccttgatttaaatctttcattgtattgtgatttccttttaggtatattgcgctaagtgaaacttgtcaaataaatcctccttttaaaaactgc

SEQ ID NO: 20182 - DNA, 913 bp, Homo Sapiens
  misc_feature (537)..(558): n is a, c, g, or t
  misc_feature (772)..(795): n is a, c, g, or t
gcacgagggtttgaaacaagcacggtacagtaatcctgcctgatagagtagtctggaatgagaattactttttgggtgagagagttctccattttaatgtttctaaagtttttcatatgaacttggcattggaaaagggaggtaaagaaaaaggacgtttactaaaagcagtgtctactcttcccctttgtgagtgtttattcatggctaatgaaaaaaagagaaggactcttgggttttgtgttgccatgttaagcatggagagggatgcttgacagcatgctaattgaagccagagcaagtatgtccttcatcaggtaatcaggaactcttcagttgaagctgaggaactaactgattagttgttgatcataatataattggttacaaagtggaagtgccagctggcttaagtacccaaagaaaagaatgcagcagcctaacttagtgttaccatatgttactgaatttgaaactgaccttttttcccaccctacttcacacacctaaaactcttcttgtcagaccaaagagcgnnnnnnnnnnnnnnnnnnnnnncactttaccaatctgtcactcaggtacaattttgtggtgagattttagtctgttctctttgtattgctcttaagagtcctttctcagcatattattctgccattgcctctgtcttccttggggcacctcagctctggatgctacccctgggatatctactgctgttatgtgaatgataggaggtaagtgaccattatagtaagggctctttgtnnnnnnnnnnnnnnnnnnnnnnnnggatgtatacattttatagtctggctatcagtttgatatcttgctgtcaagtatgtttctcaatctgtatttatccatcccatcaataaatgttaatggtaaaacaaaaacctcgtgc

SEQ ID NO: 20183 - DNA, 1149 bp, Homo Sapiens
cgtccgcggaggtgaaggacgtccttccccaggagccgactggccaatcacaggcaggaagatgaaggttctgtgggctgcgttgctggtcacattcctggcaggatgccaggccaaggtggagcaagcggtggagacagagccggagcccgagctgcgccagcagaccgagtggcagagcggccagcgctgggaactggcactgggtcgcttttgggattacctgcgctgggtgcagacactgtctgagcaggtgcaggaggagctgctcagctcccaggtcacccaggaactgagggcgctgatggacgagaccatgaaggagttgaaggcctacaaatcggaactggaggaacaactgaccccggtggcggaggagacgcgggcacggctgtccaaggagctgcaggcggcgcaggcccggctgggcgcggacatggaggacgtgtgcggccgcctggtgcagtaccgcggcgaggtgcaggccatgctcggccagagcaccgaggagctgcgggtgcgcctcgcctcccacctgcgcaagctgcgtaagcggctcctccgcgatgccgatgacctgcagaagcgcctggcagtgtaccaggccggggcccgcgagggcgccgagcgcggcctcagcgccatccgcgagcgcctggggcccctggtggaacagggccgcgtgcgggccgccactgtgggctccctggccggccagccgctacaggagcgggcccaggcctggggcgagcggctgcgcgcgcggatggaggagatgggcagccggacccgcgaccgcctggacgaggtgaaggagcaggtggcggaggtgcgcgccaagctggaggagcaggcccagcagatacgcctgcaggccgaggccttccaggcccgcctcaagagctggttcgagcccctggtggaagacatgcagcgccagtgggccgggctggtggagaaggtgcaggctgccgtgggcaccagcgccgcccctgtgcccagcgacaatcactgaacgccgaagcctgcagccatgcgaccccacgccaccccgtgcctcttgcctccgcgcagcctgcagcgggagaccctgtccccgccccagccgtcctcctggggtggaccctagtttaataaagattcaccaag

SEQ ID NO: 20184 - DNA, 789 bp, Homo Sapiens
caaagttttgtgcattttatttaataaatttaggccataaaacattgtaacttaaatcgcttctatacactatatattcatataaccttgttggcctgaagtaaatgcttactaggaagtttttccatggcttctttttaaaatcctcagttatcttctcctttttaaataaggattgtatctaaaaagatcatcagcaagagactcttcttttgcatgttgattttgtacctccatttcctgccttagccactcttctagttctgtattctttcgagcatgatgagctattaaatctgatcctccaatgatgtgtggaagttttcctgctccaggatatgtgacctttttgaatttcttgaaattttttagttgaccataatcatcatttatgccaaacggatttctggaagtaaagtttttaatcaccagtgatctaaattcagtcaataacagcttttttggaagcatctcactatcatcctgaagtttgtcattgttagatatttctttagctgaccatagtgagtcttccttgagttcacgtttcttcccaatttcattttcttgagatattttgctactttctggtactgcttcatcactgaaagtgtcatttgtttctatatccatccttggcctttttctaacattgacatcttcctcctgtttttgaactttcacatcaatttctaactctggttttgtgtccttgaataactgttccaatacttcatcttctatggccacatcatccatttccctttttttatttgatcttagcttttc

SEQ ID NO: 20185 - DNA, 873 bp, Homo Sapiens
gcacgaggctccaccacctgagtgctactccctatttgcatctgttttgataaatgatgttgacaccctccaccgaattctaagtggaatcatgtcgggaagagatacaatccttggcctgtgtatcctcgcattagccttgtctttggccatgatgtttaccttcagattcatcaccacccttctggttcacattttcatttcattggttattttgggattgttgtttgtctgcggtgttttatggtggctgtattatgactataccaacgacctcagcatagaattggacacagaaagggaaaatatgaagtgcgtgctggggtttgctatcgtatccacaggcatcacggcagtgctgctcgtcttgatttttgttctcagaaagagaataaaattgacagttgagcttttccaaatcacaaataaagccatcagcagtgctcccttcctgctgttccagccactgtggacatttgccatcctcattttcttctgggtcctctgggtggctgtgctgctgagcctgggaactgcaggagctgcctaggttatggaaggcggccaagtggaatataagctcctttcgggcattcggtacatgtggtcgtaccatttaattggcctcatctggactagtgaattcatccttgcgtgccagcaaatgactatagctggggcagtggttacttgttatttcaacagaagtaaaaatgatccctcctgatcatcccatccttttcgtctctctccaattctcttcttctaccatcaaggaaccattgtgaaagggtcatttttaatctctgtggtgagggatttctgagaatcattgtcatgtactgcaaacgcactgaaagaacagcagcatgg

SEQ ID NO: 20186 - DNA, 893 bp, Homo Sapiens
ccccgggctgcaggaattcggcacgaggcttccctccgatcttagtgtggacagtgctcgctgcaagcctgggaataaccttaccaaatcactcttgaacattcatgataaacaacttcaacatgacccagctcctgctcacacttccataatgagctatctaaataagttagaaacaaattacagttttacacattcagagccactttctacaattaaaaatgaggaaaccatagagccagacaaaacctatgaaaatgttctgtcctccagaggccctcaaaatagtaacactaggggcatggaggaagcatctgcacctggaattatttctgccctttcaaaacaggattctgatgaagggagtgaaactatggctttaatagaagatgagcataatttggataatacaatttacattccttttgctagaagcactcctgaaaagaaatcaccactttctaagagactatcccctcagccacaaataagagcagctacaacacagctagtcagcaacagtggacttgctgtctctggaaaagaaaataaactgtgtacacctgtaatctgttcctcttcaacaaaggaagcagaagatgcacctgaaaaactttccagagcatctgatatgaaggacacacagctcctcaagaaaataaaggaagcaattggtaagatccctgctgccaccaaggagccagaggaacaaactgcatgtcatggcccatcaggttgtcttagcaacagccttcaagtgaaaggcaatactgtctgtgatggtagtgttttcacttctgactttgatgtctgactggagcatctctttcgttttcaacgttcacttctcgtgatgaactagacttcaaaaatgggccttgcggcattagatg

SEQ ID NO: 20187 - DNA, 1386 bp, Homo Sapiens
  misc_feature (326)..(363): n is a, c, g, or t
attaattctacaagcatttattgccatctcctatgtgccaagcactggtccaggctctggggatacactatgaacaaaatacagtgaagtccctgccccatggagcttacattctagtagggggagacagacaaacacataaatacaaaatatcagagggttcaaaacagcttagaggtatcttgcctgaattctgtttactgcatatcctcattcttgggcaatgataaagtgaagagagaggccaacaatgggctgcagcaatgttgctagtcccagctctaccatctacacattgagtggatttaagtgagttctcatctgannnnnnnnnnnnnnnnnnnnnnnnnnnnnnnnnnnnnnattggattaaattacttataagggaaagggtcctttcaggcttttttcatgagagtagggtgctgaaaatcaagagccagtttgttgactcctctaaggtttaaaaaatatttaaatataaaatctaagaaatccttagagatcccatacactcaatacttcaaatgccaatctgaacttctttcatcaatagcaaattcttatttacaatggctatagaatgaagtcattttaccatctttagccatatgaaaaataagttatttacttataaaaacattcatttttattattggttacaaaatctcaccttatttgtgaaatgttccctagctatgagatcctgcccttgatgtgacactatttctctcttctgctaacccctatccctgactttgtgctcctgtttaatttttccaactgaagtattagctttatgaaaacagggatcggctgcttgcttctttgaagaacaacccaaatgagagtatgtccaggtaatccatagacatgtataatcattacacctgcattttgttttacaggtacaggccttttggtaacccacattagctctttagactgtcagagttgttcagcttagtaaaatttagtttatcaaagggtactctaacatccgaaaaggaaaaacacgtttccagactaattcacagactagggcattgtaacttcactggaagccctggtgagaggcgttaatacatatttaataatgtaagtgaagtagcacatattttataatcaattaatttttctcaaagaagataatgtagcagaagacctgaatgtcaaacaaggttagactcatacttactaacttggtaggagttacgatgcctctgattctcttgaaagacaaactgtattcactagtttgattttgaaatgtagagatcaaatttcaatcaacccagcagctaaggatgacaggaaattttacaggactagaaggaatcatcttctcttatctggatctgatcctcctcgacaccttcctcgtgc

SEQ ID NO: 20188 - DNA, 1594 bp, Homo Sapiens
caggaattcggcacgaggctcccaagtcagccccaggcacagaagagacgattcacagaggagctaccagatgaacgggaatctggactgcttggataccagcatggacccattcatatgactaatttaggtacaggcttctccagtcagaatgagattgaaggtgcaggatcgaagccagcaagttcctcaggcaaagagagagagagggacaggcagttgatgcctccaccagcctttccagtgactggaataaaaacagagtccgatgaaaggaatgggtctgggaccttaacagggagccatgattatccagccaagaagatgaaaactacagagaagggatttggcttggtggcttatgctgcagattcatctgatgaagaggaggaacatggaggtcataaaaatgcaagtagttttccacagggctggagtttgggataccaatatccttcatcacaaccacgagctaaacaacagatgccattctggatggctccctaggaaacagtggaacagagttttgaccctcagtgactcttcttagcaataatgcatgcatttgatttaacaagactctggggcctgtgctgggaaccatctggacctttgcagaagttagagattcagtgcccccctttcttaaaggggttccttaacaaccacaaaaatccttatttctgcagtggcatagaatctgttaaaatttaattagaatcacaaatttatctcagaagctttttaacagttggtgaaatgtgcttgtccaacaaagcatcctaacagggtcgttcccatacacatttgacctggtcagccttttccaggtgaatagccccagttctgacataaagaaagttttatttgtattttactactgtttggtcaattttgatatataactggttacaaacagagccttactatttattagtggggaaatgattttaagaccgtccttttcagtatttaattctgacagatctgcatccctgttttgttttggattatttctgttttggaaaatgctgtctcatttaaaactgttggatatagctggatcctggataggaaaatgaaattattttttcattgtgttttttaattggggtgatccaaagctggcaccttcaggcacattggtctcatagccattactgtttttattgcccttctaagatcctgtcttcagctgggtcagagaaaacttcttgactaaaactggtcagaactcatcacagaaatgaaatacagtggtctctctctcccagaactggttgcagctaaaacagagagatctgactgctggctataggattttggacttaatgactgaaattgcaaattgtcctttttcttggcattacagattttgccaaaataactttttgtatcaaatattgatgtgtgaaagtgaaggagctagtctgctgaaccaggaatagtttgagatattgaactgtcatttttgcacatttgaatactttgcaggctggctttgtataaacttatcctctggtttcctatatgttgtaaatatttagaccataatttcattataaataaatctataaatattaaaacctcgtgc

SEQ ID NO: 20189 - DNA, 899 bp, Homo Sapiens
gcacgaggataaagtcatttatatttgattttgaaatgtatttttgtactttattttgaatatcatccatatgtctgacattattggaatttgtaacattgttaatgcactaagtgatttaaattcaattgatgaagatgtgattttacagaagcagaagtttcattttcttgaggcttaaaaccaatgtcaccacttgggcttaactgggtaatttgtggtctaggccttttgttttctaagcttactatcttgtgtttgtttatttgcttttaatgaagtattttgtgtagaaggttaaattaggatgcaaaacagatctgccattcctttttcccttatatcttccttttggtcttcatggacgagatgaatgaggattctgctgccctgagggagttcattggaaacctgcgttctcctacctcttccaaccctccattagctcaattttgagataatggaaaattgactggaaattcaaaactcaaactactatctttagatataaacactagtaattaaaatgtgccttttgaagatgttttctaagagaaaggaaatacgttgcagtgatgtgggtactgctttcataaaacagttttttcagtattttgagaattgccatattaatttttataatggaaaacttaataaattgctactgttttatatcataaaattaaaataccatggtaatatttgcaaaaggtctggccataccagaaaagtacagttgagatagttaagatataaccacaagtcagagtacattggttgtattttgtaaactttcatgaactgaattcttatttaaatagtatggttttttttcataagtatatttatagtgacaatgtggtagactaaaggtaataaaaatcattgtcttaagaaaa

SEQ ID NO: 20190 - DNA, 1236 bp, Homo Sapiens
gctgcaggaattcggcacgagggacaatgacaagtacatcgccctggatgagtgggccggctgcttcggcatcaagcagaaggatatcgacaaggatcttgtgatctaaatccactccttccacagtaccggattctctctttaaccctccccttcgtgtttcccccaatgtttaaaatgtttggatggtttgttgttctgcctggagacaaggtgctaacatagatttaagtgaatacattaacggtgctaaaaatgaaaattctaacccaagacatgacattcttagctgtaacttaactattaaggccttttccacacgcattaatagtcccatttttctcttgccatttgtagctttgcccattgtcttattggcacatgggtggacacggatctgctgggctctgccttaaacacacattgcagcttcaacttttctctttagtgttctgtttgaaactaatacttaccgagtcagactttgtgttcatttcatttcagggtcttggctgcctgtgggcttccccaggtggcctggaggtgggcaaagggaagtaacagacacacgatgttgtcaaggatggttttgggactagaggctcagtggtgggagagatccctgcagaacccaccaaccagaacgtggtttgcctgaggctgtaactgagagaaagattctggggctgtcttatgaaaatatagacattctcacataagcccagttcatcaccatttcctcctttacctttcagtgcagtttcttttcacattaggctgttggttcaaacttttgggagcacggactgtcagttctctgggaagtggtcagcgcatcctgcagggcttctcctcctctgtcttttggagaaccagggctcttctcaggggctctagggactgccaggctgtttcagccaggaaggccaaaatcaagagtgagatgtagaaagttgtaaaatagaaaaagtggagttggtgaatcggttgttctttcctcacatttggatgattgtcataaggtttttagcatgttcctccttttcttcaccctccccttttttcttctattaatcaagagaaacttcaaagttaatgggatggtcggatctcacaggctgagaactcgttcacctccaagcatttcatgaaaaagctgcttcttattaatcatacaaactctcccatgatgtgaagagtttcacaaatccttcaaaataaaaagtaatgacttag

SEQ ID NO: 20191 - DNA, 664 bp, Homo Sapiens
cccccgggctgcaggaattcggcacgaggcggagacgcagagtcttgagcagcgcggcaggcaccatgttcctgactgcgctcctctggcgcggccgcattcccggccgtcagtggatcgggaagcaccggcggccgcggttcgtgtcgttgcgcgccaagcagaacatgatccgccgcctggagatcgaggcggagaaccattactggctgagcatgccctacatgacccgggagcaggagcgcggccacgccgcggtgcgcaggagggaggccttcgaggccataaaggcggccgccacttccaagttccccccgcatagattcattgcggaccagctcgaccatctcaatgtcaccaagaaatggtcctaatcctgagtcgtcacccttggattttatggatcacggagctgaccatctttacctggtcctggaactgaaaaactgtagcttgtgtgaaaatgagcctttggaccagtctttattaaaacaaacaaacatgagtagtctgcatatcgaatatctagagctctaaaccccccaatacttaaaagtctaattgctgtcctgtggtttcattagtctgataggaagatagggatttcctcagtcacagatgatattttgaaggaaagctgcaataaagccacaatgatttgaaa

SEQ ID NO: 20192 - DNA, 1770 bp, Homo Sapiens
aaaaaaaaagagtttatttagaaagtatcatagtgtaaacaaacaaattgtaccactttgattttcttggaatacaagactcgtgatgcaaagctgaagttgtgtgtacaagactcttgacagttgtgcttctctaggaggttgggtttttttaaaaaaagaattatctgtgaaccatacgtgattaataaagatttcctttaaggcagaggctggtcgagatgctgctgttatcttctgcctcagacagacagtataagtggtcttgtttctaagattcctaccaccagttactttgggccaagtatccacatccccttgcgtatgggaggtgggtgaagagtgttggatgcaaagtggttattatgggaagtagctcgatggtaaaaggacaaacacctatctatcttagagcttaagcctgtatgtgcttattcccaagggagatagaggtgtttaatcacaaggacagcatgagttagaggacactggcatcaacagctgccacagccgtgcacaccagggccagagcagcccactgacatctgtctttggtcttgagatcaaatgcatcccattcttcatacattagaaggtcgacctccttgaagcagaccaagtatagcaagcctctaaaaggactactgagaaacagaatcagaaactctagaactctagttagggcccttcagcagggctgcagagcctccctggatacccaggcctgggaaagcctgtctggtcttgtcaccccaggtgacaaatacaactggaatctttcaatgagttaatgagatactgagaatgagcctcgtggaattttccatgcctaccctttctaaggaagacatccaacagttcatgtgggctctggcttcgtgttaacatgaggaactaaagacatgtttcaccccgtgagaaacagaaggatcccctgaacagtaactgatttgacaagtatcgacacataaagttatggcatcagcattctcttactcaggcacggtcagaagtaacgctgctttcatcacggctaacctctcacactgagagaagtattcacagcaacagaagctccagcagcggccgtgaaggtatcttccagaggtgtgggtttttgcatttcaatctgctccatgctacggaccaacacagtattgagtcaactgtgaccttaagatcagaggaacgtcaatactgccacaaggccacctttccagaactcgtgggcaggtaaactatgctttggatgtgctttctttcaccaaaatcactcaactcaggagccacaaatagtccagcaatttcatttccctcaatgctattttagtctcaaaggaaaccatgtaaatttcatcaagagaaggtcaaaggggatatatcgccactgaaaatgtttacacagtgaccatgagttacacatttacttagagaaacttaacttaataaagaatctgtagagtgtgttggcttggaaaacacacacacaaagaagatacctcacgcttagtatgttctgctttctgaacagccaccactgggaacccagtggcctctgtgggactgaactcctaaacgcagggtgcgggagctgggcaggagaggtgacctccaactgtgttcctaaagttcgtctttcgcttggctcaggacaaagcggtgtaacgagtcaaggtctctgcctccactgtgctcactgactttcttccctcctcggaaaagcaataacgtggggtagcctcgtaccgaatacttgctgcagcctcgtgc

SEQ ID NO: 20193 - DNA, 1126 bp, Homo Sapiens
gcacgagggccgcgccagctgagccaggtttgcagtaagcattggctactggcatgacccttacatacagcactttgtgagactgtctaaagagaggaaagcccctgaaatcaacagaggatattttgctcgagtccatggtgtcagtcagcttataaaggcatttctacggaagacagaatgtcattgtcaaattgtcaaccttggggcaggcatggataccaccttctggagattaaaggatgaagatcttctcccaagtaaatattttgaggttgactttccaatgattgtcacgagaaagctgcacagtatcaaatgcaagcctcccctatccagccccattctagaactgcattcagaggacacacttcagatggatggacacatactggattcaaagagatatgccgttattggagcagatctccgagacctgtctgaactggaagagaagctaaagaaatgtaacatgaatacacaattgccaacactcctgatagctgaatgtgtgctggtttacatgactccagagcagtccgcaaacctcctgaagtgggcagccaacagttttgagagagccatgttcataaactacgaacaggtgaacatgggtgatctgtttgggcagatcatgattgaaaacctgcggagacgccagtgtgacctggcgggagtggagacctgcaagtcattagagtcacagaaagaacggctcctgtcgaatgggtgggaaacagcatcggccgtcgacatgatggagttgtacaacaggttacctcgagctgaagtgagcaggatagaatcacttgaattcctggatgaaatggagctgctggagcagctcatgcggcattactgcctttgctgggcaaccaaaggaggaaatgagcttgggctgaaggagataacttattaatctgtcgaaggcttatgccgagccagaagccgaagccacttgccctcctggaggagacctgcaagctccctgagcggtgggcgggcctcgtccgcaggtctcatcccacactcttgagaagccttggtcactacagtggtcgcacatgttcctcttcctgttcctgttgacatgtcgttgtttaaataaatctcacttgccaccagt

SEQ ID NO: 20194 - DNA, 1096 bp, Homo Sapiens
gcacgaggggaagtgtacacctaatcactggaaattcaagcataaattacaccgaaaaagaggggccacttctcagcgattcacatgtagctttcaggctcaccatgccttctcctatgcctgagtacctgaatgtgcactacattggggagtctgcctccagactgctgttcttatcaatgcactgggcactttcgattccttctttccaggctctagggcaagaaaacagcatatcactggtgaaagcttactggaatgaactttttactcttggtcttgcccagtgctggcaagtgatgaatgtagcaactatattagcaacatttgtcaattgtcttcacaatagtcttcaacaagataaaatgtcaacagaaagaagaaaattattgatggagcacatcttcaaactacaggagttttgtaacagcatggttaaactctgcattgatggatacgaatatgcctacctgaaggcaatagtactcttcagtccagatcatccaagcctagaaaacatggaacagatagagaaatttcaggaaaaggcttatgtggaattccaagattatataaccaaaacatatccagatgacacctacaggttatccagactactactcagattgccagctttaagactgatgaatgctaccatcactgaagaattgtttttcaaaggtctcattggcaatatacgaattgacagtgttatcccacatattttgaaaatggagcctgcagattataactctcaataattggtcacagcatttgaaaactgtgactgcagtgctgtaaacttaactgttctttgccagaacacaagacaccaaattgaactcactgcttttgaggcatctggaaatttttactttaaaaagtaaccagaatccaaggtatttttattttagcttcccttaagaatttttgaagtgactgggcaggcagcagaattaaatgaatttttcttcctgattcctttaaatgaatatgaaacactacaaatttattcttggtgagatgatacctggagctgttcacctcttgattatctaaactaagcgctcattctattttataaaacaataaatta

SEQ ID NO: 20195 - DNA, 1332 bp, Homo Sapiens
  misc_feature (1147)..(1190): n is a, c, g, or t
gcacgaggcccataggaaggataaatctggctaattgtaccagtcgtcagatagaaccagccaacagagaattttgtgcaagacgcaacacttttgaattaattactgtccgaccacaaagagaagatgaccgagagactcttgtcagccaatgcagggacacactctgtgttaccaagaactggctgtctgcagatactaaagaagagcgggatctctggatgcaaaaactcaatcaagttcttgttgatattcgcctctggcaacctgatgcttgctacaaacctattggaaagccttaaaccgggaaatttccatgctatctagaggtttttgatgtcatcttaagaaacacacttaagagcatcagatttactgattgcattttatgctttaagtacgaaagggtttgtgccaatattcactacgtattatgcagtatttatatcttttgtatgtaaaactttaactgatttctgtcattcatcaatgagtagaagtaaatacattatagttgattttgctaaatcttaatttaaaagcctcattttcctagaaatctaattattcagttattcatgacaatatttttttaaaagtaagaaattctgagttgtcttcttggagctgtaggtcttgaagcagcaacgtctttcaggggttggagacagaaacccattctccaatctcagtagttttttcgaaaggctgtgatcatttattgatcgtgatatgacttgttactagggtactgaaaaaaatgtctaaggcctttacagaaacatttttagtaatgaggatgagaactttttcaaatagcaaatatatattggcttaaagcatgaggctgtcttcagaaaagtgatgtggacataggaggcaatgtgtgagacttgggggttcaatattttatatagaagagttaataagcacatggtttacatttactcagctactatatatgcagtgtggtgcacattttcacagaattctggcttcattaagatcattatttttgctgcgtagcttacagacttagcatattagttttttttactcctacaagtgtaaattgaaaaatctttatattaaaaaagtaaactgttatgaagctgctatgtactaataatactttgcttgccaaagnnnnnnnnnnnnnnnnnnnnnnnnnnnnnnnnnnnnnnnnnnnncatgaacaacagtgtctagaaacccattttgaaacaggaaaattattaagtcacctatcacctttaaacgcctttttttaaaattataaaatattgtaaagcagggtttcaacttttaaatacactttgaacttcttctttg

SEQ ID NO: 20196 - DNA, 732 bp, Homo Sapiens
gcacgagggctaacgctactaccaacccgtcgcagctgctgccgttagagcttgtggacaaatgtataggatcaagaattcacatcgtgatgaagagtgataaggaaattgttggtactcttctaggatttgatgactttgtcaatatggtactggaagatgtcactgagtttgaaatcacaccagaaggaagaaggattactaaattagatcagattttgctaaatggaaataatataacaatgctggttcctggaggagaaggacctgaagtgtgaatgagtttccttgacttacactagattttgttttggcttataatgacaagaaaatggaattttttttcccactttctaatgtttaaatcccataaagctaagtttcccgttaaagggaagtgctttgaagatgtgtacccatttttgtaagttaatcatgattatcctggaaaaagaagaaaagaacttcttctttgcagatgaaaataaaggtgtttttggttaactgtcattttgtttattctactgcagtagccagtggaacaaagtttgtagttattttgccacttacttttctgtcattatatgcttatttgttttgtcatttacgtgaccatttgattctcaaacaaaagttgttccaaacaaaatgatgaactttgatttgaacaggtgcatttaaacaaccggaaatgatcacttagaaaattcaattaaaatgctgttgttttgt

SEQ ID NO: 20197 - DNA, 1574 bp, Homo Sapiens
gaattcggcacgaggctccttctacaaaagcgcaggctctgctcgcgccagctcgctcccgcagccatgcccaccaccatcgagcgggagttcgaagagttggatactcagcgtcgctggcagccgctgtacttggaaattcgaaatgagtcccatgactatcctcatagagtggccaagtttcctgaaaacagaaatcgaaacagatacagagatgtaagcccatatgatcacagtcgtgttaaactgcaaaatgctgagaatgattatattaatgccagtttagttgacatagaagaggcacaaaggagttacatcttaacacagggtccacttcctaacacatgctgccatttctggcttatggtttggcagcagaagaccaaagcagttgtcatgctgaaccgcattgtggagaaagaatcggttaaatgtgcacagtactggccaacagatgaccaagagatgctgtttaaagaaacaggattcagtgtgaagctcttgtcagaagatgtgaagtcgtattatacagtacatctactacaattagaaaatatcaatagtggtgaaaccagaacaatatctcactttcattatactacctggccagattttggagtccctgaatcaccagcttcatttctcaatttcttgtttaaagtgagagaatctggctccttgaaccctgaccatgggcctgcggtgatccactgtagtgcaggcattgggcgctctggcaccttctctctggtagacacttgtcttgttttgatggaaaaaggagatgatattaacataaaacaagtgttactgaacatgagaaaataccgaatgggtcttattcagaccccagatcaactgagattctcatacatggctataatagaaggagcaaaatgtataaagggagattctagtatacagaaacgatggaaagaactttctaaggaagacttatctcctgcctttgatcattcaccaaacaaaataatgactgaaaaatacaatgggaacagaataggtctagaagaagaaaaactgacaggtgaccgatgtacaggactttcctctaaaatgcaagatacaatggaggagaacagtgagagtgctctacggaaacgtattcgagaggacagaaaggccaccacagctcagaaggtgcagcagatgaaacagaggctaaatgagaatgaacgaaaaagaaaaaggccaagattgacagacacctaatattcatgacttgagaatattctgcagctataaattttgaaccattgatgtgcaaagcaagacctgaagcccactccggaaactaaagtgaggctcgctaaccctctagattgcctcacagttgtttgtttacaaagtaaactttacatccaggggatgaagagcacccaccagcagaagactttgcagaacctttaattggatgtgttaagtgtttttaatgagtgtatgaaatgtagaaagatgtacaagaaataaattaggagagattactttgtattgtactgccattcctactgtatttttatactttttggcagcattaaatatttttgttaaatagt

SEQ ID NO: 20198 - DNA, 1178 bp, Homo Sapiens
atcccccgggctgcaggctgatatcggaggcagcatccgcttcccctcctccttctgcggcatctgcggcctcaagcccacagggaaccgcctcagcaagagtggcctgaagggctgtgtctatggacaggaggcagtgcgtctctccgtgggccccatggcccgggacgtggagagcctggcactgtgcctgcgagccctgctgtgcgaggacatgttccgcttggaccccactgtgcctcccttgcccttcagagaagaggtctacaccagctctcagcccctgcgtgtggggtactatgagactgacaactataccatgccctccccggccatgaggcgggccgtgctggagaccaaacagagccttgaggctgcggggcacacgctggttcccttcttgccaagcaacataccccatgctctggagaccctgtcaacaggtgggctcttcagtgatggtggccacaccttcctacagaacttcaaaggtgatttcgtggacccctgcctgggggacctggtctcaattctgaagcttccccaatggcttaaaggactgctggccttcctggtgaagcctctgctgccaaggctgtcagctttcctcagcaacatgaagtctcgttcggctggaaaactctgggaactgcagcacgagatcgaggtgtaccgcaaaaccgtgattgcccagtggagggcgctggacctggatgtggtgctgacccccatgctggcccctgctctggacttgaatgccccaggcagggccacaggggccgtcagctacactatgctgtacaactgcctggacttccctgcaggggtggtgcctgtcaccacggtgactgctgaggacgaggcccagatggaacattacaggggctactttggggatatctgggacagatgctgcataagggcatgaagaagagtgtggggctgccggtggccgtgcagtgtgtggctctgccctggcaagaagagttgtgtctgcggttcatgcgggaggtggagcgactgatgacccctgaaaagcagtcatcctgatggctctggctccagaggacctgagactctcacttctctgcagcccagcctagtcagagcacagctgccctgctgcccaaccaggaaatgtcctgcatggggcagatgcttccgtgtcctctccccca

SEQ ID NO: 20199 - DNA, 875 bp, Homo Sapiens
gcacgaggttggcagagagcttacaagaggcctgtgttcagatctggaatcgatgtgtgaaaccaagttattatctctaaagaaggaagtttatgaaatagaattatgccagagggagataatgggacttacaaagcatggccttgagtactccagttttggagatgttttggaatatagaagccaccttgcaaaacaactgggatatccaaatgggcattttagtcaagaaatattcactcctgaatacatgcccacatttattcaacagacattccttactctccatcaaataattaataatgaagacagaccctatgaatgtaagaaatgtggaaaggcctttagtcagaactcacaatttattcaacatcagagaattcatattggtgaaaaatcttatgaatgtaaagagtgtgggaaattctttagttgtggttcacatgttactcggcatctgaaaattcatactggcgaaaaaccctttgaatgtaaggaatgtggaaaggccttcagttgtagctcatacctttctcaacatcagagaatccataccggtaagaaaccctatgaatgtaaggaatgtgggaaggcctttagttattgctcaaatcttattgaccatcagcgaattcacactggtgaaaaaccttatgaatgtaaagtatgtgggaaagcctttactaagagctcacaactttttcagcatgcacgaattcatacaggtgagaaaccctatgaatgtaaggaatgtggcaaagcctttacccagagctcaaagcttgttcaacatcagagaattcatactggtgagaaaccctatgagtgcaaggaatgtggcaaagcctttagtagtggctcagcacttactaatc

SEQ ID NO: 20200 - DNA, 1596 bp, Homo Sapiens
  misc_feature (1457)..(1466): n is a, c, g, or t
gcacgagggcatgagccaccatgcccagctgctcctttattttaatccctaaatataatccctaaatatagttatatttcatacttagtttgtttttaaaaagttttctctgtagaaaattttaatcattcataccctttacctttaggtttttctttctatacattcagtcaggcactgggatcatctgtttacaggcattatatttatttggcactcctggaacaagtatatctaacccattcttgatttttggactattcaggtgaactatttgaggggtatggggtctagaagttaaaagatacgcatgtcttctgttcttttcccgtatcaattcattccttcatctctttgccaagttgttttcctttcagggcctgtccttccagtttagaacagtaccatgaatcccacttgtgtcaatattaaagatagctgagaagcacctttcaaatggcacagtccctcttcaagatgtctaaaagaatggttatgtctgtccagttagggatttcacatccacatgtaatcatgtctgctgctgttgctacccaaattttcatttctccacattttgggtacttaagctaaaacgtaatggccacagtctgtaatccattcacattcctcagtttcaccacctccctcttccagactgcactctctgtcatcagtcccctcctttctaacagaaatggggttatgattttgaaggctgtgggttcagggagtctttgccaatcctgttggccctaaactatcaaggaggctccatttcaccatttgattttttgcatttcaggaggcaactgattgtttcgatatgtacatattactcacgtataccccatttccttccagtcagcccaacattttccaccagtctgtccccatctctgaaatccttccttctctttccccctaagtcttttgagtgtcatcatgtactggtggtttctcggttccatctcatccatttccttttcaatggagactacagcgtcagccagctcagccttggcttttaactcaatattccagtccataggggtggttaaaagttgctgcaaggctgcaggcactggcagtgggaagaggcagacgactagatgacttttgcacttttagctggttgaaaagtaccactcccactttgaacatttggccgtccctgcaaagagtgtactgtgcttgaagcagagcactcacacataaatggctgtgtgtggaattgcttgccaaagaagtttttagcctttccctttcccctaactgcatcagggaagaatttttatctctagcttggtttccacatgaggtttttttgagaagggcttgggacaagaagtttgtcatgttagttaagcaggcaagaaatcctaataatccagttttgtttgaaagttgtttgtccgtatgattttttaaaagtcaagtttaatttcaaaaaaccnnnnnnnnnngagattacttttggggtaatatttaaaatgagagacattttgtaaccctgtaaaatacatagggaatataacattccagtgtatacaaagaaggcaaattctttaatcaaataaagcgcattataaaatg

SEQ ID NO: 20201 - DNA, 1159 bp, Homo Sapiens
gcacgaggcacgagtgtgggctggctcaaactgagaagtgccaatccccaagaccaccctgtgatccagcccaactacttgtcaacagaaactgatattgaggatttccgtctgtgtgtgaagctcaccagagaaatttttgcacaggaagccctggctccgttccgagggaaagagctccagccaggaagccacattcagtcagataaagagatagatgcctttgtgcgggcaaaagccgacagcgcctaccacccctcgtgcacctgtaagatgggccagccctccgatcccactgccgtggtggatccgcagacaagggtcctcggggtggaaaacctcagggtcgtcgatgcctccatcatgcctagcatggtcagcggcaacctgaacgcccccacaatcatgatcgcagagaaggcagctgacattatcaaggggcagcctgcactctgggacaaagatgtccctgtctacaagcccaggacgctggccacccagcgctaagacagttgctgctggaggatgaccagggaagccccctgataagccaagagggccagcacagcccttgctcccaggctcctgcctgaaactatctagcacactaggacccaggtggtaccctactcagtggctgagaattggataaagtcttgggaaatgagacaagtactgggcagtgaatccagctccttttccccagcctttccctgtgggccatttggggaaggccagcattcagcctgagatgttcctccctgcctcctggagggacagaaggggaggatggttaactcctgccgcatcctttttcttgtgttcacgtggcattctctaacccagggcagtggttccttcccaggccatgcacagaggctgggtgcctgccagacccacggagggttcgcgaaggaaggggcatcctccttcttgagctgcaagctttagctgaggcagtaagtcacacagtagttagttcagcctgggctggcacataagtccccagtgtccctgttgagaggggaaagttgcctgctggttgaaaaactggcttttcctttctcgctgcctaatttcactctcagagtgaggcaggtaactggggctccactgggtcactctgagagggttgtggctctggttcttattaaccagg

SEQ ID NO: 20202 - DNA, 1316 bp, Homo Sapiens
gcacgaggggcctatattaaatgctgaaagtgaaaagtgatgacattattagcagacactgcttaaaggagaccatttgtagcagttggcttaacctcaacttctaaaactacattgaaaatgtaaatacatagcttagttttttgtaatatatggtgacttcagatttttttgtacagtattttgaatgtgagatgattgtcaggactaactgtctttttaacaaaacattttcagtattttaaataaaattttgtaaagtaatgtgaattaaaaattttggaacaattagaattcattcactattgtatagaagatgctgttaaaacataggaagggtatttttcttgatccaaagtttgtgaatttggctttgctacctcaattgcaggtgtttgtttgcctttataaactgttgcaaatagaaaaaaaatagaataagtatatatttttggagtaacatcaatatttaaacatttttacacagatcggtgtttgaaaatttgccatttcaggctaatatttttatatatttttgactttttaaaagttcatcagtgtttttgctactgttaagcttatgcagtttatactgtattttttatgtatcctttatatttaccaaacctgactccctgtaaaggagtgctgtcttaaaaacaactgaaggggttaaagtcgtttcttttagtttaatagatgtgcataaggtagctttagcaattaaattctagtgaagttgatatagtctcatttttaattgtcctgtaatggaacagtagcaaattcactaaacttttgtgttcagagttaaattgttctcagtactttcaatgtaggggaatgtaataaacatagtgtgtatgtttgggttttaactacacattttatatatgagccatttagatatgcagtgttaattctatactgcatttgaagtgtatgtaacttagcttatgttaatgcagtcatgaagttggtttgctccagcatccggtagtctttaaacattcttttagtgaaattgtcattgttttatcagtgctaatgtgtgcaagcagtttttttattttgcttttctcctggcatcagaaagtggtggcgttttctgtactggattgcaccaaggaagcttttggggaggaaggaaggacattaaattctttccctggtaatgaaaagagccctttatcaatacagtgctgcaatttctggatatcagctacactttgtttttaagtttgtttttgacatgtttatttggcaaattttataatgaagttttaagttgaaaataaaatgtagcaacattttaa

SEQ ID NO: 20203 - DNA, 760 bp, Homo Sapiens
gcacgagggaacaagaagagcgcgtggcaggccaccacccagcaggcgggcctggactgccgtgtgtgccccacctgccagcaggtgctcgcgcatggcgatgccagcagccaccaggcgctgcatgctgcccgggacgacgacttcccctccctgcaagccatcgccaggatcatcacgtagctcccgccagcgtggccagagctgtcgcaccgtgagcgtccttcctccttcctctccgggctgccaggcagccaggtaaggcctggtgaggccacttggcctcttggttggccaggcccaccaggaagtcaccaggacagtccacccgccctgttggcacactcaagcgggagtccacccctgcctcagtggtgggccagtctcggtttgcattcttgtgcttttgggaggtgccaggggagggaagggctgggatgctgggacctgttgttgctggcaaagccagaggtcacagtggcctgatctgggccctcccaaagctgagggctgcagcccgtgggtcctcagagctgaaagctgcggcgccactggtgccagagtcagatgtcacagatgtgttgtgtaaacagttggctgtttcgtgcttcaagaatgttcaggattaaaagcagacaagaaattgtgctacttgaagttgaatctttttatgagacaagctgaatctgggatctcaaattgcctctgaccttttataagacagtttatcttcaaataaatttattttgcaataccacgc

SEQ ID NO: 20204 - DNA, 880 bp, Homo Sapiens
gcgcgaggggcggcccgggcctaagtacgcctggcggccaccccaagccgccgcatcgaggcggcggggagccccgcgggggccgccagcaccacccgccctaccaccagcagcatcaccaggggcccccgcccggcgggcccggcggccgcagcgaggagaagatctcggactcggaggggtttaaagccaatttgtctctcttgaggaggcctggagagaaaacttacacacagcgatgtcggttgtttgttgggaatctacctgctgatatcacggaggatgaattcaaaagactatttgctaaatatggagaaccaggagaagtttttatcaacaaaggcaaaggattcggatttattaagcttgaatctagagctttggctgaaattgccaaagccgaactggatgatacacccatgagaggtagacagcttcgagttcgctttgccacacatgctgctgccctttctgttcgtaatctttcaccttatgtttccaatgaactgttggaagaagcctttagccaatttggtcctattgaaagggctgttgtaatagtggatgatcgtggaagatctacagggaaaggcattgttgaatttgcttctaagccagcagcaagaaaggcatttgaacgatgcagtgaaggtgttttcttactgacgacaactcctcgtccagtcattgtggaaccacttgaacaactagatgatgaagatggtcttcctgaaaaactttgcccagaagaatccaatgtatcaaaaggagagagaaacccctcctcgtttgcctagcatggcacgtttgagtacgaatattctcagcgatggaggtctttggatgaatggaaaacagcaaagggaacaagtgaaaaaac

SEQ ID NO: 20205 - DNA, 1140 bp, Homo Sapiens
gcacgagggcagaaaaaaacagctgttttattcaactattcacaatagagaatatttataatctagtcactgaaacacgcatttcttaggccactcctagaatatgggaatagctgttacataaaatactgttttataattatattaataagaaaaagcattttacctgttccaagaggggaaaaaagctcctcattgagtatcctttgtctctagatcagaatggtaaagtcttgggcctggttcttctaccctggagcaattcttccccagtcaccctccagggaatgtcagaaaacgtgaagaactttagagactagaatcatattcaaactttccttgaaagtagctataataaacactaacaccttttttaaaaggccaaattaggtaacttctttaggtggatcatccagcaaaagccaatgaacctgaatacaagctatttttttcttttctcaaatatcttcataaaaatatattaactcaaatttagaatgcttctcatttccatccacagtattgaaataaaaatatttaaagagtatttagttataaaaagtagctaaatggtaaaatgtcttctcatggtcttgatttttctgtgctctatgccctaattttaatatagcaactgcacttcagtaagatccagtccaaagatttttttaaaaaactataatgtacgtgaagcttttaaaaggcagcatcatcaagaaagtaatttccaaatactggggagaaaaaaaggcttttgatctccttgatggaatgacatattcagaataggggcagaaccctgtgccatgcaaagggtcattcttcctcttcttcctagacattcttaggaagctttccttgtataaaaagaaaagatcctaagttaacaactcatctttatgtacatctgcacacacaaatatacaagaaagtccactgacttcattcctctactagtgtagtgatgttttcaaatatttcgtgaaatccagaggcgattcagtagcaacttcactggagtatcttttgattagctgatttaaatcttcattcaaaaatgaatccccttgtaaaaatttaccctttattttggggtttgaagattcaacaggaggattgaatgtcatttctgcctcgtgc

SEQ ID NO: 20206 - DNA, 646 bp, Homo Sapiens
aaattaaccagatctgtcttttaatagttaccaaaatttaaatgttaattccccaaaggaaaaatgtccatggcacagtttttctggaaaagttcacatgtagacagtgaagcttctgaagttaggcgtcaaattagtagtgacaatcttttttttaatcttgaaagtccctagttttaaagaaagtagaatccatctggggcatgtctgcatcacagggtatcactcaagagtcatcatcaggccaaaaagactctgaagggaaccaggagggtttggcccttgctgtggaaagatgctactgaaagtataagagaacaccctaatgcacgcgtcaggcacgaaaccgtaccatgccccgctaagacatgggaccagagaacacgtcaacgtcaggccgctccaggaaaaccatccacaaagacaacagaagctaacccgaggtcgacactgccatgaagagtgttggctgaaaccgcagttaccagtgtctttactggacgcgaacatccctaaggacacggctgtgctgcttcctaagcatacgtgaccacgatactgtctttccccgggtctccttagcgccatcactgcaccaggcccagcatgcctcaagtcctccagagccttctcctgagcctcgtgc

SEQ ID NO: 20207 - DNA, 849 bp, Homo Sapiens
gaattcggcacgaggtttccctggtgctcctggacagaatggtgaacctggtggtaaaggagaaagaggggctccgggtgagaaaggtgaaggaggccctcctggagttgcaggaccccctggaggttctggacctgctggtcctcctggtccccaaggtgtcaaaggtgaacgtggcagtcctggtggacctggtgctgctggcttccctggtgctcgtggtcttcctggtcctcctggtagtaatggtaacccaggacccccaggtcccagcggttctccaggcaaggatgggcccccaggactgcgggtaacactggtgctcctggcagccctggagtgtctggaccaaaaggtgatgctggccaaccaggagagaagggatcgcctggtgcccagggcccaccaggagctccaggcccacttgggattgctgggatcactggagcacggggtcttgcaggaccaccaggcatgccaggtcctaggggaagccctggccctcagggtgtcaagggtgaaagtgggaaaccaggagctaacggtctcagtggagaacgtggtccccctggaccccagggtcttcctggtctggctggtacagctggtgaacctggaagagatggaaaccctggatcagatggtcttccaggccgagatggatctcctggtggcaagggtgatcgtggtgaaaatggctctcctggtgcccctggcgctcctgtcatccaggccctcctggtcctgtcggtccagctggaaagagtggtgacagaggagaaagtggccctgctggccctgctggtgctcccgggtcctgctggttctcgagggtgctcctggtcttca

SEQ ID NO: 20208 - DNA, 1254 bp, Homo Sapiens
  misc_feature (128)..(137): n is a, c, g, or t
  misc_feature (1139)..(1155): n is a, c, g, or t
gcacgagggtgcagaagatcaaagctacttggaaggagtgcctataatttgccagtagccacagattaagattatatcttatatatcagcagattagctttagcttagggggagggtgggaaagtttnnnnnnnnnnttgtgaagatttagggggaccttgatagagaactttataaacttctttctctttaataaagacttgtcttacaccgtgctgccattaaaggcagctgttctagagtttcagtcacctaagtacacccacaaaacaatatgaatatggagatcttcctttacccctcaactttaatttgcccagttatacctcagtgttgtagcagtactgtgatacctggcacagtgctttgatcttacgatgccctctgtactgacctgaaggagacctaagagtcctttccctttttgagtttgaatcatagccttgatgtggtctcttgttttatgtccttgttcctaatgtaaaagtgcttaactgcttcttggttgtattgggtagcattgggataagattttaactgggtattcttgaattgcttttacaataaaccaattttataatctttaaatttatcaactttttacatttgtgttattttcagtcagggcttcttagatctacttatggttgatggagcacattgatttggagtttcagatcttccaaagcactatttgttgtaataacttttctaaatgtagtgcctttaaaggaaaaatgaacacagggaagtgactttgctacaaataatgttgctgtgttaagtattcatattaaatacatgccttctatatggaacatggcagaaagactgaaaaataacagtaattaattgtgtaattcagaattcataccaatcagtgttgaaactcaaacattgcaaaagtgggtggcaatattcagtgcttaacacttttctagcgttggtacatctgagaaatgagtgctcaggtggattttatcctcgcaagcatgttgttataagaattgtgggtgtgcctatcataacaattgttttctgtatcttgaaaaagtattctccacattttaaatgttttatattagagaattctttaatgcacacttgtcaaatatatatatatagtaccaatgttaccnnnnnnnnnnnnnnnnnagatgtaagagcatgctcatatgttaggtacttacataaattgttacattatttttttcttatgtaatacctttttgtttgtttatgtgggttcaaata

SEQ ID NO: 20209 - DNA, 1114 bp, Homo Sapiens
gcacgaggtaaacttaaagagactggatatgtagtggaaaggcctagcactacaaaagataagcacaaagaagaagacaaaaattctgaaagaataacagtaaagaaagaaactcagtcacctgagcaggtaaagtctgaaaagctcaaagacctctttgattacagtccccctctacacaagaatctggatgcacgagaaaagtctaccttcagagaggaaagcccacttaggatcaaaatgatagcgagtgattctcaccgtcctgaagtcaaactcaaaatggcacctgttcctcttgatgattctaacagacctgcttccttgactaaagacaggctgcttgctagtacacttgtccattctgtcaagaaggagcaagaattccgatccatctttgaccacattaagttgccacaggccagcaaaagcacttcagagtcatttattcaacacattgtgtccttggttcatcatgttaaagagcaatacttcaagtcagctgcaatgaccctaaacgagcggttcacttcgtatcagaaagccactgaagaacatagtactcggcaaaagagccctgaaatacacaggagaattgacatctcaccaagtaccctgaggaagcatacccgtttagcaggggaagagagagtttttaaagaagaaaatcaaaagggagataaaaaattaaggtgtgactctgctgaccttcggcatgacattgatcgccgtagaaaagaaagaagtaaagaacggggagattccaagggctccagggaatccagtggatcaagaaagcaggaaaaaactccaaaagattacaaggaatacaaatcttacaaagatgacagtaaacataaaagagagcaagatcattctcgatcttcatcctcttcagcatcaccttcttctcccagttctcgagaagaaaaggagagtaagaagggaaagagaagaagatttaaaactcaccatgaaatgaaagaatactcaggctttgcaggagttagccgaccacgaggaacctttcatgacgacagagatgatggtgtggattattgggccaaaagaggaagaggtcgtggtacttttcaacgtggcaaagggcgcttta

SEQ ID NO: 20210 - DNA, 863 bp, Homo Sapiens
gcacgaggatggacttcaccgcgcagcccaagcctgccactgccctctgtggcgtcgtgagtgccgacgggaagatcgcttaccctccgggggtaaaagagatcaccgacaagatcaccacggacgagatgatcaaacgcctgaagatggtagtgaaaacctttatggatatggatcaggactcagaagatgaaaaacagcagtatctcccactagccttgcatcttgcatctgaattcttcctcaggaaccccaataaagatgtgcgtctccttgtagcatgttgtttggctgatatctttcgtatctatgccccagaagctccatatacttcccatgataaacttaaggacatatttttgtttattaccagacaattaaaaggtttggaggatacaaagagtccacagtttaatagatacttttatttattagagaatttagcttgggttaaatcatataacatctgctttgaattggaagattgcaatgaaatttttattcagctttttagaactctcttctcagtgatcaacaatagccacaataagaaggtacaaatgcacatgctagatttgatgagttctatcatcatggaaggtgatggagttactcaagaattattggactccattcttattaacctcattcctgcacataagaacttaaataaacagtcctttgaccttgcaaaagtgctattgaaaagaacagtccagactattgaggcatgcattgccaatttttcatcaagtcctggtgctgggaagatcatcagtaagtgatttgtcaaacatgtatttgatctgattcagaactttttgctatagatcctcatttattattatccgtcatgcacagct

SEQ ID NO: 20211 - DNA, 806 bp, Homo Sapiens
gcacgagggacccgtgcgcggcctacacgcttgggggacagccctttaagacgacatctccgcgaacgccggcctcttgagccagggggacgctcttttgaaagtcagtcccaaaacagttaaggttttattttattttgttttatttccaagtcacagcccccgaatctcgtacaactctccctggaccacttccggttgccggcccgcgcctcataacttcggttcgagtgacctcggcccgggatgcccctcggctcaccccgggctcacgtcgcgatcctggcttgagtggcccagggtgggagacctggaagttttagcctagctgttctcaaggcggattaattagcccaagaaacattatattcatttttctggatatgccgcagaaggatccgtgccagaagcaagcctgtgagatacagaaatgtttacaagccaacagctacatggaatcaaagtgtcaggctgtcatccaagaactgcgtaagtgttgtgctcagtatcccaagggaagatctgtcgtctgttcaggatttgaaaaagaagaggaagaaaacctaacacggaagtctgcatcaaagtaaagttcttctgaagtgctgctccatgtttccaccaaatgaattttttttatcctcctgactcttcaggccaggtagcagcaaatagcaaatgaaaaagtcagctacaaaagttaatgaatatgccatctatgcagaacaggcagaaatataaacacattaaaagacaaatatgtagaatgtaatatactgagctgctaaaataaacctgtttaagag

SEQ ID NO: 20212 - DNA, 1549 bp, Homo Sapiens
  misc_feature (336)..(362): n is a, c, g, or t
  misc_feature (602)..(665): n is a, c, g, or t
gcacgaggctggcatatgccatggatttttggtccaaaggacaactgaaagctctgtttttggaacatgagggttattttggagccgttggggcactgttggaactgttcaaaatgactgatgacaagtagagacgagcagtggaggaaacagcctcccaaaaggacagagaactaaaaaattgctgctggagaaggtgaaagtcgctttgggacggaagccaagccattatggcagatgaacctgctggatttgtaaataatttaaaatccttccagatgatcttttactcttaggttttgagctaatgattcaaaacgggggaatataaaaggnnnnnnnnnnnnnnnnnnnnnnnnnnnaaaaaaatggtgcagcgtggccaaacctaccaattgtatgcattaactttgaaaagttgtttgatgtttaagaaggacctgatatgtaagcgctggtcatttttcttctggggtttactgatcagtgtggtgattttaacttcatttagtaattactctaggagattttaccttgacttatatttttcatgacgtttcatgatttgctgttggtttcaaatgaaactacaaatctggcannnnnnnnnnnnnnnnnnnnnnnnnnnnnnnnnnnnnnnnnnnnnnnnnnnnnnnnnnnnnnnnagttgtcttctgaaaaaagagtcgttccctctgtttctgtcctcagatgatgtccctccccctacctgtaacctttctttgacataattgttcatatcaatgaaggtgctgaccagctcaatacaaagttaagcacaagatctaaagctcttgaaaatgcccgtgaagagaagactgaatgtgttaatgaatttaatgagtctggcaaaagttgcaaattatatgcaagtttgtcctatcgcttataaatgtagtgtttcattggatttattttatgctaggttatattaagttgaaatagtctgtgattaaatgtcctcatccatgcacagaatatgaatggcagcaaatctttgtgcaagaaatttgaaacttattgggaaaagcctcccagtagattaattgttcatatcaggagatttagggtaagtcatgggttgaggtgtcagatagtaatatctatttgttttgtacatgtatatatctaggaactttgtaacaacacatctttaataatgttaaaggttttttcatttttaatattttaaactaaaaactgtacttcaatctcagtttctaaaattaaaaataatttatactgatctatatattttttctttttgaaagatttcattaagactgatgggtaactttcaaatgagggtcatgtacaaatattgggatgcatgagatcccatgatcttgtgtattgagcttattgttgaaagggatttttgaaggacagaacaattactccatgatgaattttcctttctttgccttttgagcaccgtctttaatttccatatcttcaagtcttgaagaagttgatgttaattgaagaattcacttgtttggttgaaataaagcctgtttttgttgtg

SEQ ID NO: 20213 - DNA, 1338 bp, Homo Sapiens
  misc_feature (339)..(367): n is a, c, g, or t
gcacgaggtattagggcaagcatttccatatccatacagatttcatgaaaacaaatggatgtctcaagtatctttgttaaacaggatccgaaatgaagtaaatagtagttaaaattaattataaataaagacatttcagcacataaaccaacaagtcttttctagatttttaataccaggacctaacagcatcattttccaagtaagtgacaaataactaatgtgaaaaccatatttaatatagatgatgtcacaaatgacaatgtggttttccatagtaaagaaatacgttaattttcttaaatcctatttggtattacaaaataaattttactggtnnnnnnnnnnnnnnnnnnnnnnnnnnnnncagacatgatggaaaggttgataaaatatattaataacttaaaaatgctgtcacaagcatggaaatgctaccattatcatttgaatacaacaaaatgctataaagcaaagagttgtcagaatacagtagaagagctattctgaaacaaatgaagagtcaagatcttaaaacagtgacaagtatttttaatgtatgacagacactgaaataccatgcagaaagtaaacagaactattttttgaagtggtacttacaaagcacagatgtagccttcataatgcaagaaacatagcaaattaacttaccacctccttcaaataaaagtgagaacctcttgggagaatttaagcaccattagcagacagatcctatagcagttaatgaaatgttttgtatttcagtagaaaactatttcagtggtgaaaacgatgtaggaatcagaagcatattctgctgagatactaggtagttgacactttcccgaacagctgccacaactctgggatcctcatgggacttatgtctcccagctgcacgactatctgcactctcattccaccaaagaacatgaactctgttgagtgctccgtactctgtgtggaacactccaactagttttgtgtagcctagattgacatgagcatgaactgcccttttaaatgcatcaccccacagagctggcccaccaggtttcatctgaaaagtggccagttcatagactccttcttttggaggtttttctaatttgcaccatggtaccagataagtaatctcactctcttgtttatcaatgagagccaaatttggaatgaggaattgttcttgccattccttatctttggccaaggctttctgaacttcagttcgatgagcaaaattatcatacttccaaatatgaaacactgtattcattctgcctccaaattctacactccagtatcccctcgtgccgaattcctgcagcccggggg

SEQ ID NO: 20214 - DNA, 922 bp, Homo Sapiens
  misc_feature (322)..(350): n is a, c, g, or t
gcacgaggcgccagcagctccgccttcgggagcggcaaaaattcttcgaggacattttacagccagagacagagtttgtctttcctctgtcccatctgcatctcgagtcgcagagaccccccataggtagtatctcatccatggaagtgaatgtggacacactggagcaagtagaacttattgaccttggggacccggatgcagcagatgtgttcttgccttgcgaagatcctccaccaaccccccagtcgtctggggtggacaaccatttggaggagctgagcctgccggtgcctacatcagacaggaccacatctaggannnnnnnnnnnnnnnnnnnnnnnnnnnnnaccaacctgcatagcccaaatccaagtgatgatggagcagatacgcccttggcacagtcggatgaagaggaggaaaggggtgatggaggggcagagcctggagcctgcagctagcagtgggcccctgcctacagactgaccacgctggctattctccacatgagaccacaggcccagccagagcctgtcgggagaagaccagactctttacttgcagtaggcaccagaggtgggaaggatggtgggattgtgtacctttctaagaattaaccctctcctgctttactgctaattttttcctgctgcaaccctcccaccagtttttggcttactcctgagatatgatttgcaaatgaggagagagaagatgaggttggacaagatgccactgcttttcttagcactcttccctcccctaaaccatcccgtagtcttctaatacagtctctcagacaagtgtctctagatggatgtgaactccttaactcatcaagtaaggtggtactcaagccatgctgcctccttacatcctttttggaacagagcacggtataaataataaaccctcgtgc

SEQ ID NO: 20215 - DNA, 1537 bp, Homo Sapiens
  misc_feature (811)..(822): n is a, c, g, or t
gcacgaggctttagtcggaaatttggtgaagctattggtatgggttttcctgtgaaagttccctacaggaaaatcacaattaaccctggctgtgtggtggttgatggcatgcccccgggggtgtccttcaaagcccccagctacctggaaatcagctccatgagaaggatcttagactctgccgagtttatcaaattcacggtcattagaccatttccaggacttgtgattaataaccagctggttgatcagagtgagtcagaaggccccgtgatacaagaatcagctgaaccaagccagttggaagttccagccacagaagaaataaaagagactgatggaagctctcagatcaagcaagaaccagaccccacgtggtagacctcttccctcctaggcttaaagtatcagtggttgagaagagcttttcggacctgttactaccccaagctgtgtaatatacttgtataacagaaataccttctatacaaacctttttttctacttttagatagaaatgtctactttttcagcagttctgtgaattaaagagcagagtgactgtgggtctggaatggctggtgtacttgggaatgtactatcaggattttacagcaatgctgggaaatgacagggaaaatgacaggaatgaatctcaccagattttttatgtacgcagcagagccttgagttacggtgtttattttccaatcaagtgaagatatctcctacttctcctactggaacatctcagcttctgcagtgaagaaaaattcctgtgatagttcagttctttagtttttctatttgnnnnnnnnnnnntcatttaaatgatcctttgttcacggctctccttaatgactgagtgaacagttcctatctgtatatttgactaaaccttttcctaagctatctctcatggttcctatgtttttttatcataattaaaagcaaaaccatctggatcacctaacagtcagaggtcagtatctcagcgtgtgaattatagaggaaatacagagagaacctcttccacttttacttttcgtccaaataaaatgcatggtgtaccagaagttgaagatcgggttgaggattggggctagctcgatgacactaaggccccaacatcgcgggacctgctgtggcgcggattcttaggaacgctgttctagccggccccctctccaggggtcgccgtggccggcattatttcctagttcttcttgtaaccctgaggtgccagcgcggggagtgaggaggggtcagggggctaaggatgcaacctctgacgttctgcgccttcctaggagagtcttacatgtgttgagatttcacaagcaatgcgagttgtaaaataccagctctacaagaagctaggctctgtgacggcatagttttcagtagctttatcacaatattcacaatggagaattatatgacatggtagcagaaataggcccttttatgtgttgcttctattttacctcaaattgtagatatagggtaatcaataaaatccatccatgcctcgtgc

SEQ ID NO: 20216 - DNA, 698 bp, Homo Sapiens
gcacgaggcgcaggtggccctcaccgagtatgtgcgggcgcagtacccgtcccagccccagcgcttcgggcgcctgctgctgcggctccccgccctgcgcgcggtccctgcctccctcatctcccagctgttcttcatgcgcctggtggggaagacgcccattgagacactgatcagagacatgctgctgtcggggagtaccttcaactggccctacggctcgggccagtgaccatgacggggccacgtgtgctgtggccaggcctgcagacagacctcaagggacagggaatgctgaggcctcgaggggcctcccggggcccaggactctggcttctctcctcagacttctattttttaaagactgtgaaatgtttgtcttttctgttttttaaatgatcatgaaaccaaaaagagactgatcatccaggcctcagcctcatcctccccaggacccctgtccaggatggagggtccaatcctaggacagccttgttcctcagcacccctagcatgaacttgtgggatggtggggttggcttccctggcatgatggacaaaggcctggcgtcggccagaggggctgctccagtgggcaggggtagctagcgtgtgccaggcagatcctctggacacgtaacctatgtcagacactacatgatgactcaaggccaataataaagacatttcctacctgc

SEQ ID NO: 20217 - DNA, 1071 bp, Homo Sapiens
  misc_feature (851)..(917): n is a, c, g, or t
gagattaatctgaacttcaacgttctttgggctcattttaaaattattaaaacaggaattcaaaaggacaagcaaataaaaccaagtattttattaattaaaattgagaccctaaaccaactaagactatacaacttaaaaataagctgtcttcatcctagaaaagtttgatttgccatcttataatgaatatgcaggaacttactaatgggtaagtaaacaaattttcttttacaaacaagttattttgagttatagggatcctcctggggactagattttttttaatgactaaaaatgcctatttagatagtcaacctatccgtaaagttggacactaaatgacatagtgaacatttaaagttgaaactctttgtctaccaaatattttcctaaaactgtttttaagcatatacattaacttaaaaggtcaactcttaattgtctatagccaaagagagctttggtaccaataaattcgaattagggaatcggtttttttagatgtagaattacagagtatttttggaattaaattggaacgtgcctaaatatgaaaatgtgaaagtcccacttttctgttatgtactctattatgaggaatgaacagcctaactatactggattattgatataaataaagcaccactgtaaaatctcttcctaaaagattgctgggtcacacctagcaatttagggcaaaaagtcaataaagaattaaggtactttatttttaaaagcctcatttcccttttgacaggagcatcaagatactaaaataaaaataatgtaataagtactttcaaaatataacaattttcgttctcccatataacaggtggctaacaagnnnnnnnnnnnnnnnnnnnnnnnnnnnnnnnnnnnnnnnnnnnnnnnnnnnnnnnnnnnnnnnnnnngcagcctgggcaagagaagtgggtgggtttaggagaatccctttcgaaaaattcagagcattattattaatccttcttaaattaaatgcagggccaagcatgctgcacgtggaatctggacaattttttgataaactttaaggctgctaaataa

SEQ ID NO: 20218 - DNA, 840 bp, Homo Sapiens
gcacgaggccgcaccccgccatggagcggccgtcgctgcgcgccctgctcctcagcagccggcggtccgggtgtaagcggcgtgtgcgtgtgcaagagccgctacccggtgtgcggcagcgacggcaccacctacccgagcggctgccagctgcgcgccgccagccagagggccgagagccgcggggagaaggccatcacccaggtcagcaagggcacctgcgagcaaggtccttccatagtgacgccccccaaggacatctggaatgtcactggtgcccaggtgtacttgagctgtgaggtcatcggaatcccgacacctgtcctcatctggaacaaggtaaaaaggggtcactatggagttcaaaggacagaactcctgcctggtgaccgggacaacctggccattcagacccggggtggcccagaaaagcatgaagtaactggctgggtgctggtatctcctctaagtaaggaagatgctggagaatatgagtgccatgcatccaattcccaaggacaggcttcagcatcagcaaaaattacagtggttgatgccttacatgaaataccagtgaaaaaaggtgaaggtgccgagctataaacctccagaatattattagtctgcatggttaaaagtagtcatggataactacattacctgttcttgcctaataagtttcttttaatccaatccactaacactttagttatattcactggttttacacagagaaatacaaaataaagatcacacatcaagactatctacaaaaatttattatatatttacagaagaaaagcatgcatatcattaaacaaataaaatactttttatcac

SEQ ID NO: 20219 - DNA, 920 bp, Homo Sapiens
ctggcagtaagaaagattattcccagtatgaggaaaacatcacacacctgcaggagcagatagtggatggtaagatgaccaatgctcagattattcttctcattgacaatgccaggatggcagtggatgacttcaacctcaagtatgaaaatgaacactcctttaagaaagacttggaaattgaagtcgagggcctccgaaggaccttagacaacctgaccattgtcacaacagacctagaacaggaggtggaaggaatgaggaaagagctcattctcatgaagaagcaccatgagcaggaaatggagaagcatcatgtgccaagtgacttcaatgtcaatgtgaaggtggatacaggtcccagggaagatctgattaaggtcctggaggatatgagacaagaatatgagcttataataaagaagaagcatcgagacttggacacttggtataaagaacagtctgcagccatgtcccaggaggcagccagtccagccactgtgcagagcagacaaggtgacatccacgaactgaagcgcacattccaggccctggagattgacctgcagacacagtacagcacgaaatctgctttggaaaacatgttatccgagacccagtctcggtactcctgcaagctccaggacatgcaagagatcatctcccactatgaggaggaactgacgcagctacgccatgaactggagcggcagaacaatgaataccaagtgctgctgggcatcaaaacccacctggagaagaaatcaccacgtaccgacggctcctggagggagagagtgaagggacacgggaagaatcaaagtcgagcatgaagtgtctgcaactccaaagatcaggccataacccaggagaccatcaccggaagatagttctttgtcagtgaatgaaatccaaagcac

SEQ ID NO: 20220 - DNA, 860 bp, Homo Sapiens
  misc_feature (656)..(664): n is a, c, g, or t
gcacgaggcctcgtgccgccacggccgcaggagtcgggcttcggtcgcaccagagacagcggactttcctccgatggttgcagcagagggatcatgacggggaaaaagtcctcccgggagaaacggcgcaaacgtagcagtcaggaggcggccgcagcgctcgcggccccggacatcgtacccgcgttggccagcggcagcagtggaagcactagcggctgcgggagcgccgggggctgcgggagcgtcagctgctgtgggaacgccaattttagtggaagtgtcaccggcggtgggagcggcggcagctgttggggcgggagcagcgtggagcgcagcgagcgccggaagcggaggagtaccgactcttccagcgtctcgggctccttgcagcaggaaactaaatatattttgccaactttggaaaaagaattattcttggcagagcacagtgaccttgaagaaggtggactggacctgactgtgtcattgaaaccagttagtttctatatatcagacaaaaaagaaatgcttcagcagtgcttctgtattataggagagaaaaagttacagaagatgcttcctgatgtgttaaagaactgttcaatagaagaaattaaaaaactatgccaggaacagttagagctcctgtctgnnnnnnnnnttttgaagattcttgagggtgacaatggaatggactctgatatggaagaggaagcagatgatggttctaagatggggatctgatttagtcagtcagcaagacatctgtatagattctgcttcatcccgtgagagagaataagcaaccctgaaggtttggaattaaatcaaggaaaagggaagatagtgatgtactc

SEQ ID NO: 20221 - DNA, 927 bp, Homo Sapiens
gatcccccgggcagagataagagataattctccagaaccaaatgacccagaagagccccaggaggtgtccagcacaccttcagacaagaaaggaaagaaaagaaaaagatgtatctggtcaactccaaaaaggagacataagaaaaaaagcctcccaggagggacagcctcatctagacacggaatccaaaagaagctcaaaagggtggatcaggttcctcaaaagaaagatgactcaacttgtaactccacggtagagacaagggcccaaaaggcgagaactgaatgtgcccgaaagtcgagatcagaggagatcattgatggcacttcagaaatgaatgaaggaaagaggtcccagaagacgcctagtacaccacgaagggtcacacaaggggcagcctcacctgggcatggcatccaagagaagctccaagtggtggataaggtgactcaaaggaaagacgactcaacctggaactcagaggtcatgatgagggtccaaaaggcaagaactaaatgtgcccgaaagtccagattgaaagaaaagaaaaaggagaaagatatctgttcaagctcaaaaaggagatttcagaaaaatattcaccgaagaggaaaacccaaaagtgacactgtggattttcactgttctaagctccccgtgacctgtggtgaggcgaaagggattttatataagaagaaaatgaaacacggatcctcagtgaagtgcattcggaatgaggatggaacttggttaacaccaaatgaatttgaagtcgaaggaaaaggaaggaacgcaaagaactgggaaacggaatatacgttgtgaaaggacgaccctaggagagctgctgaagagtggacctttgctctgtcctccaagaataaatctccagagagagtttaaatagcaagtgaatttctactacc

SEQ ID NO: 20222 - DNA, 1088 bp, Homo Sapiens
gcacgagggcagaacctcaacgaccgcctggcctcctacctggacaaggtgcgcgccctggaggcggccaacggcgagctagaggtgaagatccgcgactggtaccagaagcaggggcctgggccctcccgcgactacagccactactacacgaccatccaggacctgcgggacaagattcttggtgccaccattgagaactccaggattgtcctgcagatcgacaatgcccgtctggctgcagatgacttccgaaccaagtttgagacggaacaggctctgcgcatgagcgtggaggccgacatcaacggcctgcgcagggtgctggatgagctgaccctggccaggaccgacctggagatgcagatcgaaggcctgaaggaagagctggcctacctgaagaagaaccatgaggaggaaatcagtacgctgaggggccaagtgggaggccaggtcagtgtggaggtggattccgctccgggcaccgatctcgccaagatcctgagtgacatgcgaagccaatatgaggtcatggccgagcagaaccggaaggatgctgaagcctggttcaccagccggactgaagaattgaaccgggaggtcgctggccacacggagcagctccagatgagcaggtccgaggttactgacctgcggcgcacccttcagggtcttgagattgagctgcagtcacagctgagcatgaaagctgccttggaagacacactggcagaaacggaggcgcgctttggagcccagctggcgcatatccaggcgctgatcagcggtattgaagcccagctgggcgatgtgcgagctgatagtgagcggcagaatcaggagtaccagcggctcatggacatcaagtcgcggctggagcaggagattgccacctaccgcagcctgctcgagggacaggaagatcactacaacaatttgtctgcctccaaggtcctctgaggcagcaggctctggggcttctgctgtcctttggagggtgtcttctgggtagagggatgggaaggaagggacccttacccccggctcttctcctgacctgccaataaaaatttatggtccaagggaaa

SEQ ID NO: 20223 - DNA, 452 bp, Homo Sapiens
gcacgagggctccatccagatgacagaccaaagttaaacaagcctccggaaactcttatcactactattgattctagttccagttggtggaccaactgggtgatccctgccatctctgcagtggccgtcgccttgatgtatcgcctatacatggcagaggactgaacacctcctcagaagtcagcgcaggaagagcctgctttggacacgggagaaaagaagccattgctaactacttcaactgacagaaaccttcacttgaaaacaatgattttaatatatctctttctttttcttccgacattagaaacaaaacaaaaagaactgtcctttctgcgctcaaatttttcgagtgtgcctttttattcatctactttattttgatgtttccttaatgtgtaatttacttattataagcatgatcttttaaaaatatatttggcttttaaagt

SEQ ID NO: 20224 - DNA, 970 bp, Homo Sapiens
gcacgaggaacactttttaattctccatttttcccatcaagaccaaagttgtacaaacaggtacaaaatcccccaccttcagggtgtgaggcatcactgtgtgtggtcaaagtcccatctcctcccctttccctttccacgagttttcaagatgtggcccagtcagtgcattgctgccttctatgacctatgaaccatgggcagcaagaggactggtgaccgggggacatggtgaggtccagtgtgccaggaacatggtaagtgcccacattgcgggggagggaacaattcagagacaggctcagctggaggccgcacagaggagaaatgtcactctgtcccatcttccctgcattcagctgagctcagaccaagtgagcacctaagaatcatttacccccaaaggatgtttcaagtgagatgcaatgttctctaaccattattctctcagaaattaggggtggcggggcgggaatcaagcagatgtttgaattgcctttcattcctccatagttgtctaattgtctggctcttggtttttatatagcagaaataaaacaaaatggcaataaaccaacctacaacctgtgtacaagatacagcatacaaaactgtcccacggactgggatcaaaagacttctattcctagccctaaattagaggttctgttttggttagggaagtttgttgtaaacagcagctgagaagccatttatttgattttggcaatagagacagacagcaatgcacatacacttatttcattgaactgtaaacggataaggtcaggagaggaaaaaccctactgtttatgtaatagaaccctactaaatggttttggaagggactaaaagttaagtagcagcctactttcctactttccaaggctgggaattatatatatattgagtaataaatcaaatatagtaatccatccacttgtttttcagaagtccacaatttgatacc

SEQ ID NO: 20225 - DNA, 1300 bp, Homo Sapiens
gcacgaggggagaaagggaagacctcagaagtgctgaacgctgccaaggtgcttctcattgagacacagagatgcaacagcagatatgtctatgacaacctgatcacaccagccatgatctgtgccggcttcctgcaggggaacgtcgattcttgccagggtgacagtggagggcctctggtcacttcgaagaacaatatctggtggctgataggggatacaagctggggttctggctgtgccaaagcttacagaccaggagtgtacgggaatgtgatggtattcacggactggatttatcgacaaatgagggcagacggctaatccacatggtcttcgtccttgacgtcgttttacaagaaaacaatggggctggttttgcttccccgtgcatgatttactcttagagatgattcagaggcacttcatttttattaaacagtgaacttgtctggctttggcactctctgccattctgtgcaggctgcagtggctcccctgcccagcctgctctccctaaccccttgtccgcaaggggtgatggccggctggttgtgggcactggcggtcaagtgtggaggagaggggtggaggctgccccattgagatcttcctgctgagtcctttccaggggccaattttggatgagcatggagctgtcacctctcagctgctggatgacttgagatgaaaaaggagagacatggaaagggagacagccaggtggcacctgcagcggctgccctctggggccacttggtagtgtccccagcctacctctccacaaggggattttgctgatgggttcttagagccttagcagccctggatggtggccagaaataaagggaccagcccttcatgggtggtgacgtggtagtcacttgtaaggggaacagaaacatttttgttcttatggggtgagaatatagacagtgcccttggtgcgagggaagcaattgaaaaggaacttgccctgagcactcctggtgcaggtctccacctgcacattgggtggggctcctgggagggagactcagccttcctcctcatcctccctgaccctgctcctagcaccctggagagtgcacatgccccttggtcctggcagggcgccaagtctggcaccatgttggcctcttcaggcctgctagtcactggaatttgaagtccatgggggaaatcaaggatgctcagtttaggtacactgttttcatgttatgtttctacacattgctaccttcagtgctcctgggaactttagcttttgatgtctccaagtagtccacctttcatttaa

SEQ ID NO: 20226 - DNA, 1582 bp, Homo Sapiens
  misc_feature (1378)..(1393): n is a, c, g, or t
atcccccgggctgcaggaattcggcacgaggcagcagtgtcctgatgggtctgatgaagacttctgccagaatctgggcctggaccgcaagatggtaacccacacggcagctagtcctgccctgccaagaaccacagggccgagtgaagatgcagggggtgactccttggtggaaaagtctcagaaagccactgccccaaacaagccacctgcattatcaaacacagagaagaggaatcattccgccttttggggaccagagagtcaaatcattcctgtgatgccagatagtagttcctcagggaagaacagaaaagaggaaagttatatatttgagtcaaagggtgatggaggaggaggggaacacccagccccagaaacaggtgcagtgctacccctggcgctgggtttggctatcactgctctgctgcttctcatggttgcatgccgactacgactggtgaaacagaaactgaaaaaagctcgtcccattacatctgaggaatcggactacctcataaatgggatgtatctatagtaatgtaatttcaataccttggggcagggacatgttttgtttataatttatacatctattaagttctggatatttacagcttcttttgtttttaattgggccagaagattctgcaaatcccaaatctttctttattatttattgtaaaaaaagtttccttagaagtcataaaatattttgaaatttagagaggaattcatgattaaagattcctaaaaatataattctgatttatgtaagctgtccctgaaaatagaaatgtgtacttagctgagagaaaattcagcatctcaggaggtggtattaggatgactgtgttaacccattaccttttagaagccaactgttggccccttaccatgctggactgctataggcccagcttccccttgttctgtggcccttttcttcctccttgaagctcccagtattctttttcttttcccctctaaacctgtttctgagagtggatctcaagcaagttcatgccttcaatcagatgttacttagggtgggtatacctaaattataaaccttatgtacaagtcagtaagccttagggaaggtgagtgtgggtccttcctaatccctctgacgtcatgtcatataggtggctgcctccttagactgacctttgggagaaaaaaaccccagactttgaattagtaacagctctaagatggtcatgcagtgagataggaaatcaagatggaagcagagaatctggcatgccaaaaactaacagaaacttagttgaaggcaaagagagcaaggagaacgtttaatacttcattacatcaaatcaacactgctccatggtgagagcacagcaactcattnnnnnnnnnnnnnnnnggctttgttgatgaaaaacgacaattgaagagaggacgttgagtggattcctgggtacagcttttgtaaaaatgtcaccatggctttcatccaatggaatgagtcgatgttttttaatgctataaaatgttagaatgtgccatcagctaatgccaggcttacgtatttctagaccataaagcagttttt

SEQ ID NO: 20227 - DNA, 898 bp, Homo Sapiens
gcacgaggtgccagacaagaagtggtggagaaatatgaaatctatggagactcagttgactgcctgccttcatgtcagttggaagtgcagttatatcaaaagaaaatacaggacctttcagataatagggaaaaattagccagtatcttaaaggagagcctgaacttggaggaccaaattgagagtgatgagtcagaactgaagaaattgaagactgaagaaaattcgttcaaaagactgatgattgtgaagaaggaaaaacttgccacagcacaattcaaaataaataagaagcatgaagatgttaagcaatacaaacgcacagtaattgaggattgcaataaagttcaagaaaaaagaggtgctgtctatgaacgagtaaccacaattaatcaagaaatccaaaaaaattaaacttggaattcaacaactaaaagatgctgctgaaagggagaaactgaagtcccaggaaatatttctaaacttgaaaactgctttggagaaataccacgacggtattgaaaaggcagcagaggactcctatgctaagatagatgagaagacagctgaactgaagaggaagatgttcaaaatgtcaacctgattaacaaaattacatgtctttttgtaaatggcttgccatcttttaattttctatttagaaagaaaagttgaagcgaatggaagtatcagaagtaccaaataatgttggcttcatcagtttttatacactctcataagtagttaataagatgaatttaatgtaggcttttattaatttataattaaaataacttgtgcagctattcatgtctctactctgccccttgttgtaaatagtttgagtaaaacaaaactagttacctttgaaatatatatatttttttctgttactatt

SEQ ID NO: 20228 - DNA, 1481 bp, Homo Sapiens
  misc_feature (949)..(957): n is a, c, g, or t
gcacgaggagacattctaaaggataaaggatttgtagttgaagtaaacactacttttgaagattttgtggcgataatcagttcaactaaaagatcaactacattagatgctggaaatatcaaattggctttcaatagtttactagaaaaggcagaagcccgtgaacgtgaaagagaaaaagaagaggctcggaagatgaaacgaaaagaatctgcatttaagagtatgttaaaacaagctgctcctccgatagaattggatgctgtctgggaagatatccgtgagagatttgtaaaagagccagcatttgaggacataactctagaatctgaaagaaaacgaatatttaaagattttatgcatgtgcttgagcatgaatgtcagcatcatcattcaaagaacaagaaacattctaagaaatctaaaaaacatcataggaaacgttcccgctctcgatcggggtcagattcagatgatgatgatagccattcaaagaaaaaaagacagcgatcagagtctcgttctgcttcagaacattcttctagtgcagagtctgagagaagttataaaaagtcaaaaaagcataagaagaaaagtaagaagaggagacataaatctgactctccagaatccgatgctgagcgagagaaggataaaaaagaaaaagatcgggaaagtgaaaaagacagaactagacaaagatcagaatcaaaacacaaatcgcctaagaaaaagactggaaaggattctggtaattgggatacttctggcagcgaactgagtgaaggggaattggaaaagcgcagaagaacccttttggagcaactggatgatgatcaataaattataccaaatatatgtttacagtatgatttaaagtctgattcagaccagggactctattttaagttcaactgaaataacactgggttttaattatatcacaggnnnnnnnnngtgcatttaagtattgttatcgtggactttataaaagcaaaggaaattgaaagtaacttttgattctgtatcaagaatcatattttcatacagtcataactgtctttctgtgaccctttcacagggcactgtaggatggattaaaggtggcaatttactgataactgcagatgtctctactttgttctaaaatctaagtcatgaggtgatttgatttactttatagaagctggattttgaagatctaatgaaaaattttttgataatatagtagtacaaaaaaagcaccagcaactgataaaaattgcttttttgtgcgctacccaactggttaaagccaatgtgatcttttatggtgaaactcctaagaaacaggtggttttgctggaaacttggtagacccttaattatagtggtgctaatgagcactactgtatataaagccaccattatttttatcaacatctgaatacattttacaaggctattgtgagggcattattttgagcatctattttgaggtg

SEQ ID NO: 20229 - DNA, 1473 bp, Homo Sapiens
gcacgaggaacacctagttggttcacctggaaaacagagaggctgaccgtggggctcaccatgcggatgcgggtcacactgaatgctggagagatgttatgtaatatgctgaggtggcgacctcagtggagaaatgtaaagactgaattgaattttaagctaatgtgaaatcagagaatgttgtaataagtaaatgccttaagagtatttaaaatatgcttccacatttcaaaatataaaatgtaacatgacaagagattttgcgtttgacattgtgtctgggaaggaagggccagaccttggaacctttggaacctgctgtcaacaggtcttacagggctgcttgaaccctcataggcctaggctttggtctaaaaggaacatttaaaaagttgccctgtaaagttatttggtgtcattgaccaattgcatcccagctaaaaagcaagaggcatcgttgcctggataatagaggatgtgtttcagccctgagatgttacagttgaagagcttggttttcattgagcatttctctatttttccagttatccccgaaatttctatgtattatattttttggggaagtgaggtgtgcccagttttttaatctaacaactacttttggggacttgcccacatctctgggatttgaatggggattgtatcccattttactgtcttttaggtttacatttaccacgtttctcttctctgctccccttgcccactggggactcctctttggctccttgaagtttgctgcttagagttggaagtgcagcaggcaggtgatcatgctgcaagttctttctggacctctggcaaagggagtggtcagtgaaggccatcgttaccttgggatctgccaggctggggtgttttcggtatctgctgttcacagctctccactgtaatccgaatactttgccagtgcactaatctctttggagataaaattcattagtgtgttactaaatgttaattttcttttgcggaaaatacagtaccgtgtctgaattaattattaatatttaaaatacttcattccttaactctccctcatttgctttgcccacagcctattcagttcctttgtttggcaggattctgcaaaatgtgtctcacccactactgagattgttcagcccctgatgtatttgtattgatttgtttctggtggtagcttgtcctgaaatgtgtgtagaaagcaagtattttatgataaaaatgttgtgtagtgcatgctctgtgtggaattcagaggaaaacccagattcagtgattaacaatgccaaaaaatgcaagtaactagccattgttcaaatgacagtggtgctatttctcttttgtggccttttaaacttttgttgccctaaattccattttattgggaacccattttccacctggtctttcttgacagggttttttttctactttaaacagtttctaataaaaattctgtatttcaag

SEQ ID NO: 20230 - DNA, 1280 bp, Homo Sapiens
ccacgcgtccgcctctggaaaacccctgagcacaaagcaagaggcatcgaagccccctcggggatgcccgcaagccaacaggggtgtcgtgcggtgggagtacttccgcctgcgtcctctgcggttcagggccccagacgagccccagcaggcccaagtcccccatgtctggggctgggaggtggctggggcccctgcactgaggctgcagaagtcccagtcatctgatctgctggaaagggagagggagagtgtcctgcgccgggagcaagaggtggcagaggagcggagaaatgctctcttcccagaggtcttctccccaacgccagatgagaactctgaccagaactccaggagctcctcccaggcatccggcatcacgggcagttactcggtgtctgagtctcccttcttcagccccatccacctacactcaaacgtggcgtggacagtggaagatccagtggacagtgctcctcccgggcagagaaagaaggagcaatggtacgctggcatcaacccctcggacggtatcaactcagaggtcctggaagccatacgggtgacccgtcacaagaacgccatggcagagcgctgggaatcccgcatctacgccagtgaggaggatgactgagcctcgggatggggcgcccaccccctgccctgccctgaccctcgtgggaactgccaagaccatcgccaagcccccaccctaggaaatgggtcctaggtccaggatccaagaaccacagctcatctgccaacaatcccaccatgggcacatttgggactgttgggtttttcgtttccgtttctatcttcctttagaaatgtttctgcctttggggtctaaagcttttggggatgaaatgggacccctgctgattctttctgcttctaagactttgccaaatgccctgggtctaagaaagaaagagacccgctcctccactttcaggtgtaatttgcttccgctagtctgagggcagagggaccggtcaaagagggtggcacagatcgcagcaccttgaggggctgcgggtctgagggaggagacactcagctcctccctctgagaagtctcaagctgagaggagagacctgcccctttccaaccctgggaaaccatccagtctgagggaggaggccaaactcccagtgctgggggtccctgtgcagccctcaaacccttcaccttggtgcacccagccacacctggtggacacaaagctctcacatcgataggatcccatgaggatggtccccttccctgcgagaaa

SEQ ID NO: 20231 - DNA, 1295 bp, Homo Sapiens
  misc_feature (1112)..(1127): n is a, c, g, or t
gcacgaggctcacccctgtgatttggaggtgtggagaaggggaagggagggacagctcactggttccttctgcagtacctctgtggttaaaaatggaaactgttctcctccccagccccactccctgttccctacccatataggccctaaatttgggaaaaatcactattaatttctgaatcctttgcctgtgggtaggaagagaatggctgccagtggctgatgggtcccggtgatgggaagggtatcaggttgccggggagtttccactcttctctggtgattgttccttccctcccttcctctcccaccatgcgatgagcatcctttcaggccagtgtctgcagagcctcagttaccaggtttggtttctgagtgcctatctgtgctctttcctccctctgcgggcttctcttgctctgagcctcccttccccattcccatccagctcctttccccctgggtttccttggcttcctgcagcaaattgggcagttctctgccccttgcctaaaagcctgtacctctggattggcggaagtaaatctggaaggattctcactcgtatttcccacccctagtggccagaggagggaggggcacagtgaagaagggagcccaccacctctccgaagaggaaagccacgtagagtggttggcatggggtgccagcatcgtgcaagctctgtcataatctgcatcttcccagcagcctggtaccccaggttcctgtaactccctgcctcctcctctcttctgctgttctgctcctcccagacagagcctttccctcaccccctgaccccctgggctgaccaaaatgtgctttctactgtgagtccctatcccaagatcctggggaaaggagagaccatggtgtgaatgtagagatgccacctccctctctctgaggcaggcctgtggatgaaggaggagggtcagggctggccttcctctgtgcatcactctgctaggttgggggcccccgacccaccatacctacgcctagggagcccgtcctccagtattccgtctgtagcaggagctagggctgctgcctcagctccaagacaagaatgaacctggctgtgtcagtcattttgtcttttccnnnnnnnnnnnnnnnngccacattggcagagatgggacctaaagggtcccacccctcacccccccccacctcttctgtatgtttgaattctttcagtagctgttgatgctggttggacaggtttgagtcaaattgtactttgctccattgttaattgagaaactgtttcaataaatattctttt

SEQ ID NO: 20232 - DNA, 793 bp, Homo Sapiens
  misc_feature (92)..(110): n is a, c, g, or t
gcacgaggaattaataaacatatgaaatatccattgcacaaggcaaaggcacctaaaccttttgtttctttttctacatagcagaaattgannnnnnnnnnnnnnnnnnnaggggaacctatataattatgacccagtgatgtcttttggtgacttaagcttatgaattcaggttacaattgagttgattctagatggttactaccttgaaaaggatgttggtgccttatgtgacacgagccagagcctgctgggaataaacaaagcagattcatgccaacaccaactcgtagctttagtggcagatgggagtggtcacagactcccaaaatgtggggctttggatttccacaccatcccacgtgtgtgtcatcttcctctttcacactcttgatgataatttgaaaatggtgaaatcacctctgaatttgcctatagcatgagcacattcttatgacaacataacaaatagttcataatgtgaatattagaaactgttacagcctgcagttaccataattttccatgtttgtggaattgatattgaaatagcagggctaaggaattactggcaagttttagcctgtgggtaataccttagggttatttaaatatttgtaattttatttaaatgttcatgaatgtttgaaaggaacaaaattatcagggatggctctttgccatgggtcttattttcaccctcttttctgtaagaaaaagaacaatgtcttaatgtatttttaaagtttttggtatagtttctaattccaattttaataaaagttttatagat

SEQ ID NO: 20233 - DNA, 1044 bp, Homo Sapiens
ctccaagccctttaatattcacttaaacagttgaggcacaagcaataataaaactgcattttttacgttacaaaaaaattttgtatgttatctgcatgatataccaattttctcaatctcttctgcaataacatctcattaacactctggtccacatgttgatttaataaagtcaaaatggcaggtgggaggatggtaaaataaacttaccaaggggcaaaaggaaccaaacatttactgagtgccgactatgcaagctctactaggttttacacactttacataaacgtgaacctaagttctagttatcagttaacaggccagcattgctacagccagtaagtctatgttttcaatgttctttcgcttttaagtacaaattgtggaacaaaactatatctttgcccaaagaagcacatcaactgttgcactaatacattattttccatttccaaagttttttagtaagtgtgcaacattagcacatggaaacgctcaagctgtgtattagttcactgaaatctggggtttttttgttctcacctgctgagcaccatttggccagcatcactacaacaagctgattacatcaccttgtaaaacttaagatggggatgaatagtgtttggcaattacatttctgggagaaaaaactgctgattttttctttaactcgacacagctagctttaaaaagtggtacctcattttaaagcaccaaagttgtcatttaaataagaaaacgtacttgggttaatgaactgtaaaatgaagataccaacgccttttcaagcattacagcaaagccagtatgttcagagccaagtgacacccagctcatactgcactccagttcccaaggaaacggcgtttctaccctccccaaacttaagctgcccctcactcctccagccagccctcctttttctgagcccattctttccttgctgagctatctgccccttgctccctttcccacccctgttctccctctaactgcccctctatacatgtctgggctgctgcctaagacttctcctcgtgc

SEQ ID NO: 20234 - DNA, 1194 bp, Homo Sapiens
gcacgagggtgaccgctgactcggggcgttctccactatcgcttacctacctccctctgcaggaacccggcgatatggctgccgctgtgccccgcgccgcatttctctccccgctgcttccccttctcctgggcttcctgctcctctccgctccgcatggcggcagcggcctgcacaccaagggcgcccttcccctggatacggtcactttctacaaggtcattcccaaaagcaagttcgtcttggtgaagttcgacacccagtacccctacggtgagaagcaggatgagttcaagcgtcttgctgaaaactcggcttccagcgatgatctcttggtggcagaggtggggatctcagattatggtgacaagctgaacatggagctgagtgagaaatacaagctggacaaagagagctacccagtcttctacctcttccgggatggggactttgagaacccagtcccatacactggggcagttaaggttggagccatccagcgctggctgaaggggcaaggggtctacctaggtatgcctggttgcctgcctgtatacgacgccctggccggggagttcatcagggcctctggtgtggaggcccgccaggccctcttgaagcaggggcaagataacctctcaagtgtgaaggagactcagaagaagtgggccgagcaatacctgaagatcatggggaagatcttagaccaaggggaggacttcccagcatcagagatgacacggatcgccaggctgattgagaagaacaagatgagtgacgggaagaaggaggagctccagaagagcttaaacatcctgactgccttccagaagaagggggccgagaaagaggagctgtaaaaaggctgtctgtgattttccagggtttggtgggggtagggaggggagagttaacctgctggctgtgagtcccttgtggaatataagggggtagtgggaaaagtggtactaacccacgattctgagccctgagtatgcctggacattgatgctaacatgaccatgcttgggatgtctctagctggtctggggatagctggagcacttactcaggtggctggtgaaatgacacctcagaaggaatgagtgctatagagaggagagaggagtgtactgcccaggtctttgacagatgtaattctcattcaattaaagtttcagtgttttggttaat

SEQ ID NO: 20235 - DNA, 1661 bp, Homo Sapiens
gcacgaggcgccgcccggcctcaccacccctcgtttgcacgcacgcacgttcattctccgtcctcgcgccccttttcctacactttcctcttctccccgaccggaggagccgctctttccgcgcggtgcattctggggcccgaggtcgagcccgccgctgccgccgtcgcctgagggaagcgagaagaggccgcgaccggagagaaaaagcggagtcgccaccggagagaagtcgactccctagcagcagccgccgccagagaggcccgcccaccagttcgcccgtccccctgccccgttcacaatgcagcctgcttctgcaaagtggtacgatcgaagggactatgtcttcattgaattttgtgttgaagacagtaaggatgttaatgtaaattttgaaaaatccaaacttacattcagttgtctcggaggaagtgataattttaagcatttaaatgaaattgatctttttcactgtattgatccaaatgattccaagcataaaagaacggacagatcaattttatgttgtttacgaaaaggagaatctggccagtcatggccaaggttaacaaaagaaagggcaaagcttaattggcttagtgtcgacttcaataattggaaagactgggaagatgattcagatgaagacatgtctaattttgatcgtttctctgagatgatgaacaacatgggtggtgatgaggatgtagatttaccagaagtagatggagcagatgatgattcacaagacagtgatgatgaaaaaatgccagatctggagtaaggaatattgtcatcacctggattttgagaaagaaaaataacttctctgcaagatttcataattgagagaattcctgagttgatagctctaaaggcagatatgctgtatttgcctactttaacccatttttcaacctgtttgttttttaaaaggcttcactaagggttgatatgtaccattgtatggggcaattttaagtcagctaaggcaataaccttatgcatgaacatttcccagactttcatgaagctgttgaggtcctaggcaattaatgcagcagttgcgataaataaaaacatctcacctaagtctccttttcttcataacatagatactgacatgataggaagctctcagcttagggaaagagaataaattttagattatagaacatggattcaaaagtgactggaacaaattggctgacaccttactggtaacctgctattcttctggtgttatccttcaggattgttccactaaaatttatttttcaaaaaatttacttcacattattctatgtaagtgatgacttgtcagtgttccaggtgtatcttagctaaaactagagaatgccctaacttagatggtttttgaagcctatacaattggtattgtttgacccttaagcttttacatctcttagcatggaggacgaagaaagctgtacattgttgcttgagagtctgtacatttagtccagatttgtatttgcactgtcagtatggcaaatgagtgaaaaatgtttatacactaatggatttttatttcctttttttgatcagcttataacccgggctgaaacctcatttatgttcatgacagtggggattttttaaatgtctacattcttctattaaactgttggaggact

SEQ ID NO: 20236 - DNA, 1172 bp, Homo Sapiens
gtgtcggagatgtatgcagtgtgacgccaagtttgactttctcaccagaaagcaccactgtcgccgctgcgggaagtgcttctgcgacaggtgctgcagccagtgcgcggagtgcgccctggtgtccctcaaggaggcggagttctacgacaagcagctcaaagtgctcctgagcggagccaccttcctcgtcacgtttggaaactcagagaaacctgaaactatgacttgtcgtctttccaataaccagagatacttgtttctggatggagacagccactatgaaatcgaaattgtacacatttccaccgtgcagatcctcacagaaggcttccctcctggaggaggcaacgcacgggccacaggcatgttcctgcagtatacagtgccggggacggagggtgtgacccagctgaagctgacagtggtggaggacgtgactgtgggcaggaggcaggcggtggcgtggctagtggccatgcacaaggctgccaagctcctctatgaatctcgggaccagtaattctacgtggggctgagcttggagtacgtgtggtcaccaggactgagtcgcttggaacagcagagcctgctccttgcgtaccacagggattaatcctgcttgtgctgggaaatgcaactcactcatgtatttggagaaacaggagtgttcacttatctagtgcaatatgttcacagtttattaatgctttaaacagcttcatgttttagaatttgtgtattgtcaatacttaattgggggtgggagagactgagctacactactgctaaactatttttagcataatatataccatttttatgagttcgcaggtttactagaaggttttggcccatcaatattcatttcatttaatttttccccagaaccagtttgggcagtaggaactcaggcttttggtttgcagtggagcctgttcgcctttaatagccagtttacagcacttgccttagcctgtttcacagacttgtccacttaccttgtcactaatttggggcttttgggctgtgagtgatcctttgatacttcaccaaggggaacgtgggggctttgtgttttgtacttttcactcactatttcactttattaagatgactgtacagcaatttgtatataaagcttatgattaaaaactattttgaacatacgg

SEQ ID NO: 20237 - DNA, 921 bp, Homo Sapiens
gcacgagggttttaatgattactgtttagacatttaacaatgtaggtatatccaggtgagctaagcacactttgacagcacactattgaatgttatagtttctgtattgaaatatgtaaagacatctgcaaattagtacctagcaatgaagacatacatttataaatatacacattctaggtttgataaggtaaatgtaaacagatgccatgactccttttcaaacagaaaacccacaagactaatagagaaccaataggctccctatagtacgaatgtgcaaaattaaagcatggtaaactgatatttacataaatatcaaaccaacaattagtttatacattgtcaatgaccttctaagatatgtcatgagtggttccaagaatatctttcccccaatggagaaggtattcagaggctaaattccgacactttaaaatgacacacatcataggctttacctgtttgaccactgcctcaaatgtgtgagatgtgattttatgataagcagtctattatttttaaacaagaggttctaaacacatctttagattctaagcagaaagaaattacaagtactattagatttacattaaacaagttacctctatcaaatttctcgattctcttatgctgtagctatatttgattttaccttaaaaagttctaaggtcctttccccccctttgttaattttggtaaactaggcacattttacaaggaaatctgtgtcaaaacagataacagtgcataaatcaatccaaatttagaccctggcaaccagttccccattgctcatctacgggactctgtcaacggtaaataggcaatcatctctcttgaaaagtatacatcctctctcgcactggtggaaagcaaattgactttttgtttgctgtataaaacccttagcacttcaaa

SEQ ID NO: 20238 - DNA, 964 bp, Homo Sapiens
gcacgaggtcaagatggaggagtacgcgcgagagccttgcccatggcgaattgtggatgactgtggtggggcctttacgatgggtaccattggtggtggtatctttcaagcaatcaaaggttttcgcaattctccagtgggagtaaaccacagactacgagggagtttgacagctattaaaaccagggctccacagttaggaggtagctttgcagtttggggagggctgttttccatgattgactgtagtatggttcaagtcagaggaaaggaagatccctggaactccatcacaagtggtgccttaacgggagccatactggcagcaagaaatggaccagtggccatggttgggtcagccgcaatgggtggcattctcctagctttaattgaaggagctggtatcttgttgacaagatttgcctctgcacagtttcccaatggtcctcagtttgcagaagacccctcccagttgccttcaactcagttaccttcctcaccttttggagactatcgacaatatcagtaggacttctttcctaggatttctttaacagaacgagttgtggttcgagaaggatttcagaagatcaagttacagtctgtttttaaaaccataggtgggacagctatggccaataggctataaagagacatttagcacttttttctatttaaaggaacaagcggggaagggtgctaaaagataatacgtttatttattcacacttgaattgcatttgtgatcaaaataaatgtttaaatcgctaaaggaaaatacagtaagtgcttgaaagatgaaggaccaaaaggccaaaaacagtgaaatatgatcatcatttcctttgcggacttctctgcctggttttgtgtgttctgttattcaaacaataaaaagctggtggaactttactccttcttttaagataagttgtagacttcgatgtttcatgctcatgtactt

SEQ ID NO: 20239 - DNA, 656 bp, Homo Sapiens
gcacgagggcaagagagaccaaaacctaacctgagttacaagaaacaagacagtaatggctataaagggagtgaccaggagcaactgggacactcctttacctcccatatccaatgtatgtgtttcacagaaaaacaacaaaattaacaaattcacaaaatacaacagctagaattacaaaatccattcatccaagggtggtagaaggcaggatggaaaggtggaagggtaaatggcacagggagaaaaacaaagtgttccaatcagtccaggcacagggactggcaaatgctagaaaatagctgcagaaaaacctgtggtcctttcagactcacggtgatgttaaaaatccacacactggtgtcagggaacattctgccttacgtgcaccagagacaaaaatttcaattcctcagagagaagggaatacgcagagggcccttggcagagcgggtcctgccttccctggcaggcgggaggtgaacagggaaaagagctgccacagcttcttccaatcccgcccatcccctttggatggcaggcaactcagtgacctgcagtagccttcagtttggcaggcgacggatgcggtgaagggaacttctctgcagaagtagagctgctcagggccgactgcaggtagactgtcttgcgga

SEQ ID NO: 20240 - DNA, 788 bp, Homo Sapiens
gcacgaggctgggaggaaaactgagacctcctggtcacccgccgccgggccttttagaaactcccacaagctctgccttccctccctggtcctcttcagaccccctcttagttcttcgcggctaacggctcgcgctcggggccgggtgtggagctggaacagagggctggcaaggcgcgcatgcgcaccgagggtggagccgctgagcacagaaccggaaacttagagacaaagttcggagccccgcccccgccgcgcgccgctgagttgtctggccccgccgacccacggcccacgacccaccgacccacgaatcggcccggccgtcgcgtgcaccatgtctggctcctccagcgtcgccgctatgaagaaagtggttcaacagctccggctggaggccggactcaaccgcgtaaaagtttcccaggcagctgcagacttgaaacagttctgtctgcagaatgctcaacatgaccctctgctgactggagtatcttcaagtacaaatcccttcagaccccagaaagtctgttcctttttgtagtaaaatgaatctttcaaaggtttcccaaaccactccttatgatccagtgaatattcaagagagctacatttgaagcctgtacaaaagcttatccctgtaacacatgtgccataatatacaaacttctactttcgtcagtccttaacatctacctctctgaattttcatgaatttctatttcacaagggtaattgttttatatacactggcagcagcatacaataaaacttagtatgaaactttt

SEQ ID NO: 20241 - DNA, 701 bp, Homo Sapiens
gcacgaggcgctttattttcttaaccagttgtggtgtgagtatcagaattgaaacacttttttgggggtaaaaaatatagcctttacatggacagaattttttttgttgtttcagtgaatatgcctgtaattcagtgtatttcagttccgtcagaaagtgtaaatgttagtttcttggtaaagtccttttcttgcttaccttgactgttgatgtactgattgagaagttcattgtctcgtttgtgattcttccagatgtgatgcttgatattttctatatgcgagttagccatccacacccaggcatagcctggatacagtataaaaatagataattaaaaagatggttgccaagcaaggaaaacttattttatattttcccttccttattttaagcattgtgagtaaatcagatgttgaattcttttgccaagggaattatagctgcaggttctctctcactgccatcaaactgtaaaagattaaactgcgaagtcaagctcaacagattattttggaaagtttttgtattaagggatttagtaacatcattttgttttccaccaggcagggagtagggcttagtgttttaaaacacctctgctttctgatgttgccttaatattctgctattgcagcaattaaaaattgtcttcatgtacatttggaactaacacgtgatgtgatatattcctaaacta

SEQ ID NO: 20242 - DNA, 1280 bp, Homo Sapiens
cccgggctgcaggaattcggcacgaggccggcttcggagcgggagtgttcgttgtgccagcgactaaaaagagaattaaatatgggtgatgttgagaaaggcaagaagatttttattatgaagtgttcccagtgccacaccgttgaaaagggaggcaagcacaagactgggccaaatctccatggtctctttgggcggaagacaggtcaggcccctggatactcttacacagccgccaataagaacaaaggcatcatctggggagaggatacactgatggagtatttggagaatcccaagaagtacatccctggaacaaaaatgatctttgtcggcattaagaagaaggaagaaagggcagacttaatagcttatctcaaaaaagctactaatgagtaataattggccactgccttatttattacaaaacagaaatgtctcatgacttttttatgtgtaccatcctttaatagatctcatacaccagaattcagatcatgaatgactgacagaatattttgttgggcagtcctgatttaaaactaagactggcttgtggttaaatgaatatgttcagtttttgaattttaatagtaactccaattcagtaaatggtatcactgtttaccccttttaaagatatgattagacttcgttagtaatgttcaacttttcacaaagatggtgagtgccatcttaaaacttactggagattggttttatatttagatttatataactggttatgtgaatatatttaaatactggggaaattgcttcactgtcttagaaccaagcaagattcacctgtgttttgtgttcatgttcatttgcctcttaaaggcaagggttgaagataaataaggtagcaatgtctatagttttggccttaactatgccaatctaattataattccctgtatttaaaatggtttcttttacttattgaaaggcattttagtgtggtttatgtgtaatattaaagattattcaacacctctcacatcttacagatctataaggtcacatgcttttaaaatagtagcaagttaaacttcactcttgaattctttacaatctaagtcaaactaagttataatttaggattgtctttaaacagccattcagaaacaaaactgtagaactgtgtatttgattgggaatggtgcttttgccaacttaaaaggattaaagtaacggagatatacacaaattttaaaattatgtgtgatcacaagactaaagataattaaaaagaaaaccacagatcatgaaaaaaa

SEQ ID NO: 20243 - DNA, 882 bp, Homo Sapiens
gcacgagggtggatgatgacttctcagccatcatgaatgcagtggaggaaggcaagggtattttttacaacatcaaaaactttgtccgattccagctgagcacgagcatctccgccctgagtctcatcactctgtccaccgtgttcaacctgcccagccccctcaacgccatgcagatcctatggatcaacatcatcatggatgggccaccggcgcagaggagttcccagaaaactgaagtgtgttgcactggagtgagactgggagtagaaggcagaggagaaagtacctgggccggcagagctggcttgggggtagagcctgttgacaaagacgccttcaggcagccaccacggagtgtgcgggacaccatcctcagcagagccctcatcctgaagatcctcatgtccgcggccatcatcatcagcgggaccctctttatcttctggaaggagatgcctgaagacagagcaagcactccccgcaccacgacgatgacgttcacttgttttgtgtttttcgatctcttcaacgccttgacctgccgctctcagaccaagctgatatttgagatcggctttctcaggaaccacatgttcctctactccgtcctggggtccatcctggggcagctggcggtcatttacatccccccgctgcagagggtcttccagacggagaacctgggagcgcttgatttgctgtttttaactggattggcctcatccgtcttcattttgtcagagctcctcaaactatgtgaaaaatactgttgcagccccaagagagtccagatgcaccctgaagatgtgtagtggaccgcactccgcggcaccttccctaatcatctcgatctggttgtgactgtgggcccctgccgtg

SEQ ID NO: 20244 - DNA, 1373 bp, Homo Sapiens
  misc_feature (774)..(794): n is a, c, g, or t
  misc_feature (842)..(859): n is a, c, g, or t
atcccccgggctgcaggaattcggcacgagggtatccccttaaggccacttcctatctgatttttcccagcaaatgaggcaggcaattctaagatcttccacaaaacatctagccatctaaaatggagagatgaatcattctacctatacaaacaagctagctattagagggtggttggggtatgctactcataagatttcagggtgtcttccaactgaaatctcaatgttctcagtacgaaaaacctgaaatcacatgcctatgtaaggaaagtgctattcacccagtaaacccaaaaaaagcaaatggataatgctggccattttgcctttctgacatttccttgggaatctgcaagaacctcccctttcccttcccccaataagaccatttaagtgtgtgttaaacaactacagaatactaaataaaaagtttggccaaaaccaaccatgaagctgcaaaggtgcttgctcttactgtttcaaatttttgcaactctgtagtgtctcacttttaaaggaacagcttgattgcaaaggagaaaatagataagcaatgaagttatctccaacttcctaaaggcttatgacttctaaaaagtgaatctatcagcattccacatcagatttaaagcatcaaatgcctgtgaaacagcaaagatggtaagcaaagcaaactagtttttccgtctaagtcgaaattgaacacttaccttcctcatagtacagtgaaacatactgtacctcaaggcaatggaaatgccttctagattnnnnnnnnnnnnnnnnnnnnngaaatattcaatagcgtattagaagtcctccaaattcaacacttggannnnnnnnnnnnnnnnnnaaagcatgtgtgacacttaaaggctttattaatagagctgttgtttaccaatggcgatctggggcttgggagggggtatttttttcaaagtccatttttgatgaagacctttaaacatgcttcgtatgtttttaacatttttttcaaattagtcttttagtcaatataggaaatggcttaagtttggggtccccctttttacccctgtaagccattgcaaacttgacatttagttggatgcctgacttgtttttagttctatgaaactacactgtatggagaaaatctattgcaagtggtctttaaaaagcaaaacctgaggcagcatgacccaggtccagccatgaagttgaaaaagatgctcttgaatatagtaaacttgaagacctccaactaaaaatccttatactgcacttattccttcaaataagttttgttcgttcacttatgggatttaacgtggcaggtgcaccatttggaacagaatgacatccataagccatgcaacttaaca

SEQ ID NO: 20245 - DNA, 1201 bp, Homo Sapiens
  misc_feature (248)..(271): n is a, c, g, or t
cccccttagaaatcccccgggctgcaggaattcggcacgaggagaacatactggtcgtcttgttataggagatcacaaatcaacatctcacttccgaaccggggaagaagacaagaaaattaatgaagaactggagtctcaatatcagcaaagtatggacagtaaattatcaggaagatatcggcgacattgtggacttggcttcagtgaggtagaagaccatgatggagaaggtgatgtggctggannnnnnnnnnnnnnnnnnnnnnnntcacctgatcctgaaagtccagatgattctgaaagcgattcagagtcagagaaagaagaatctgctgaagaactccaagctgctgagcaccctgatgaagtggaggatcccaaaaacaaaaaagatgcaaaaagcaattataaaatgatgtttgttaaatccagtggttcataactcccaaacgcttagtctttgtattaaaagtaagccttattgttacaatgcacagtggaggactgcttatagagcacagacctttgtattataatttttaaaaaggcccttttaaataattacaaagagtgtttgctttcaaatgccatgggttacacttttatgggcatgactataaccatttttgtaaagagtaagagttgtataaaataagaaataaatacagtactcaacttcctttcatattagcatcatcaaccctctaattcaccttatgggggaaatgcttctttttgtttgtgatagctattttatcatttccttcatatttttctcttataaaaatgtatttgatactgtgatatgttcacgaaaagtattctttaattattctttgttatagtagagctgttcattatggatatttctgctgccagtcacaatctaaattaattttggcaaaagattgggtacttagttgcctgttactgagttagctctactcttttggaccaaagcaacatgagagcaagtacttttcacacttgttaagatggagttataactgtcatacatttggaatattatgatcccaagtagtctttttataatttggattgtatcgtatgttagatttttgataaaatttggccaatttttacagaagaaattctctgatcatttagttctatctatttagaaatatgtaaaactggattttttttaagtaatatgtgaccaaagtaattttgtccc

SEQ ID NO: 20246 - DNA, 1938 bp, Homo Sapiens
gcacgaggctttattactaaaggtttatttacatagtgtttaaagcataataaaaaataaattacaatacaaaagtgctctttaggaaggagacactaaacaacaggcccatattaccccttgactatttagccaagacataagctacaaattttgccggaaaaactgtccatacatttttaactacttcttcattattcttatggaccatcatccaggacatctgtttgaagaaatatccagttataatattttcaaaggttagaattgtgaagaaaaaatataaaatgtgattaaaggatatatagccttcagatgtaatttacagttttaaaattgcactttaaaactttgcttttttagacagtataaaaggcagaatgagacagatatgtaatgaatttcagaactgaggttcatatgtaaatcatacaattttttaaaaaatagtattggaaaaatatcaaggtctatacatttaaatacagataatctgtttgaaaattccagtttgttaaaagaaaaaacatctgcagtccagtcgattaaaaactgaaaatatcaatctgtaaagattgatcttgagcctaaacttttagatgctttctatcctttgaacaaatgcttctgtatcttaagcttgtaacttttctttcaatagcccacttataaagtttgctttatctaccagtatgggggaaaaaaagaataaagttggttttattccatttaaagtagttttggtatttctttgctccataccaaagtcttcctcccccaaaataaacaagtgaattagaattaaaagaaaaaagttaataatttcttctagttctcagagttttatataaaactgtacaaaattatcatcatttagagttgattttttcaccagccctgaattttcaaacttgtaatatgctgtttcacaatttttttattaaattactttaatgattccagtctgcaaatgagcatagactttgctctgttgttatagatcattgaattgggggggaaacatagtaagctaaactatccgtcactgctcatgaaagacccacattgttgattatttttcccagcacagaagaaaagtgacaagtgattcatcctgcaatggcctctgccaatcttttcatatctatgtaaccttttgtagttactgtgtgatttagcgttgtgctattgtaaatcttggattaattaacaaaacaacaaaaatctatcacctggaatattgaaagaaattcagtaaaacaagatgtgtctcatagttaaggagagacataaaaataaaaatgtcatttaacagtttgaatttaggatttactgttaatcagaaacaccgaggaggcttagctcaccttttaattgagaatgtgggaaggaaagagagtaaacacattaactttagtagcagaagtgctgctaaaagaaatacgtgaaaggaaatgtaacagacaaattggcttttatcccttttgataccaatatatgtgtatacaagtcataacactgtaagtagtatcttaagggcaaaaatgtagcttcttgtttataaaacctaatgagcacttgaaaaaatttacactctgaaattaaataagaccttaataatgaggctgtgtatgactggtgatatggaggagcactgtgctggctccagaggggtgttgcttgtctagaatctaatatgctgcagaactggttggaaaacgggtcacaactggaaaagccaaagaaaagtttccattaacttcaagaaatactagggttcttgttcttggaaatcatctcagcttccatctaaaattgttagtctgtgtcttctaaataaacagagacctttttctcttggttgagcctttcctcttcttttgattttatctccaccactttatgagctctttcggcccatcgctttttccctcgtgc

SEQ ID NO: 20247 - DNA, 1030 bp, Homo Sapiens
gcacgagggaagtggggtcgtgatgatattgaaaatatagcaagagaagtagaaggcaaaactccagaagaagtcattgaatattcagctgtgttttgggaaaggtgcaacgagctccaggacatagagaagattatggctcagattgaaaggggagaggcgagaattcaaagaagaataagcatcaagaaagcacttgacacaaagattggacggtacaaagcaccttttcatcagctgagaatatcatatggtactaacaaagaaaaaaactatactgaagaagaagatcgttttctgatttgtatgcttcacaaacttggatttgacaaagaaaatgtttatgatgaattgcgacagtgtattcgcaactctcctcagttcagatttgactggtttcttaagtccagaactgcaatggagctccagaggagatgtaataccttaattactttgattgaaagagaaaacatggaactagaagaaaaggagaaggcagagaaaaagaaacgaggaccaaagccttcaacacagaaacgtaaaatggatggcgcacctgatggtcgaggaagaaaaaagaagctgaaactatgaatatgtttttgtttcataatcactaactttaaaccagtagttctttaatttacgggtcttcataagatgtactgtacaatgctcaattgttatgtcatttaaagacatcaggttcatctgtttactgagctagaaacatagtatgtagtttcacttttttaaatgcaacagctgtgctgaaatttttttatcattaacacttgaagtaataaaataggcttcatttattactaagtgtttcatttgatttatttttctattgtagttccatttgtgaagattgtgactttttgtttattagctataatttctacacttgtaagcttaaaaccagttaaaaagaaaattgcaaataacatttgtccctttcagtcttcacctagttgtgtaattattttaattcactttgcctttgcaagaaaatttgggtattttc

SEQ ID NO: 20248 - DNA, 1592 bp, Homo Sapiens
  misc_feature (977)..(1057): n is a, c, g, or t
gcacgaggcgcgagcggcgccagctcggggcagcggaacccagagaagctgagggggcggtagcggcggcgacggcgacgacgacgactcccgcgcgtgtgcccagcctcttcccgccgcagccgcccttttcctccctcccttacgtccccgagtgcggcagtaccgcctccttcccagccgcgcggcttcctccagacctctcggcgcgggtgagccctattcccagaggcaggtggtgctgaccctgtaacccaaaggaggaaacagctggctaagctcatcattgttactggtgggcaccatgtccttgaagcttcaggcaagcaatgtaaccaacaagaatgaccccaagtccatcaactctcgagtcttcattggaaacctcaacacagctctggtgaagaaatcagatgtggagaccatcttctctaagtatggccgtgtggccggctgttctgtgcacaagggctatgcctttgttcagtactccaatgagcgccatgcccgggcagctgtgctgggagagaatgggcgggtgctggccgggcagaccctggacatcaacatggctggagagcctaagcctgacagacccaaggggctaaagagagcagcatctgccatatacagtggctacatctttgactatgattactaccgggacgacttctacgacaggctcttcgactaccggggccgtctgtcgcccgtgccagtgcccagggcggtccctgtgaagcgaccccgggtcacagtccctttggtccggcgtgtcaaaactaacgtacctgtcaagctctttgcccgctccacagctgtcaccaccagctcagccaagatcaagttaaagagcagtgagctgcaggccatcaagacggagctgacacagatcaagtccaatatcgatgccctgctgagccgcttggagcagatcgctgcggagcaaaaggccaatccagatggcaagaagaagnnnnnnnnnnnnnnnnnnnnnnnnnnnnnnnnnnnnnnnnnnnnnnnnnnnnnnnnnnnnnnnnnnnnnnnnnnnnnnnnnagcagcagccggccaccagccccccaagagaacacaacttctgaggcaggcctgccccagggggaagcacggacccgagacgacggcgatgaggaagggctcctgacacacagcgaggaagagctggaacacagccaggacacagacgcggatgatggggccttgcagtaagcagcctgacaggagcaatggccaccagcaggtgaagggcatcgctgccccaggcctcaagccgggcacccaaccctggatgccaccccccagcgggtaccagaggaaagctggcagcaggcgcctcctcccccaacgcatcccagccagtgccatgtcctctgcaggtggagttactggcctactccttccccatgagccctccctgtctgcactgcccaggccagagggtagagcacaggggtttccccatactacctcccctccccaggacactcccaggcttgggttttttctataggtttggcggggggccacagggaggggaccctgacaataaagagattggatcccaacctcgtgc

SEQ ID NO: 20249 - DNA, 397 bp, Homo Sapiens
ccccgggctgcaggctcaggctacactatcccaggatcagcatggccgtccgccagtgggtaatcgccctggccttggctgccctccttgttgtggacagggaagtgccagtggcagcaggaaagctccctttctcaagaatgcccatctgtgaacacatggtagagtctccaacctgttcccagatgtccaacctggtctgcggcactgatgggctcacatatacgaatgaatgccagctctgcttggcccggataaaaaccaaacaggacatccagatcatgaaagatggcaaatgctgatcccacaggagcacctcaagccatgaagtgtcagctggagaacagtggtgggcatggagaggatatgacatgaaataaaagatccagcccaactg

SEQ ID NO: 20250 - DNA, 2178 bp, Homo Sapiens
  misc_feature (482)..(494): n is a, c, g, or t
  misc_feature (1639)..(1690): n is a, c, g, or t
ggaagacagtggtttgtggacgagagggctgtgagcatcctggcaggtgccccaggatgccacgcctggaagggccggcttctgcctggggtgcatttcccccgcagtgcataccggacttgtcacacggacctcgggctagttaaggtgtgcaaagatctctagagtttagtccttactgtctcactcgttctgttacccagggctctgcagcacctcacctgagacctccactccacatctgcatcactcatggaacactcatgtctggagtcccctcctccagccgctggcaacaacagcttcagtccatgggtaatccgttcatagaaattgtgtttgctaacaaggtgccctttagccagatgctaggctgtctgcgaagaaggctaggagttcatagaagggagtggggctggggaaagggctggctgcaattgcagctcactgctgctgcctctgaaacagaaagttggaaaggnnnnnnnnnnnnngcaattaggtagcacagcactttggttttgctgagatcgaagaggccagtaggagacacgacagcacacacagtggattccagtgcatggggaggcactcgctgttatcaaatagcgatgtgcaggaagaaaagcctctcttcattctggggaacaaagacgggtattgttgggaaaggaacaggcttggagggaagggagaaagtaggccgctgaggatatattcgggcaggactgttgtggtactggcaataagatacacagctccgagctgtaggagagtcggtctgctttggatgattttttaagcagactcagctgctatacttatcacattttattaaacacagggaaagcatttaggagaatagcagagagccaaatctgacctaaaagttgaaaagccaaaggtcaaacaggctgtaattccatcatcatcgttgttattaaagaatccttatctataaaaggtaggtcagatccccctccccccaggttcctccttcccctcccgattgagccttacgacactttggtttatgcggtgctgtccgggtgccagggctgcagggtcggtactgatggaggctgcagcgcccggtgctctgtgtcaaggtgaagcacatacggcagacctcttagagtccttaagacggaagtaaattatgatgtccagggggagaaggaagataggacgtatttataataggtatatagaacacaagggatataaaatgaaagatttttactaatatatattttaaggttgcacacagtacacaccagaagatgtgaaattcatttgtggcaattaagtggtcccaatgctcagcgcttaaaaaaacaaattggacagctacttctgggaaaaacaacatcattccaaaaagaacaataatgagagcaaatgcaaaaataaccaagtcctccgaaggcatctcacggaaccgtagactaggaagtacgagccccacagagcaggaagccgatgtgacagcattttaaggttctcagacctccagtgagtacctgcaaaaatgagttgtcacagaaattatgatcctctatttcctgaacctggaaatgatgttggtccaaagtgcgtgtgtgtatgtgtgagtgggtgcgtggtatacatgtgtacnnnnnnnnnnnnnnnnnnnnnnnnnnnnnnnnnnnnnnnnnnnnnnnnnnnnttctgtggagggttgccatggtaaccagccacagtacatatgtaattctttccatcaccccaacctctcctttctgtgcattcatgcaagagtttcttgtaagccatcagaagttacttttaggatgggggagaggggcgagaaggggaaaaatgggaaatagtctgattttaatgaaatcaaatgtatgtatcatcagttggctacgttttggttctatgctaaactgtgaaaaatcagatgaattgataaaagagttccctgcaaccaattgaaaagtgttctgtgcgtctgttttgtgtctggtgcagaatatgacaatctaccaactgtccctttgtttgaagttggttttagctttgggaaagttactgtaaatgccttgcttgtatgatcgtccctggtcacccgactttggaatttgcacatcatgtttcagtggagatgctgtaaataggttcagattttactgtctatggaatttgggg

SEQ ID NO: 20251 - DNA, 900 bp, Homo Sapiens
  misc_feature (761)..(787): n is a, c, g, or t
gcacgaggcttctgtttaatattccatttacgggcaatgtcaagctcaaaggcatcattataatgggagaggatgatgactcacccctctgagatgagactgtacaagaatattccacagatgtcctttgatgatacagaaagggagccagatcagacctttagtctgaaccgggatcttacaggagaattagagtatgctacaaaaatttctcgtttttcaaatgtctatcatctctcaattcatatttcaaaaaacttcggagcagatacgacaaaggtcttttatattggcctgagaggagagtggactgagcttcgccgacacgaggtgaccatctgcaattacgaagcatctgccaacccagcagaccatagggtccatcaggttaccccacagacacactttatttcctaagggctggccaaggctcccatagaggcgctgtgtcagtgaagatgtacgactacctgttgggaaggacaaagggatgaggctccagagagagttggctgccacagcctctgccaagctttgtctttggggcttgctgcagaaacctggcctacggaagatacgacaccactgggagggttgtgtaggtgccaggggaccatcgtggttctctagggcgctgtggaaattgggtcttgggctgggtggcatctggcagtcatggataacacttgcttttccagttaatgtggccatgtgattccaagtgtcatgttgctttgtggcaagattgttgtgtgacttgnnnnnnnnnnnnnnnnnnnnnnnnnnnaaaggaaaactatttgtgggctataggaaactttctgatgcctccggattgtgttagtagtagccatcaggagggtctccaaactaaaacacttgttcctgctttgctccttt

SEQ ID NO: 20252 - DNA, 1156 bp, Homo Sapiens
ccccgggctgcaggaattcggcacgaggcaacatccggcccagcagctctggggggtactgggtgggcatgtcgaccatccgccctaaccctgggttttccatgctggatttcttatctgatagaccctggattaaaaggatgatttttaagctctttagtcaagagacggtgatgaagtttgtgccgcggtacagcctcgtcctagaactcagcgacagcggtgccttccggagaagcctgcatgatcccgatgggctggtggccacctacatcagcgacgaggcgaacacgatgggcacctgtacctgggctctttcaggtcccccttcctctgcagactcagcctccaggctgtttagccctcccagatagctgcccctgccacgcaggccaggagtcttcacactcaggcaccaggcctggtccaggaggagctgtggacacagtcgtggttcaagtgtccacatgcacctgttagtccctgagaggtggtgggaatggctgcttcattcctcgaggatgcccgggccccacctgggcttgtctttctgtttagagggaagtgtaacatatctgccatgaggaacataaattcatgtaaagccattttctcttaaacaaaacaaaactttctaagtacagtcattctctaggatttgggaagctccttgcacttggaacagggctcaggtgggtggagcagtaaggcactacccagagagcttgctgctgcggccctgtcctgcggcctcaaagttcttctttactatatataacgtgcggtcatacctttcttcgttgtggtggggatggaagagcagagggagcatggcccaggggtgttgaggccagcggtgagagccgtgttagccaagacatggaactgtgttctcaagggttatgtggggcgtgggctctccatagtgtgtatgaaaagcttgttgactctagcggctcagagaggactttgctgggtttctttctgtgaatatctccgtgctgaccatgctggaattggatgattctgcaattcgggacctactgcaggggtccgtttagtaacgtcttgtctgtgatctttgttcttgacctctagaccccaagatgtgaacagtgcacgtgttaatgtcatctttgctcatgtgttataagcc

SEQ ID NO: 20253 - DNA, 625 bp, Homo Sapiens
cccccacgcgtccgataatatatatttggggtactttgatattttatgtaaattatataatctatatttgatgtactttcatatttttgtacctaatataatatatatttgatgtatcctcatattttatgtacagtatataatgtatagtttgggtactttgatattttatgtacactataaaatatataactgctgtactttgatattttatgtacagaataaaatatatatttgatgtactttcatattttatgtacagtatataatacatgctttgggtactttgatattttttgtacagtatagaatatataccttgggtattttgatattttatgtacagtatacaatatatggtttctgaactttgatatttcatgtagagtataaaatatatatttggggtacattgatattttatgtacagtatataatctatattagatgtactttcatattttatgtacctaatataatatatatttgatgtaatttcatattttatgtacagtatataatgtatagtttgggtactttgatattttatgtacagtatagaatatatatgtggtgtactttgatattttatgtacagaataaaatatatatttgatgaactttc

SEQ ID NO: 20254 - DNA, 1197 bp, Homo Sapiens
  misc_feature (120)..(186): n is a, c, g, or t
gcacgagggtcgctgattccagagagctaaagccgatggcttcgggagcaagttctgcttgaacctagccgacggttatggaaacccattgacattccaaaacaatatatacacataacnnnnnnnnnnnnnnnnnnnnnnnnnnnnnnnnnnnnnnnnnnnnnnnnnnnnnnnnnnnnnnnnnnnacacacacacacataaatcagccaaaatcagagaaaaggaacagggatttaataccttttttatgcttatttttgtcaaacatgtactcctttcatacgggtggcttttacaaggcaacttccgtcatttaatgttttcaactgtaattgtcttaatggaaatgttaaaattcatatctgattaacatttttaataacttagaggagattttaactttatttaaaaataggtaaaattattgtacctaattatgtctaaagtttattcaggggtaatttccctgatgtctgtataaaatcaagatcttattttactgatgcataagtcctagtgggtcaagactaggcatatgctttcagataaataaggaattactccaatcagttttccccaatcaaagaagccatgtcattttacttttagaaacatacaattgggcccaatatgggaattttcataatagttcatacatttgtcagccaacattaaaaggtaaccaactcctcaggtatttgtagtttaccctaacgcttctttaaaagaaagtaggtaaaaaaagaaaagggtagataatctttcgtatgcaaacttttcccttatattttgtctttctttcctttttgactttagtagcatcctccacacatttgtgtgcctgatttgaaaggaagctggggcacccagcgagtttagcctttaagtttctgtgtattgatttgcagattaagtaatgctgagaggaataaagaagggacagaaacatggaacataaagcattgaaaattccggtgcttgggcttcggcttcagagtaacgtcagtggcttagggttaaacggccattttattcaaatgcttgctatacaatctgaaaacacactggcaggtgctcctctccttggcaattcattgagtatccagagttctacgatgtttaactgaaaaattggctaatgttttgatcctccagtgtgactgttgtttttgtttgggggtgggtttggggttttt

SEQ ID NO: 20255 - DNA, 1006 bp, Homo Sapiens
gcacgaggctcactacaaaaatgcagcaggtggacactctaactttggagcagaagctatttagggtccctacccctatcacatctgtattatccatgaattcagtaaccctcccaatgtccggaataaggtgcgcattcgcagctggatggacactatagcaaacatcaatcaagagctcattaaatatgaattcttccctgaagccactcgaagtgaagaagacttaaagaaataccccaagtacccctgggggagagaaatctatactttagaaggtgttgtggatggagctccatattccatgatttctgacttcccttggctgaggtcattacgagctgcagagcccaacagcttcgctcgatacgactttgaagacgatgaagaaagcactatctatgctcctagaaggaaaggacagctgtctgcagacatctgtatggaaacaataggagaggaaatttcagagatgcgtcagatgaagaagggtgtatttcagcgagtagtggcaatttttatccactattgtgatgtcaatggagagccagttgaagatgactacatttaattggtccctcctcctttccagctattttgtcagaaagcaagtagggccatccagctgccagagtgctccacagggacttgaggcatgcagttgggaggtcctggctcggtttgctatatagggaatatataaggaacatcgaaattgtatacaaagatttgtacataaaaaatatacaaagacgcttcctaaagtaccaactttatatcatatgtttatacaatttaatttaaaaattcattttaaggaagacagataatttgaaagacttttgtttttcttgacttaattcatgaagtatcattttttgactgagtctccatttacttcattcttatgattattgtcatccctttaaatctgtgcctttttcttcttgagcgaagctgtttgagtaaacctgttgaaaattgttggggccttttggtgcttttt

SEQ ID NO: 20256 - DNA, 733 bp, Homo Sapiens
gattgaggtaaataaaaaagctttatccagcaacacggagataagagtctgtccaacccgacaagttccagaccccaccctgccctcacatcaggctcttccggtactgactgtgcggggtggtctgtctgaggtgggagtccggggtctgcaggtccatctgtctgtacaggtctctcagctccctgacctcctgcagcaccctctttgcctggctccaattcgatgatgcctctcccagcagccgttccgtctccagcagcagctgctctgactcagaatccggcggagaccgaggggggtccttggcctttcgcttcccatctcccagtccctgaacctctgccagaagctcctgagtctcctccagtttccttgctaccaggtcctggatccgggacagctgccccgggttggggagggcaggggttgggggttcctcagcccgcagctggagggtgcgggcagaggcagcatcccgctgagataggatctcctccagggaggcgcagcggcctttctctgtgggcgtcaacttcttgggtgcctggggggtgtaggtggcccctttgtctgttttttcccaaggtcgggagagactgcttgcccggtctgcggagggctggatgcggtctgagtccgctctccgctggctccctgccagctgggccacagacttgtccaggtcaacccgaatagctctcagcacaagaggttgttcctcaggggaaag

SEQ ID NO: 20257 - DNA, 1229 bp, Homo Sapiens
  misc_feature (758)..(779): n is a, c, g, or t
  misc_feature (1167)..(1175): n is a, c, g, or t
gcacgaggggttctttcaaagcagcacagctcatccatcaatgcggtggcgtggtcgccctctggctcgcacgttgtcagtgtggacaaaggatgcaaagctgtgctgtgggcacagtactgacggggctctcagggctgggaggaccccagtgccctcctcagaagaagcacatgggctcctgcagccctgtcctggcaggtgatgtgctgggtatagcatggacctcccagagaagctcaagctatgtggcactgtagctttgccgtgaatgggatttctgaagatttgactgaggtctctcttggcctggaagaataacactgaaaaaacctgacgctgcggtcacttagcagaggctcaggttcttgccttgggaaacactactagctctgaccttccatacctcacttgggggagcacagggccccgctgggcctcctcaccaacggcagtgccaaaatcagcccccacatcaaggtggtgttctctgtgctttctctcgtccttccaaagtcggttctggcctaacgcatgtcccaacaccttgggttcatttgcccggtgaactcactttaagcattggattaacggaaactcccgaactacagacccctccctggtgggttgcatgaatgtgtctcattactgctgaaatgtcctcacatctcttccactgttcttcagagctttctggctctctttcccccacaaaattcgacatatttaaaaatctccgtgtggctttaaaaaatggnnnnnnnnnnnnnnnnnnnnnngaggtgggagaggatgtgtgaaaatcttttccagggaaatgggttcgctgcagaggtaaggatgtgttcctgtatcgatctgcagacacccagaaggtgggtgcacactgcatgcttgggggtgccaagggattcgagacctccaacatacttgtctgaaggtggtgattctggccatggcccctctgccaagcctgtgtgcgatgcccttggtgctttagtgcaagaagcctaggctcagaagcacagcagcgccatctttccgtttcaggggttgtgatgaaggccaaggaaaaacatttatctttactattttacctacgtataaagttttagttcattgggtgtgcgaaacaccctttttatcacttttaaatttgcactttannnnnnnnncttccatgcttgttctctggacatttggggatgtgagtgttagagctggtgaga

SEQ ID NO: 20258 - DNA, 821 bp, Homo Sapiens
gcacgaggacagctcccttcccaggacgtgaaaatctgccttctcaccatgaggcttctagtcctttccagcctgctctgtatcctgcttctctgcttctccatcttctccacagaagggaagaggcgtcctgccaaggcctggtcaggcaggagaaccaggctctgctgccaccgagtccctagccccaactcaacaaacctgaaaggacatcatgtgaggctctgtaaaccatgcaagcttgagccagagccccgcctttgggtggtgcctggggcactcccacaggtgtagcactcccaaagcaagactccagacagcggagaacctcatgcctggcacctgaggtacccagcagcctcctgtctcccctttcagccttcacagcagtgagctgcaatgttggagggcttcatctcgggctgcaaggaccctgggaaagttccagaactccacgtccttgtctcaattgtgccatcaactttcagagctatcatgagccaacctcaccccacagggcctcagtcgccaccatgtgggcctctccagtgcaaaccaccgagcattccaccatgaccggtcacagctacaaatccagagaccatcaatcctgctagagtgcagggtggcaagcacccaagggtggctgaccaagactgcagagtctcctccatcttcaggtccattcagcctcctggcatttaactaccagcatccagtggtccccaaggaatcccttcctagcctcctgacatgagtctgctggaaagagcatccaaacaaacaagtaataaataaataaataaactcaatgcagacac

SEQ ID NO: 20259 - DNA, 1256 bp, Homo Sapiens
gcacgaggatgacccaccaatgcccggcctatagaaatcaatctttttgactcttctcacttttatctccccatgcccaaggtttgcctgttccataacactcactcccttcccccttgctaatcagaagccatctcctctcagtgtctgatctctgctcttcatacatgattacagtcatggggtagagagtgcttgctaaattatgcagttaatcctatggtgctttaattttcaggccttcaaaaaacacttgtacagtgatgtgcagatttttaaacagttgaacttccttgtactacagtttttgtattgacagccaaatttgtctttcattcttcagattgtgaataaagtgatttttacagggcttccagcaaagtttttcctttcatctaaggcttgtagaaccctagcttatatagctgcttacatgagaaatgcaaaatctgtattcaccatgactttagtaacaaaggtaaagttttttagtagtgccaaggcaagaggaacaatcttggtggtagtactaagttttgtcaatattgtggtttcctgattgtattgttggctttctctctgagcattgaggtatactagaagtagagcttctcaaacataatatcattacctcataagcattaacaaatcaggcccaaagagcgtaagtcctagaaatttgttttaaagcagccctagtcatggtgctggtgctaccgccttgttttaggagcctgcctcctgtcagtatgaaaccctcacctgaaaaatgccagcctggacaccaaacactgagccccttcaacaggcacattatttccccctgagatccataagggaatttagtttctactattgtagagttctgaaaagaggtaaaatagtagtcctttggtcatcctatttttgctttcaattttgatatttcagactgtaaaaggccttgggggatgatagtacatgtggtagcagtaatttttttgaagcaactgcactgacattcatttgagttttctctcattatcagattctgttccaaacaagtattctgtagatccaaatggattaccagtgtgctacagacttcttattatagaacagcattctattctacatcaaaaatagtttgtgtaagttagttttggttaccatctaaaatatttttaaatgttctttacataaaatttatgttgtgttttaaaatccttaggggctttatctatttttctaagtcagttaactgtacttctaaaaaa

SEQ ID NO: 20260 - DNA, 1307 bp, Homo Sapiens
  misc_feature (221)..(258): n is a, c, g, or t
  misc_feature (362)..(394): n is a, c, g, or t
  misc_feature (788)..(805): n is a, c, g, or t
atttaaaaaaaactttattaatttctgtaatcaaacccagggaaaaaaaaccttacatatttaatacagggggttacccctggacaaagggaaaaaaattaagtttaacgtttctagaccaataggggtgttaatttctggacaaggccaactcaacacagtaaaccgggatactttttccaaagttgacagcacagctaaagtttccaaaaattcaaatnnnnnnnnnnnnnnnnnnnnnnnnnnnnnnnnnnnnnnaaaagaccaatagcagtatgttatgcatcaatagcagcaacagcttttccaggttctgcagtcatctgaataaaattatagagacatccagcacactccatttnnnnnnnnnnnnnnnnnnnnnnnnnnnnnnnnnccccagaaaattgcaaagttctgttacggttgtggtacctggcaccgttttttaaaattagcttcggaatcatcatcgggaaagaaaacattctagaataacatcattaaaaacagctctgataaagcacggtcactactacgtatcataaagcaggtacaagatattttacattcacagaggtatgatacagtactgtcctatatctataatactagaggatacaattaaaaaggcattatttgagacttgattctacttttccagcagagggcccaaaggatggcatgacacagctctgtaaagaaatgcaccttcttaggatttcctttaattagtggcacagttctaggtactcactgttcttcataaacaccagctaaaaactggtatnnnnnnnnnnnnnnnnnncccccaaatcatgggattcatacaaagatgactgagtgggggcaaggaagactcaacctaaccagcattttaccaaatctgtcatgtttgaatcgtgagagctccatggaagaaaggagatgctaagtagcgcttcaaagcttcagaccacaaccaaaacacagcaccatttcaaatagaagcagtagccaaacactgctcactttgatatggttcaaggatgctgacatcaatatttatctgctcattcatccaggaagaaggggacatcagttactactgtactttgattgtgttcaactcaatcaccatgttataaaaatagcaagctgccataataaaaaataaggctcctctatccagcaccagttatcttcagttctttacctccaagcctacaaatgccataaccatatccgaagaacataagggagcaaaaaaaccgcatctgatgtagtagctgggaccatcacactgttcaggctgagctattccctcgtgc

SEQ ID NO: 20261 - DNA, 795 bp, Homo Sapiens
ctatttgatatttattaaacttattttccccaactatggtttggcattgtacaaagcatcttaatgacacagtaaagttaaaaaaatctttacaaattgaaatgtgatacccttgtctccaaatattttaattgccataaatttgtttaaaaatacacattaaacgcatgtttgacactctaaactttctatactctcaataccacaaaatacatataatatactatacagatggggaaaaatctagttagtatataatactttgctcaccattaacagctttatcgggtgaaatgcacatactgacttaaaaatcctagcttttgagccccaaagtacctctgaaattgtaatgtattgcaacaaataaaaatcacagtatataattgaaattctggttgaaaatgtcaaatgcctaaatattttggataaaagaaatgtaaaacaaagatttggttcatgtacaaaacaaaggcatccttatcagtcactaacagtacctttctgcaaaatcaacaggcttttaatttatcagtgacattatctcccctccaaaaccctccccaaatatcaaacaattatataccaaataattttaatttcaaataaaaggattttcataaatatataaagcttttccatcctccatatacaaaatttcttaaaaccattcaaaacggaggctaaataaaaattttcataactgtgcttaccaccccacaactggcccttaaagggggtgctttcaggcaatgtcaactggccagttctgttgtgagccccctaccccacccc

SEQ ID NO: 20262 - DNA, 1524 bp, Homo Sapiens
gcacgagggccccgtctcccttggcttttacgtcccatatccacccccattcatgtacaacatgtgaaatataaaaatctcatttcttgtcaaaatcagcactgcttatttgcatactcagcatcggatcagtgagtagttttataaaaaatccacgcacccaactcccttagttaaaacagattcttaattcataccatgaattcttaatttctgtaccatctatgttaatgatctgctgaaggtgactcaagattttcaaggtgtaatacagtttgatcatgtaccggacctggatatttaattttttttccctcacagttaatctcctccttgataaagcaataacactgctttgagtctgttgcctaatagcatgtcagaatcctctcctggatggtgattttataggaaagtttgtatgcatatcacccagtctatcttttaaaaattaagaaatttaaatgtatgctggaagtaatgacactatattgtggcattttattttaaaaattggggaaagttgcatatttttttaaaagtaagtgtttgagtaaaaaaattgaaggtacttttttaaggaaaaaaatttatatgccacagtttacatagacatttcagattcaacacgtactcttgaatataatggtttcttttacttggtcaaaatgcatgtatagcatttctttcatcttagttccttgtgtttgcctatgtggtcctttatatattttttattgtatcgaagaaacaaaactatcttcaaaaataagttaatttggatatatttgtcatatcaaactacaaagtgtacaaagttaagtttagcccttttctagaaagtgatctttaaaattaaaaatgctcctcttttaaattcaccaaatttatgtgtgggaaggcaccaaaatgattttgtaagtgccactgcaatattccctttcaagtgtggcctaaatttcaatcttaaggatggaatgcatgtctgctccttgttctgaaaaatgtaggcatctactacattttaaaacacagtgaaacatatacataagcctataaaaaaagatttgtgcaatttgaaagcctgttaattttttatgtagacatacctacacacgaaagggttaaattcacagccttactagttccttgcttccagtatttcaattggtctcctcccctcattattattattactactagtactattatttttgcacatagttaactgcccttcaatatgattcttaaaaagtgctgtttctgtggtatcgtattctctaaataatcatatttaattttttaaaacaaggttgcagtttctaattgtttcgttcctgtgtttttgctggtgtgtaataaaagcaagttttttcttttcatggttatttaatacattagctgcctgtaaataattcttgttataatgctctggaatgtgttgtagaagttgtattagattagttttaaacccttgtttgaaagccacattgttttggttatttctattaaattagaaaattg

SEQ ID NO: 20263 - DNA, 1317 bp, Homo Sapiens
gcacgaggcccgtgactgcctgggcgcggggaactgaaagccggaaggggcaagacgggttcagttcgtcatggggctgtttggaaagacccaggagaagccgcccaaagaactggtcaatgagtggtcattgaagataagaaaggaaatgagagttgttgacaggcaaataagggatatccaaagagaagaagaaaaagtgaaacgatctgtgaaagatgctgccaagaagggccagaaggatgtctgcatagttctggccaaggagatgatcaggtcaaggaaggctgtgagcaagctgtatgcatccaaagcccacatgaactcagtgctcatggggatgaagaaccagctcgcggtcttgcgagtggctggttccctgcagaagagcacagaagtgatgaaggccatgcaaagtcttgtgaagattccagagattcaggccaccatgagggagttgtccaaagaaatgatgaaggctgggatcatagaggagatgttagaggacacttttgaaagcatggacgatcaggaagaaatggaggaagaagcagaaatggaaattgacagaattctctttgaaattacagcaggggccttgggcaaagcacccagtaaagtgactgatgcccttccagagccagaacctccaggagcgatggctgcctcagaggatgaggaggaggaggaagaggctctggaggccatgcagtcccggctggccacactccgcagctaggggctgcctaccccgctgggtgtgcacacactcctctcaagagctgccattttatgtgtctcttgcactacacctctgttgtgaggactaccattttggagaaggttctgtttgtctcttttcattctctgcccaggttttgggatcgcaaagggattgttcttataaaagtggcataaataaatgcatcatttttaggagtatagacagatatatcttattgtggggaggggaaagaaatccatctgctcatgaagcacttctgaaaatataggtgattgcctgaatgtcgaagactctacttttgtctataaaacactatataaatgaattttaataaatttttgctttagcacttggccccattgtagattgccctgtgcagtaaactttcaaggtgtcggctgcctcagattgcttcatttgctgggtgtggaaagagttgctatggccaggcatatgggatttggaagctcagcagaagtgacttctgctctgtggttgctgctccccggctttcacagacatggtatggcagccattcttttatctatttaaccaggaggatgctggggaat

SEQ ID NO: 20264 - DNA, 1299 bp, Homo Sapiens
gcacgaggccggtccccatggaggcgctggggaagctgaagcagttcgatgcctaccccaagactttggaggacttccgggtcaagacctgcgggggcgccaccgtgaccattgtcagtggccttctcatgctgctactgttcctgtccgagctgcagtattacctcaccacggaggtgcatcctgagctctacgtggacaagtcgcggggagataaactgaagatcaacatcgatgtactttttccgcatgccttgtgcctatctgagtattgatgccatggatgtggccggagaacagcagctggatgtggaacacaacctgttcaagcaacgactagataaagatggcatccccgtgagctcagaggctgagcggcatgagcttgggaaagtcgaggtgacggtgtttgaccctgactccctggaccctgatcgctgtgagagctgctatggtgctgaggcagaagatatcaagtgctgtaacacctgtgaagatgtgcgggaggcatatcgccgtagaggctgggccttcaagaacccagatactattgagcagtgccggcgagagggcttcagccagaagatgcaggagcagaagaatgaaggctgccaggtgtatggcttcttggaagtcaataaggtggccggaaacttccactttgcccctgggaagagcttccagcagtcccatgtgcacgtccatgacttgcagagctttggccttgacaacatcaacatgacccactacatccagcacctgtcatttggggaggactatccaggcattgtgaaccccctggaccacaccaatgtcactgcgccccaagcctccatgatgttccagtactttgtgaaggtggtgcccactgtgtacatgaaggtggacggagaggtactgaggacaaatcagttctctgtgaccagacatgagaaggttgccaatgggctgttgggcgaccaaggccttcccggagtcttcgtcctctatgagctctcgcccatgatggtgaagctgacggagaagcacaggtccttcacccacttcctgacaggtgtgtgcgccatcattgggggcatgttcacagtggctggactcatcgattcgctcatctaccactcagcacgagccatccagaagaaaattgatctagggaagacaacgtagtcaccctcggtgcttcctctgtctcctctttctccctggcctgtggttgtcccccagcctctgccaccctccacctcctcggtcagccccagccccaggttgataaatctattgattgattgtgcctcgtgc

SEQ ID NO: 20265 - DNA, 1322 bp, Homo Sapiens
  misc_feature (1154)..(1163): n is a, c, g, or t
gcacgaggtgcaagtgaaaatttagatttctattgacatccttttgttttctaattttaaaaattataaagatgtaaatggaattataaatactgtgacctaagaaaagacccactagaaagtaattgtactataaaatttcataaaactggatttgatttctttttatgaaagtttcatatgaatgtaacttgattttttactattataatctagataatatgatataagagggctaagaatttttaaattgaatcatatatatgatataatttgatccttcttgtatcttgaagttttgtacttgggatttctggactgataaatgaatcatcacattcttctggtaaatattttcttggagctctgtgtcaactttgatcctttgtctcccaggaaggtgtgacctctcctttgcctgcatacctcaaggccaggggaatatgcctcagtgatgcatttatctttgtatatcaggccgcatgattcccaactttctgccacacttaaattacgttcctccatttcagttttgtcttttctgtctaaagttcagtcaaagagtatcaaaaaattatgtttcagctagactggtgtaatgtataagtttttgtatcttgtattagaggatttcgtagcttttattagaggctcatttccacctcagcatacaagatcgttagtcttttggcatgtgtgccaattagaatactaaagcaagtccaagcacatttttctcttctcacgtttctaataagtgttagggactttgcctcttttacttaccacgtccccaaaagtgtcaggtagacatgtcacaaatggctctgtagagagccatgggaagagagaggaggtggatgtggaacataaagggttcagaaactccagaagaggagtgggttttggatagaagcatttgaggacagctgctccaaagccttatgtgtatgatgaaacttaaccacggggaagagactcttcagtagcctgttctgtctggtgatttttattttaagtgaacctttggatctatctttaactctctttattgtgagtctaaattccaattctgcagcagatcagtaaactcacagtatttttcctgtggaaatctattcaataaggaaaccaagacaggataataaaatttnnnnnnnnnncaactttgaattcccctgcctaggtcttccagttgttttccagcgcatacctcagtatgactttgctagccggggacaaaattagcaccttccgattctctagtccaaatgaactttgtggctaataaaaaattattatactacataataaagttacga

SEQ ID NO: 20266 - DNA, 1112 bp, Homo Sapiens
gcacgaggctcggatgccggcggtctctgctgaagagagaagatggcgcttgacggaccagagcagatggagctggaggaggggaaggcaggcagcggactccgccaatattatctgtccaagattgaagaactccagctgattgtgaatgataagagccaaaacctccggaggctgcaggcacagaggaacgaactaaatgctaaagttcgcctattgcgggaggagctacagctgctgcaggagcagggctcctatgtgggggaagtagtccgggccatggataagaagaaagtgttggtcaaggtacatcctgaaggtaaatttgttgtagacgtggacaaaaacattgacatcaatgatgtgacacccaattgccgggtggctctaaggaatgacagctacactctgcacaagatcctgcccaacaaggtagacccattagtgtcactgatgatggtggagaaagtaccagattcaacttatgagatgattggtggactggacaaacagatcaaggagatcaaagaagtgatcgagctgcctgttaagcatcctgagctcttcgaagcactgggcattgctcagcccaagggagtgctgctgtatggacctccaggcactgggaagacactgttggcccgggctgtggctcatcatacggactgtacctttattcgtgtctctggctctgaattggtacagaaattcataggggaaggggcaagaatggtgagggagctgtttgtcatggcacgggaacatgctccatctatcatcttcatggacgaaatcgactccatcggctcctcgcggctggaggggggttctggaggggacagtgaagtgcagcgcacgatgctggagttgctcaaccagctcgacggctttgaggccaccaagaacatcaaggttatcatggctactaataggattgatatcctggactcggcactgcttcgcccagggcgcattgacagaaaaattgaattcccaccccccaatgaggaggtttgtgatggacactgtgcaaagtggctctggctgtgggggtggggtgtggggctcaggcttttccttgccatctccaggccccggctggacattttgaa

SEQ ID NO: 20267 - DNA, 1626 bp, Homo Sapiens
  misc_feature (710)..(736): n is a, c, g, or t
  misc_feature (789)..(844): n is a, c, g, or t
  misc_feature (1246)..(1255): n is a, c, g, or t
  misc_feature (1299)..(1334): n is a, c, g, or t
aatagtatcattcatttgtacagagaaatcatttggatggatctatttacagtcttttctgattatcatttccactggccaaatatatttcacagaatagtcaacactgacttgaattgatcaccattataatcgggcttttactcctcctcccccctttcaaagatgatgatcccattttaacagaaacattttgtaataaaagattcaccagtctttttccatcttatgactaaatccaccaaaatttatctaatatggtcaaatttttaacacatttcattgtttcttttcaaactcattatttgcaggtattgcaaaccaaggcaaataagtccacgtcccctcgagccttctacaacttactacacgccctcaagttgagcttctcctatctcctttcacacttgtgaaatgtctggcacaaccagacattttacttgaagacaaaactactctcttttcctctctttttcttttaactcactaccaatcaccttccctcttgcatttcagacaacactaaaactttcaacaaaatctttgaagtggttttctttcagtagtctagaatacatcaagccatttcatgggtctttaccctgaaatgctacactttaaaaatggcaattttcttaattggctcaaaaacagtatggcttggtttcacttggtaaaattaatgtgatttaaaaaaatatatatatatnnnnnnnnnnnnnnnnnnnnnnnnnnntttttaatcaggaagaaaaatactttaaagacatgccaatttgaaaaggcatnnnnnnnnnnnnnnnnnnnnnnnnnnnnnnnnnnnnnnnnnnnnnnnnnnnnnnnntaatcggcaggttaaatgaatgtaaaatgaggaatgtacagtgaaaaacaaactaatataaagcattccagttgataaaaacctcctcaggcttatggtttgttttccaaggaaattatgtttcaatgtaaagtttgaaatactccagacatacattccatgtaggttttgggtgccaatgttaaaatttcaaattttgcatgcaaggcttagcaaagaaacactggcagaattccagcatttgcaaaattctaagttttggtgaatattgtaaatattacaattggtattagaaagccatgatgaatccagaattaagagaaaacccatttcataaatattttgtttgattaaaaaataccaggcttaccatgttctaaataactcaagaaaatatctttnnnnnnnnnnggactgcaatttaacagtaatctgtatatctttagctgccattnnnnnnnnnnnnnnnnnnnnnnnnnnnnnnnnnnnntgttacaactggtataaagtaaccctatgatgctccccttacgagaaaacaaaactgtacacatttataaacaaacagtctctcccatcagttaacacacagagccttctctacaccaaagtctctttccgtttgccaccagaaagggctttgtccctcgctcttcggatgccgggctgtgtctggtgtgtctttaagctcttgctgtcctctgccatctgcatgccagagccacatctgtaagcgttttcatcaacttctacctgagtaacactggaaactgtcctcgtgc

SEQ ID NO: 20268 - DNA, 904 bp, Homo Sapiens
gcacgaggcactgaatggcatggttgaaatgatggacaggcggccatattggtgtatatcaaggcaaagagtttggggtgttccaattcctgtgtttcatcataagaccaaggatgaatacttgatcaacagccaaaccactgagcatattgttaaactagtggaacaacacggcagtgatatctggtggactcttccccctgaacaacttcttccaaaagaagtcttatctgaggttggtggccctgatgccttggaatatgtgccaggtcaggatattttggacatctggtttgatagcggaacttcatggtcttatgttcttccaggtcctgaccaaagagcagatttgtacttggaaggaaaagaccagctcgggggttggtttcagtcatccttattaacaagtgtggcagcaaggaagagagcaccttataagacagtgattgttcatggatttacccttggagaaaagggagaaaagatgtccaagtctcttgggaatgtcattcatcctgatgttgtcgttaatggaggacaagatcaaagcaaagagcctccgtatggtgctgatgtccttcgctggtgggtagctgattccaatgtcttcaccgaagttgcaattggcccatccgtgctcaatgctgccagagatgatattagcaagcttaggaatacacttcgctttcttttgggaaatgtggctgatttcaacccagaaacagattccatctctgtaaacgatatgtatgtcatagaccagtacatgctacacttactgcaggatttggcaaacaagattaccgaattatacaaacaatatgattttggaaaagttgttcggctgttacggacgttttataccagagagctctctaacttttatttcagtatattcaaagat

SEQ ID NO: 20269 - DNA, 1093 bp, Homo Sapiens
gcacgaggcgcggactgtgccctcggcgggcacgcggaccggcggggtagggctagggcccggcttctctgggccaaggatcaaggtccctgcctgggttaggcccccacgcattccagtcttcggaacccggcctctgaagagggcgcagtagggccccagcggagcgcgagaacccgctctacagcctattgcttccccgccctgggcagagccacctggacatgagacccgccctcaatgccgaagcctctcggaagcaatctttcgggacggaagggggtgcacgtactcccaactgtggtcgcgctctcaccccttctgctgctctcgtggccccctcgcgatggcgggcatcctgtttgaggatattttcgatgtgaaggatattgacccggagggcaagaagtttgaccgagtgtctcgactgcattgtgagagtgaatctttcaagatggatctaatcttagatgtaaacattcaaatttaccctgtagacttgggtgacaagtttcggttggtcatagctagtaccttgtatgaagatggtaccctggatgatggtgaatacaaccccactgatgataggccttccagggctgaccagtttgagtatgtaatgtatggaaaagtgtacaggattgagggagatgaaacttctactgaagcagcaacacgcctctctgcgtacgtgtcctatgggggcctgctcatgaggctgcagggggatgccaacaacctgcatggattcgaggtggactccagagtttatctcctgatgaagaagctagccttctgaacctcgcctgaagccagcctctctgccaagtcactcaggtcatgggcattgttcaagcctgagtggcagccgctcttgctcacctgttgaggaagggctggctcactgtccaccgtggcggcatctttaactggcctccactcaatgggaaactgactcgcctgtgaaagacacagtgggagagctgaaaatgaatcagaagctttatgtatatgatttttaaattaaactttactttttcagactgcccctcccctttttgtaaaaagtccatttactgtaaaatcgtttttt

SEQ ID NO: 20270 - DNA, 1467 bp, Homo Sapiens
gcacgaggagcaaccagaggcttctaaacaacctaccctccttccccattttctgtggtccaactaccctcggcgatcccaggcttggcggggcaccgcctggcctctcccgttcctttaggctgccgccgctgcctgccgccatggcagagttgggcctaaatgagcaccatcaaaatgaagttattaattatatgcgttttgctcgttcaaagagaggcttgagactcaaaactgtagattcctgcttccaagacctcaaggagagcaggctggtggaggacaccttcaccatagatgaagtctctgaagtcctcaatggattacaagctgtggttcatagtgaggtggaatctgagctcatcaacactgcctataccaatgtgttacttctgcgacagctgtttgcacaagctgagaagtggtatcttaagctacagacagacatctctgaacttgaaaaccgagaattattagaacaagttgcagaatttgaaaaagcagagattacatcttcaaacaaaaagcccatcttagatgtcacaaagccaaaacttgctccacttaatgaaggtggaacagcagaactcctaaacaaggaaattttaagacttcaagaagagaatgagaaattgaagtcaaggttgaagaccattgaaatacaggctacaaatgcactggatgaaaagtcaaaactagaaaaagcactgcaagatttacagcttgatcaaggaaatcaaaaggattttataaaggcccaagacttaagtaacttaaaaaacactgtcgctgccttaaagagtgagtttcagaagacacttaatgacaagacagaaaaccagaagtcactggaggagattctggcgacagccaagcacgatctactcagggttcaggggcagctgcacatggctgaaaaggaattagaaaagaaatttcagcaaacagcagtttatcgaaacatgaaagagattcttaccaagaagaatgaccaaatcaaagatctgaggaaaagactggcacaatatcaacctgaagattaaaactgaagatttcctctggaagctaccacatgcaaacatacaagcagtctcacctcaggcatgtattttgaaaagcattttgtcatatcccctctccttatttttctaatatttagactttgaatatttagaactagagttcctattttcagctagttgaaaacagagaaaacctagtgattctgtctggtcatcccacacacctctctactgagtgctccagagtcttagctcacatgcactgagaattctttacagcaaagaagagatttttagagtgggaagaagaggcttatccttctgcattagtataaagagtctgtatttttaataaatgttaaataagctaacaatgtttgtacttatgcattccccatgggtaaaaataaataatggcattgttaaagatagttattccaaaaaa

SEQ ID NO: 20271 - DNA, 1406 bp, Homo Sapiens
gcacgaggggccccttgaaacgccgtatagctgccaagctccagtcatcccaagagcctgaagcaccaccacctcgggatgtggcccttttgcaagggagggcaaatgatttggtgaagtaccttttggctaaagaccagacgaagattcccatcaagcgctcggacatgctgaaggacatcatcaaagaatacactgatgtgtaccccgaaatcattgaacgagcaggctattctttggagaaggtatttgggattcaattgaaggaaattgataagaatgaccacttgtacattcttctcagcaccttagagcccactgatgcaggcatactgggaacgactaaggactcacccaagctgggtctgctcatggtgcttcttagcatcatcttcatgaatggaaatcggtccagtgaggctgtcatctgggaggtgctgcgcaagttggggctgcgccctgggatacatcattcactctttggggacgtgaagaagctcatcactgatgagtttgtgaagcagaagtacctggactatgccagagtccccaatagcaatccccctgaatatgagttcttctggggcctgcgctcttactatgagaccagcaagatgaaagtcctcaagtttgcctgcaaggtacaaaagaaggatcccaaggaatgggcagctcagtaccgagaggcgatggaagcggatttgaaggctgcagctgaggctgcagctgaagccaaggctagggccgagattagagctcgaatgggcattgggctcggctcggagaatgctgccgggccctgcaactgggacgaagctgatatcggaccctgggccaaagcccggatccaggcgggagcagaagctaaagccaaagcccaagagagtggcagtgccagcactggtgccagtaccagtaccaataacagtgccagtgccagtgccagcaccagtggtggcttcagtgctggtgccagcctgaccgccactctcacatttgggctcttcgctggccttggtggagctggtgccagcaccagtggcagctctggtgcctgtggtttctcctacaagtgagattttaggtatctgccttggtttcagtggggacatctggggcttatggggctgggatgaggagctggatgattctaggaaggcccaagttggagaatgatgtggagagtgtgccaagacactgcttttggcattttattcctttctgtttgctggatgtcaattgacccttttattttctcttacttgtgttttcagatattgttaatcctgccagtctttctcttcaagccagggtgcatcctcagaaacctactcaacacagcactctaggcagccactatcaatcaattgaagttgacactctgcattaaatctatttgccatttc

SEQ ID NO: 20272 - DNA, 1067 bp, Homo Sapiens
cgtccgagagaaggatgtggcagatggaaatgtctcggattttgataatgaagaagaggaacagtcagtccctcccaaagtggatgagaatgacacccgtccagatgtggagccaccactgccattgcagatccaaatagccatggacgtgatggaacgctgcatccacttgttgtcagataaaaatctgcaaatccgcctgaaggtcttggatgtgctggatctgtgtgtggttgttcttcagtcccacaaaaaccagctgcttcccttggctcatcaggcctggccctcgctcgttcaccgactcacacgggacgcccccctggcagtgcttagagccttcaaggttttacgtaccctgggaagcaagtgtggtgactttcttcgcagccggttctgcaaagatgtcctgccaaagctggctggctccctagtcacccaggcccccatcagtgccagggctggaccagtttactcgcacacgctggccttcaagttgcagctggctgtcttacagggcctgggccccctctgtgagagactggacctaggtgagggtgacctgaataaagtggctgatgcctgcttgatttacctcagtgtcaaacagcccgtgaaattacaagaggctgccaggagcgtcttcctccacttgatgaaggtggacccagactccacctggttcctcctgaacgagctttactgccccgtgcagttcacacctccccaccccagcctccaccctgtgcagctgcacggggccagcgggcagcagaacccctacacgaccaacgtgctccagctgctcaaggagctgcagtgaccctgctcccccaccacagaggccaccgatccctcccctactgccagccagaagctgggctgaccccaccccggccataggcggtggcagcgggcagcagagaaggtgaattagttagccaatcgatttataaattgatcgatcacacaactgcttagaaatggattgaaggaaagtagctgactattatttatggttcataccttgtgttttcaagtgacattgtctggtggctctaagggtt

SEQ ID NO: 20273 - DNA, 761 bp, Homo Sapiens
  misc_feature (612)..(620): n is a, c, g, or t
cccacgcgtccggttatgggacaaaaatcaattatctcattaatgttttagtctgctgcacacatctaaaaaagcaaaatggcaataaaatcataacagtgaaaaagttctgaagaagtatgtattaaatgtatgcatcaaaatactgttcatcatatagcagtcccttagccttcactgagtctacttagaggctaacagaaaaccttagaaggaagatgagttgaaaaaggccacaatcaagtttgcttacatataaaagcaggagttggtaatgttttattcttaaagacttcacctttggaacttaaaataagcaatatattcattaaagaaatagtttaattttgcaatacagataatctttaaattttttgtctataaaatatttaaagaaatattctaaggatcttaaagtaactttgggagggacggggaaggacaaagggactgaatttttatgttctggcctctgatcagtgcttttagtccaatccagtcaagtaagtaaaggttcataaaaaaaattgttttataaaatcctagtgatgaaaaaaactttccagcctagcctcatcccatccaagaaaaatactgagaaaacagcttgtnnnnnnnnnggtaataaaatcaaattatactcataaaactctacacttaataacaggaatacataatatatataatataaaaataattaccatttattccatacctatcatttccaaggcactgtacactgtaccaagatgctttacaat

SEQ ID NO: 20274 - DNA, 1010 bp, Homo Sapiens
gcacatcccttttcactttacagtacatttgactatagtgcacaacatgattccgagtcaaaacagtggcccattgggcactgagcttctgattggtgtagggcagtccaatcagtgctggtgtcactgggttaccccaaccatgtccggccaaaatggcactacccagtggtagtgaaccatctaattaaaaccaaaactcccccagggaaaatgctacactatcagagtcagtcttgagtcagatctttatttggtgctccatccagatatatttttagtgctttctctttacgaggtgagtatgttacacgatgtccagtcttctggagtcgactgctttcttttttcatcagttcatttctttgctcatctgtcaattccattaattcttctgttttatccctataaaatatgaccgcaccatcatcacagatataaagaggccagacattcagggtagaaactttaggattccagtctaaatcttgatgaatatcaaggacagaaatatcacagggaaatgttcctctacccttagcaaattcaatatcatccaaaggaatcccactgatttcactaagcttctctcgcaattcgtccacactactgctttccaatacaacctcctggaagggatccaacttcatctctgaaggcttccaccgtcttgacaaaactgcaagctgtgacatggacttcatcttctctaccccatcaagaacttcaaggaaaacctcccagttgctggaaatattaatatcttcttcataaatatgataatccaaaaagacagtgccaggattcttccatgtttttttccttagacgaaacctgtcaatactgagctctaaaccacattgctccctgagctgaggaattaattcctcttttgattgccgtacagtcattcctttagcaaacacagcatctagcagaaacttgcatggctcttgttcattgaccaaaagctggtatactttaactctgtattctccttttcctcgtgc

SEQ ID NO: 20275 - DNA, 818 bp, Homo Sapiens
gcacgagggggactccctgggagatgaggccgcgaggtctcccgccgctcctggtggtgctcctgggctgctgggcctccgtgagcgcccagaccgatgccaccccggcggtgacgacagagggcctcaactccaccgaggcagccctggccaccttcggaactttcccgtcgaccaggccccccgggactcccagggctccagggccctcctccggccccaggcctaccccagtcacggacgttgctgttctctgtgtctgtgacttatccccagcacagtgtgacatcaactgctgctgtgatcccgactgcagctccgtggatttcagtgtcttttctgcctgctcagttccagttgtcacgggcgacagccagttttgtagtcaaaaagcagtcatctattcattgaattttacagcaaacccacctcaaagagtatttgaacttgttgaccagattaatccatctattttctgcattcatattacaaactataaacctgcattatcctttattaatccagaagtacctgatgaaaacaattttgatacattgatgaaaacatctgatggttttacattgaatgctgaatcatatgtttccttcacaaccaaactggatattcctactgctgctaaatatgaggtgagcctgaacttgattgattcttttcatcccatcacaaatatctttccttgtaagttaattttcaaggttaccaggaaaactgggttccttgagacagagttgatattatagactaaaaaacttaatgttcatgcctacaaatcaaagatcatgaaaattaaaactgaa

SEQ ID NO: 20276 - DNA, 1525 bp, Homo Sapiens
gcacgagggaactgtttaaccctgttagtttagactgtaagctaaggcaaaaagcaattgcagaagttgatgtgggtacagataaggcccagaattctgacccgatacttgatacttcatcactagttcctggatgttcctctgtagataacatcaagtcatctcaaacctcacaaaaccagggacttggacgtcctactcttgaaggtgatgaagagacttcagaggttgagtacacagtgaataagggcccagcttccagcaatagagacagggtaccaccttcatctgaagctagtgagcatcacccgcggcatcgtgtttcaagtcaagcggaagatacttccagcagctttgacaacctgtttattgacaggttacagaggatcaccattgcggaccaaggtgaacaacagtcagaagaaaacgcaagtactaagaacttgacaggcctttccagtgggactgagaagaaacctcattacatggaagtgctagaaatgcgagccaaaaacccagtgccccagctgcgtaaatttaaaaccaatgtgttaccttttcgacaaaatgattcatctagtcattgccagaagagtgggtctcctatttcctcagaagagcggcggcgcagggataagcagcatcttgatgacatcacagcagctcggcttctaccacttcaccatatgcccacgcagctgctctccatagaagaatccttggcacttcagaaacagcagaaacagaattatgaggagatgcaagcaaagctcgcagcgcaaaaattagctgaaagactgaatattaaaatgcggagttataatccagaaggggagtcttcagggagataccgagaagtaagggatgaagatgacgattggtcctctgatgaattctgaagataatctcctaaatcactgacgttgagatgtcatcatcttacatcagactttctaactagtatcaagatcagtgtcagatattgttgagggaagtaattttataaagttacacaaaggtagttataaaaaaagcccagtttgtctttcagaaggtgactttcatgtgcttgaaaagtttaatatttgaatattgtgtttaaccacatggtattaaaattttgcaatatattgtgtattggtctgatattttagtatatagtagaacatacttttttttctttaagccaaatgaaaagaggtaactttgcttttttcctttttcttacctatcaaatagcatttattacatgtctttcagtgaaatacttagttgttccaggcacctaaaatcaattaggaagacatagttcccttcttttttgggtaatgaagggagcagtctaaagaattgtatgcatgtttgcatggggttattgagacattggatgtgaaatacctaggaagacatgtatggagaatgcttaacaaatgctcttctcctttttctgtcttcccttaggaagaacgttatctctcttctgattaggaaggacttcccttttgagtagatgctggaaagtgga

SEQ ID NO: 20277 - DNA, 860 bp, Homo Sapiens
  misc_feature (78)..(89): n is a, c, g, or t
  misc_feature (216)..(232): n is a, c, g, or t
tttttttgtgtttattttccaaacaattttattgaaatgtgccaagagtacatgggcagcacaaatgtatgaacaggnnnnnnnnnnnntcacatgtacaataattttttaaaagtgaaggttaatcttgggagataacagttcccctctccctccccctgcagatttccagcgtttccattaaggttaagtaagcctctacaaacctagcatttnnnnnnnnnnnnnnnnnggaatacaagatcttttgcaaataacaaaaacaaaaaatggcataaaggaaagagaaatgtcttcctgctcagatgggactcttcctaggcacctaattaggaggcgtgctgagcagtggagaaacacaacttcagagtgtaagggtatggaccatttgggtttttcatctggtaatggttcaggaagcccagagtctccagggcatcgctcttggattcccactccagcagtccagaggagctgcgctcacttttgcctgagaatactttcacagaagatggccgcttcactcccagctcatcgcagatctcaaagaagttctcctcggtcacctccagcggggcgttgaagaagtgcagcacgttgctggggtgctggatgcggttcttggctgcctgctctggggtggagaaccgattgttccgggattcactgaagtctttgtaactgcaagacccgtcttccaacccgtatgactgaccaggcatgatggctggctgcttggagacacagacattcagcttctgcccaaacatgaagttgttgttgaggtgggtaatggcccggtctacagcgtagccatcagccatctccaccatggcggcccccggcttgcttttcatgaa

SEQ ID NO: 20278 - DNA, 2661 bp, Homo Sapiens
  misc_feature (924)..(937): n is a, c, g, or t
  misc_feature (2057)..(2068): n is a, c, g, or t
gcacgaggcgctcctctagttccacaatgtccacgggcggagacttcgggaatccgctgaggaaattcaagctggtgttcctgggggagcaaagcgttggaaagacatctttgatcaccagattcatgtatgacagttttgacaacacctatcaggcaacaattggcattgactttttatcaaaaactatgtacttggaggatcgaacaatcaggcttcagctgtgggatactgcgggtcaggaacgtttccgtagcctcattcccagttacatccgtgattctgctgcagctgtagtagtttacgatatcacaaatgttaactcattccagcaaactacaaagtggattgatgatgtcagaacagaaagaggaagtgatgttatcatcatgctagtaggaaataaaacagatcttgctgacaagaggcaagtgtcaattgaggagggagagaggaaagccaaagagctgaatgttatgtttattgaaactagtgcaaaagctggatacaatgtaaagcagctctttcgacgtgtagcagcagctttgccgggaatggaaagcacacaggacagaagcagagaagatatgattgacataaaactggaaaagcctcaggagcaaccagtcagtgaaggaggctgttcctgctaatctcccatgtcatcttcaaccttcttcagaagctcactgctttggcccccttactctttcattgactgcagtgtgaatattggcttgaaccttttcccttcagtaataacgtattgcaattcatcattgctgcctgtctcgtggagatgatctattagcttcacaagcacaacaaaagtcagtgtcttcattatttatattttacaaaaagccaaaatatttcagcatattccagtgataactttaaaaattagatacattttcttaacannnnnnnnnnnnnnaatgttatgataatgtacttcaaaatgatggaaatctcaacagtatgagtatggcttggttaacgagcggtatgttcacagcctactttatctctccttgcttttctcacctctcacttacccccattccctattaccctattcttacctagcctcccccgacttcctcaaaacaaacaagagatggcaaagcagcagttctaccaagcccattggaattatcctttaattttacagataccacttgctgtaggctacggaccaagatgtccaaaattattcttgagcactgatataaattacggtcttctttgaggtcaaaattctcccatcatggaaagcagtgcttgaatgagaaaaggctcctggtgcatcttccacatgagtcctaacgaacatactgaatacttacaagtataagaacattttatgtatttctgactaaaacaaatggctctttcacatgtgctttattagactctgggagagaaaattaaccaagtgcttcagaacaggtttttagtatttaattcttcacggtaagaaaatgaagttctaatgaactgtttctcccaaggttttaaaattgtcaagagttattctgtttgtttaaaaaataagaaacctctttaagcaatagattttgcttgggttttcttttttaaaaacataatactgtgcaggcaaggcactgtaaaagttttaattccttccagaagaaccagtggaagaatttaaatttggcgctacgatcaaaactactgaattagtagaaataatgatgtctaaagcttaccaacaaaagaaccctcagcagaataacaaaaactttgctcaggacatttgaggtcaaattgaagacggaaaccggaaaccgttttcttgtaagcccctagaggcagatcaggtaaagcatacatagtagagggaaaggagagaatggaaataaaactcaatattatgcagatttatgccttattttttagcattttttaaggttgggtctttcaggctggttttggtttgtattagatctgtatagtttaattaactggtgatttagttttatatttaagctacaattaatcttttttctttggtgatatttatttctttgccnnnnnnnnnnnnaacaactttcaatcttcagatgtttcgttgaatctatttagagcttcaccatggcaatatgtatttcccttaaaacactgcaaacaaatatactaggagtgtgcccttttaatctttactagttattgtgagattgctgtgtaagctaataaacacatttgtaaatacattgtttgcaggacgaaaacttctgagttacagctcaggaaaagcctgctgaatttatgttgtaagcattacttaacacagtataaagatgaaaagacaacaaaaatatcttcatacttcctcatcccctcattggaacaaaaccttaaactgggagaaccttagtcccctctctttcctcttcctcctccacttcccacttattgtcaccttgtaatattcagagagcacttggattatggatctgaatagagaaatgcttacagataatcattagcccacataccagtaacttatacttaaagatgggatggagttgtaaagtgcttttataatacaatataattgttaaagggcaggggtgactctttgttttattttgacatggcatgtcctgaaataatattgattcatatggcaaaaaa

SEQ ID NO: 20279 - DNA, 1244 bp, Homo Sapiens
gcacgaggtcctcaggcctgacggtccgagtggagctgcgggacagcccgaacctccaggtcagccccgcggccctccatggcgctggtgcgcgcactcgtctgctgcctgctgactgcctggcactgccgctccggcctcgggctgcccgtggcgcccgcaggcggcaggaatcctcctccggcgataggacagttttggcatgtgactgacttacacttagaccctacttaccacatcacagatgaccacacaaaagtgtgtgcttcatctaaaggtgcaaatgcctccaaccctggcccttttggagatgttctgtgtgattctccatatcaacttattttgtcagcatttgattttattaaaaattctggacaagaagcatctttcatgatatggacaggggatagcccacctcatgttcctgtacctgaactctcaacagacactgttataaatgtgatcactaatatgacaaccaccatccagagtctctttccaaatctccaggttttccctgcgctgggtaatcatgactattggccacaggatcaactgcctgtagtcaccagtaaagtgtacaatgcagtagcaaacctctggaaaccatggctagatgaagaagctattagtactttaaggaaaggtggtttttattcacagaaagttacaactaatccaaaccttaggatcatcagtctaaacacaaacttgtactacggcccaaatataatgacactgaacaagactgacccagccaaccagtttgaatggctagaaagtacattgaacaactctcagcagaataaggagaaggtgtatatcatagcacatgttccagtggggtatctgccatcttcacagaacatcacagcaatgagagaatactataatgagaaattgatagatatttttcaaaatacagtgatgtcattgcaggacaattttatggacacactcacagagacagcattatggttctttcagataaaaaaggaagtccagtaaattctttgtttgtggctcctgctgttacaccagtgaagagtgttttagaaaaacagaccaacaatcctggtatcagactgtttcagtatgatcctcgtgattataaattattgggatatgttgcagtattacttgaatctgacagaggcgaatctaaagggagagtccatctggaagctggagtatatcctgacccagaccctacgacattgaagatttgcagccggaaaagttta

SEQ ID NO: 20280 - DNA, 1491 bp, Homo Sapiens
gcacgaggtgaaagactactgagacaaaatgctgagctgacagggcatatcagtcaactgactgaagagaagaatgacttaaggaacatggttatgaagctggaagagcagatcaggtggtatcgacagacaggagctggtagagataattcttccaggttttcattgaatggtggtgccaacattgaagccatcattgcctctgaaaaagaagtatggaacagagaaaaattgactctccagaaatctttgaaaagggcagaggctgaagtatacaaactgaaagctgaactaagaaatgactctttacttcaaactctgagccctgattctgaacatgtcactttaaagagaatttatggtaaatacttgagggcagaaagttttcgaaaggctctcatttaccagaagaaatacctgctgctgttactgggtgggttccaggaatgtgaagatgccaccttggccctgcttgcccggatgggggggcagccagctttcacggatctagaggtgatcaccaatcgcccaaagggcttcaccaggtttcggtcggccgtcagagtatccattgcaatttccagaatgaaatttttggttcgacggtggcatcgagtcacaggttctgtttccatcaatattaacagagatggctttggactgaatcaaggtgcagaaaagactgactcattttatcattcttctggtgggctggagttatatggagaaccaagacatactacgtatcgctcaagatcagatctggactatattaggtcccctttaccatttcagaataggtacccaggcactccagctgatttcaatcctggttctttagcatgttctcagcttcagaattacgatcctgacagagccctaacagattatatcactcggctagaggcactgcaaagacgacttggaactatacagtcaggttcaactactcaatttcatgctggcatgagaagataatcctttgaaacatcattaattgaagtgattttaaatagatttccttttgtaaatcaatggttcttttgtgcttttgtattgtgaatattcaatgggaccaatatgaacacagcttatgattgtatacaaatcccttgccagcacatgaaaacaaactggaatttgtatatataagcattgtgtatgtattcatgcacaataattattgaattacctgtatatttgtggaatgctaatttaaaacattaaattataaaccttgtgtatttatcaaatgggtgaaaagattaaacttttacgcattacaatactgctgaatgtgtagctcgaggtgtcctgcacttttcttataaggctactgaagttacatgttttgcctaatatattctactggtgatgaagacagataatatcacttgtagagacctatttttgtataatggtagaagttttgaattttatggggtattttgtcaagtactgaaataaaaatgacttcaccattttcaccac

SEQ ID NO: 20281 - DNA, 899 bp, Homo Sapiens
  misc_feature (702)..(755): n is a, c, g, or t
ttccagcccgggtgactgtcctttagttcccaggtgagtcagaactgccacaatggcagctatgaaatcagcgtcttgatgatgggcaactcagcctttgcatagccatcctgaagagaactgagtgccagttcctttatgaagtgagaggagaaacatacttaaagggaagaggaaatgagactacctactggctgactgggatgaaggaccagaaattcaacctgccaacccctcctactgtggagaatcaacaggtttgcaagcagaattttcagacatgattgccaactctttacagaaaagacaggcagcagggataagaagccaaaaacccagacgggtagccagctataaaaaaggcactctggaatacttgcagctgaataccacagacaaggagagcacctatttttaaacctaaatgaggtataaggactcacacaaattaaaatacagctgcactgaggcagcgacctcaagtgtcctgaaagcttacattttcctgagacctcaatgaagcagaaatgtacttaggcttggctgccctgtctggaacatggactttcttgcatgaatcagatgtgtgttctcagtgaaataactaccttccactctggaaccttattccagcagttgttccagggagcttctacctggaaaagaaaagaaatgaatagactatctagaacttgagaagannnnnnnnnnnnnnnnnnnnnnnnnnnnnnnnnnnnnnnnnnnnnnnnnnnnnnctggctttccttctgtattcataagattttttaaattgtcataattatattttaaatacccatcttcattaaagtatatttaactcataatttttgcagaaaatatgctatatattaggcaagaataaaagctaaaggtttccc

SEQ ID NO: 20282 - DNA, 1525 bp, Homo Sapiens
gcacgaggctcgcatcctatacaaccctttacaaggccagaaatgtattgttcaaacaacttcatggtcccagtgctcaaagacctgtggaactggtatctccacacgagttaccaatgacaaccctgagtgccgccttgtgaaagaaacccggatttgtgaggtgcggccttgtggacagccagtgtacagcagcctgaaagtaagttccttcagggacgtgtagactgttgcctggcaggtgggtgggatgtgaacatctttttgaagaaagagaaatatcacccctaactttccttctctcctttctcttacagaagggcaagaaatgcagcaagaccaagaaatcccccgaaccagtcaggtttacttacgctggatgtttgagtgtgaagaaataccggcccaagtactgcggttcctgcgtggacggccgatgctgcacgccccagctgaccaggactgtgaagatgcggttccgctgcgaagatggggagacattttccaagaacgtcatgatgatccagtcctgcaaatgcaactacaactgcccgcatgccaatgaagcagcgtttcccttctacaggctgttcaatgacattcacaaatttagggactaaatgctacctgggtttccagggcacacctagacaaacaagggagaagagtgtcagaatcagaatcatggagaaaatgggcgggggtggtgtggggtgatgggactcattgtagaaaggaagccttgctcattcttgaggagcattaaggtatttcgaaactgccaagggtgctggtgcggatggacactaatgcagccacgattggagaatactttgcttcatagtattggagcacatgttactgcttcattttggagcttgtggagttgatgactttctgttttctgtttgtaaattatttgctaagcatattttctctaggcttttttccttttggggttctacagtcgtaaaagagataataagattagttggacagtttaaagcttttattcgtcctttgacaaaagtaaatgggagggcattccatcccttcctgaagggggacactccatgagtgtctgtgagaggcagctatctgcactctaaactgcaaacagaaatcaggtgttttaagactgaatgttttatttatcaaaatgtagcttttggggagggaggggaaatgtaatactggaataatttgtaaatgattttaattttatattcagtgaaaagattttatttatggaattaaccatttaataaagaaatatttacctaatatctgagtgtatgccattcggtatttttagaggtgctccaaagtcattaggaacaacctagctcacgtactcaattattcaaacaggacttattgggatacagcagtgaattaagctattaaaataagataatgattgcttttataccttcagtagagaaaagtctttgcatataaagtaatgtttaaaaaacatgtattgaacacgacattgtatgaagcacaataaagattctgaagc

SEQ ID NO: 20283 - DNA, 867 bp, Homo Sapiens
gcacgaggatttgaccaaagagctgctggccctggattcagtggaccccgagggacgagccgatgtgcgtcaggccaggagagacggtgtcaggaaggttcagaccatcttggaaaaacttgaacagaaagccattgatgtcccaggtcaagtccaggtctatgaactccagcccagcaaccttgaagcagatcagccactgcaggcaatcatggagatgggtgccgtggcagcagacaagggcaagaaaaatgctggaaatgcagaagatccccacacagaaacccagcagccagaagccacagcagcagcgacttcaaaccccagcagcatgacagacacccctggtaacccagcagcaccgtagcctctgccctgtaaaaatcagactcggaaccgatgtgtgctttagggaattttaagttgcatgcatttcagagactttaagtcagttggtttttattagctgcttggtatgcagtaacttgggtggaggcaaaacactaataaaagggctaaaaaggaaaatgatgcttttcttctatattcttactctgtacaaataaagaagttgcttgttgtttgagaagtttaaccccgttgcttgttctgcagccctgtctacttgggcacccccaccacctgttagctgtggttgtgcactgtcttttgtagctctggactggaggggtagatggggagtcaattacccatcacataaatatgaaacatttatcagaaatgttgccattttaatgagatgattttcttcatctcataattaaaatacctgactttagagagagtaaaatgtgccaggagccataggaatatctgtatgttggatgacttttaatgctacatttt

SEQ ID NO: 20284 - DNA, 994 bp, Homo Sapiens
  misc_feature (872)..(881): n is a, c, g, or t
gcacgagggtctcaagtctgctaagattcacatccatagcccccgtggctttgaggagaatcctctctgccattcttccaatctccccagtgggttttgctattattttctaaattgggttaagtctaagaaggtgggggtgagcagggggtttatctgtgtgtagtgagtgcttcatgtgtggaatattcattttcttactgcagtgggacttggggttgaagccacccctcctactctgttggcttagccctgagatggtgacaggctggcctgcagtcagcatcattgtgcatgtgacagcatcaatgtgattagtaatttgtctgttcctcccttgaactgtctgtttagtctgaggtttttaaacttgcaggcagctgactgtgatgtccacttgttccctgatttttacacatcatgtcaaagataacagctgttcccacccaccagttcctctaagcacatactctgcttttctgtcaacatcccattttggggaaaggaaaagtcatatttattcctgcaccccagttttttaacttgttctcccagttgtccccctcttctctgggtgtaagaagggaaattggaaaaaaaattatatatatattctccttttaatggtggggggctactggagaggagagacagcaagtccaccctaacttgttacacagcacataccacaggttctggaattctcatcttcgaacctagagaaataggtgctataaacagggaattaagcaaaatgctggatgctatagatcttttaattgtcttaattttttttctattattaaactacaggctgtagatttcttagttctcacagaacttctatcattttaaactgacttgtatatttnnnnnnnnnntcttcagtaggatgttttgtactattgctagaccctcttctgtaatgggtaatgcgtttgattgtttgagattttctgtttttaaaaatgtagcacttgactttttgccaagg

SEQ ID NO: 20285 - DNA, 1932 bp, Homo Sapiens
gcacgaggagatagagtacaatgaatctatgaaggcctatcataattcccccgcgtaccttgcttacataaatgcaaaaagtcgtgcagaagctgctttagaggaagaaagtcgacagagacaatctcgcatggagaaaggagaaccgtacatgagcattcagcctgctgaagatccagatgattatgatgatggcttttcaatgaagcatacagccaccgcccgtttccagagaaaccaccgcctcatcagtgaaattcttagtgagagtgtggtgccagacgttcggtcagttgtcacaacagctagaatgcaggtcctcaaacggcaggtccagtccttaatggttcatcagcgaaaactagaagctgaacttcttcaaatagaggaacgacaccaggagaagaagaggaaattcctggaaagcacagattcatttaacaatgaacttaaaaggttgtgcggtctgaaagtagaagtggatatggagaaaattgcagctgagattgcacaggcagaggaacaggcccgcaaaaggcaggaggaaagggagaaggaggccgcagagcaagctgagcgcagtcagagcagcatcgttcctgaggaagaacaagcagctaacaaaggcgaggagaagaaagacgacgagaacattccgatggagacagaggagacacaccttgaagaaacaacagagagccaacagaatggtgaagaaggcacgtctactcctgaggacaaggagagtgggcaggagggggtcgacagtatggcagaggaaggaaccagtgatagtaacactggctcggagagcaacagtgcaacagtggaggagccaccaacagatcccataccagaagatgagaaaaaagaataagtgttgccttgttttgtgtgttctaaatactttttttaatgaaaaaatgttttttggttttaatggtgttacgtggtttgtgtattaattttttttcttgtccatatcacaccaccaaagggcttttggaccatttagcatcatgagcctaatggctcagtcagtcacctttcttaagtgttgtgaagatggctcttttctttggatcttgtttctagccctcaactgctgaaagcctcagaatttagattaattgagaaaacacccacctcttttagagaattatcctttgatgctgcagaatctactcttacaatgccttcctacagctcactggggtgcttaccaaagccatagctttaaaccttcccagtccccatcagtagcttcctgaaagtctcctctcttgtttacttctgcaaagggtagcttcttaaaaacgtgatcatgtatgagtatgtatttgttcacttacccttttttacttttaatcaatgtcagataccaagagttgtgttaagctgagtgtagtgtgtaactaactacacttggatcttactgatccagaaatagtccccatagttagagtagttacttatgaagtggttattaaagtgaacacagcacatatacattatctatactgctttttgttatgattaatactgggtatgttctggtaaatccatccttattgtatagaaaaaaaattacttttttaccaggttttccaaagacagaatagatcacaaagctcaaggaatttaatattcttgtaatggactagataattcaaactgattagcccattccagaagaaaaacagctgggaattaagttaatccacttgaaattgttttacaataatcagaacatccaaacctcaaggctcaggatcccatagaccagagcccacctttttgataaacttagtaaagtcttggagactagaagcaagatagtttgtgacacataagcttcccaaaaactagaatagatttttactgaatagtggtatatttgatggtatatgtttctaaaggtccaaatgtaat

SEQ ID NO: 20286 - DNA, 810 bp, Homo Sapiens
  misc_feature (170)..(323): n is a, c, g, or t
aatagagatggggtctctcactgcgttgcccaggctgctctggaactcctggcctcaagtgctgggattccaggcgtgaaccaccacgcccggctgaaatgttccttttccttggaacttgatcaacacaaaatcctgaggcctggtgtgggtgtgttcctctggggcannnnnnnnnnnnnnnnnnnnnnnnnnnnnnnnnnnnnnnnnnnnnnnnnnnnnnnnnnnnnnnnnnnnnnnnnnnnnnnnnnnnnnnnnnnnnnnnnnnnnnnnnnnnnnnnnnnnnnnnnnnnnnnnnnnnnnnnnnnnnnnnnnnnnnnnnncggagactgacccgcccagcgtcctagggcaggctccaggcagggtctgcatgtgcctctgccagccacctaaaccctgccagccggggcctttaaattctcccctcgtggtctccagggccactcactagcctgatttcaagctgtaaactgggaggacctatttcttttcaccttgcacggaacaccaaggctgaaaggcagtttttccggaggtgccagcctgtctcacatttccgcttcagctgcggggtccagctctatgtgggcggtctcctgatgaagtcaccccgggacagacactgttctgtctcctgcttccagtccagtaaagatgccaggatcccccagggcatggcaggcaccctcaaaggcagacgtgggggaggccctggtgggcagaccccagcctgctgacggggggcttctccctggctggccactggcccacccactgcgctgcagtccacctgggtgctgggggctg

SEQ ID NO: 20287 - DNA, 860 bp, Homo Sapiens
ttttcaccccactccttcatcttgtctcgctgtctatattgttttccttctctgtatcttcattgcttttgctttctttcaaactttctccttcacagatttttctttattaatcagaatcatactgaccaacatgtgctgaggactttctgtgtgctctgtgcttcacatacagtcatgtgcatctttccagttccacaagttagttatcctcatttctcggggccatagagctagtgagtgacagagctaggttttgtatgtcaaagcctctgtcctacatgacatggcttttcctgctgccttctcccctggtattcgtctccctcttttctcctctggctctgcctggctctcctctggctctgccgagggggtggttttcagcctgggcccttgcagatgtgtctgtggcagcaggccacacagaccgcagcgggctgggcagcgtcctgagagacctagtgaagccaggcgacgagaaccttcgggagatgaacaagaagctgcagaacatgctggaggagcagctcaccaagaatatgcacttgcacaaggatatggaagttctgtcccaggaaattgtgcggctcagcaaggagtgcgtggggcctcctgacccagacctagagccaggagaaaccagctaaagacctgcaggctgcacccacctcctccccttcctaccccctaggatgctattcccttgggctgtggtggaaaaatgagggctggagccaaaatcaaatagcttgggagactggacattaaaggggctagaggcctgatggttagtgttaatgatcctgtcttaggcagaggcaccagggagtggggatcctgagggaggggcagggatt

SEQ ID NO: 20288 - DNA, 917 bp, Homo Sapiens
cctttaaaaaaatcccccgggctgcaggtgaacacagactttgtttctttaagacaagtaccttataaatatgacttatatgaaaaaactttgaaatataattcagacttgcttaatagtaatagaagctatgcaggaaagcagactgatgagtgtaatgaatttggaaaagcacttctctacctgaagcaagagaaaacccacagtggagtagaatattctgaatacaataaaagtggaaaagccctcagccataaagcagccatttttaaacatcagaaaataaaaaacttggttcaacctttcatttgtacttactgtgacaaggctttctcctttaagtcactcctcattagtcataagagaatacatactggagaaaagccatatgaatgcaatgtatgtaagaaaaccttctcccataaggccaacctcatcaaacatcagagaattcacactggggagaaacctttcgagtgtccggaatgtggaaaagctttcacccaccagtcaaacctcattgtacaccagagagcacatatggagaagaagccctatgagtgcagtgaatgtggaaagacatttgcccaaaagtttgaactcaccacacaccagagaattcatacaggagagcgaccctatgagtgtaacgaatgtgcaaaaaccttctttaagaagtcaaaccttatcatacatcagaagattcacacgggggagaaacgctatgagtgcagtgaatgtggaaaatcctttatccagaactcacagctcatcatacacatgagaactcatacaggagagaaaccctatgaatgtactgagtgcggcaaaactttcagccagaggtcaactcttagattacacttgcgaatccacacaggagagaaaccatatgagtgttccgaatgtgggaaagg

SEQ ID NO: 20289 - DNA, 759 bp, Homo Sapiens
gcacgaggataggctcctgtataaatgccattgattcagagcccaaagatgtcattgctaattcaaatgctgtgttaatggacctggacagtggtgatgttaagagaagagtacatttatttgaaacccagagaaggacaaaagaagaagatccaataattccctttagtgatggacccatcatctcaaaatggggtgcgatttccagatcttcccgtacaggttaccataccacagatcctgtccaggccactgcttcccaaggaagtgcgactaagcccatcagtgtatcagattatgtcccttatgtcaatgctgttgattcaaggtggagttcatatggcaacgaggccacatcatcagcacactatgttgaaagggacagattcattgttactgatttatctggtcatagaaagcattccagtactggggaccttttgagccttgaacttcagcaggccaagagcaactcattacttcttcagagagaggccaatgctttggccatgcaacagaagtggaattccctggatgaaggccgtcaccttaccttaaaccttttaagcaaggaaattgaactaagaaatggagaggtaaagaaactgaacctttcggcttcatgcttaatgtatttgttttctgctgctgcatcttggttataccattactgagtgcattttggtgtgcctatctctgatggatgattgattgcttttaaaacttataacagaaataaaattgtaatcccagaaaaaa

SEQ ID NO: 20290 - DNA, 810 bp, Homo Sapiens
cgcacgagggcggccgggccggggcgcgccgagccgaacccagccacgcggcgccagcgaggcggccggacccgcagccccgatgctgctgacgctggccgggggcgcgctcttcttcccggggctcttcgcgctctgcacctgggcgctgcgccgctcccagcccggatggagccgcaccgactgcttgatgatcagcaccaggctggtttcctcggtgcacgccgtgctggccaccggctcggggatcgtcatcattcgctcctgcgacgacgtgatcaccggcaggcactggcttgcccgggaatatgtgtggtttctgattccatacatgatctatgactcgtacgccatgtacctctgtgaatggtgccgaaccagagaccataaccgtgcgccctccctcactcttcgaaacttcctaagtcgaaaccgcctcatgatcacacatcatgcggtcattctctttgtccttgtgccagtcgcacagaggctccggggagaccttggggacttctttgtcggctgcatcttcacggcagaactgagcactccgtttgtgtctctgggcagggttctgattcagctaaagcagcatcacacccttctgtacaaggtgaatggaatcctcacgctggccaccttcctttcttgccggatccttctcttccccttcatgtactggtcctatggtctccagtcaggtgacttagtctgcttcatgtactccttcattcatctccattctactgtcacgtggtctatgccctttcctcgtagctccctcagattctactgtttctgtctgct

SEQ ID NO: 20291 - DNA, 1245 bp, Homo Sapiens
gcacgaggtgtttatcctcgtccaattatcacgtggaaaatggacaacacacctatctctgaaaacaacatggaagaaacagggtctttggattctttttctattaacagcccactgaatattacaggatcaaattcatcttatgaatgtacaattgaaaattcactgctgaagcaaacatggacagggcgctggacgatgaaagatggccttcataaaatgcaaagtgaacacgtttcactctcatgtcaacctgtaaatgattatttttcaccaaaccaagacttcaaagttacttggtccagaatgaaaagtgggactttctctgtcctggcttactatctgagctcctcacaaaatacaattatcaatgaatcccgattctcatggaacaaagagctgataaaccagagtgacttctctatgaatttgatggatcttaatctttcagacagtggggaatatttatgcaatatttcttcggatgaatatactttacttaccatccacacagtgcatgtagcccagctagaagccaggaggagcagacaccctgctgatggagcccaacaagaaagatgttgtgtccctcctggtgaacgctgtcccagtgcacccgataatggcgaagaaaatgtgcctctttcaggaaaagtataggaaatgagagaagactgtgacaactcatgacctgcatccttaatatccagtgacttcatctcccctttcttcaccacaattccaggcaatggcctgtcggaccagacaattctaccactgcaaagagttgtaaccattttctggtatcacatttatttttcaagacatacttttcaagacatcattcactgacccactacctgcattgagtataaatgcctggatgttaaggattccaatttaactttgaaaagaactgtctcattcatttacatttctgttacagtcagcccaggaggttacagtgagctctccactaagaatctggaagaaatgcatcactaggggttgattcccaatctgatcaactgataatgggtgagagagcaggtaagagccaaagtcaccttagtggaaaggttaaaaaccagagcctggaaaccaagatgattgatttgacaaggtattttagtctagttttatatgaacggttgtatcagggtaaccaactcgatttgggatgaatcttagggcaccaaagactaagacagtatctttaagattgctagggaaaagggccctatg

SEQ ID NO: 20292 - DNA, 763 bp, Homo Sapiens
  misc_feature (321)..(331): n is a, c, g, or t
gcacgagggcgttgccgtctatgcaaatgcatgcaaatactccaggccctgggatgtgggcttgtgttttgtcactgtgaagggggagatgggagaggagcctgttttggggtggggtctggggaaggcaatctgattctgaagctaaagagctttcatcctcttgagtgtatgtccccatagtgggccccttgacccacatgctgaccggtgccttgggatttgactagagttgctggctcgaggcccagcacgaggacttaccctggggttttgttaggtttggaagcagctgtccctagggggtgaagtccccccccnnnnnnnnnnnacccctgcttctcccacggcttcacctccctatgtgaactgtagactcagatcccaataaagtgctgttgcagctatgatgctaggtggtttctaagcacaggggacaccccacaccccctgcctgaatggatgggtccatcccaggcactggtacttgcccccttgttctgtatccccctttgcccttgccttgcccttccaacaaaccctaggcccttgagaagctgatacttctccttttgctcacagctgccttggccccacccctgggagatgtagcaaattgagtgtgggttttggagtctgagcctcaggctcaaatccaggccaagtgatcttgggcaagttaatctctgggaactttgggtttcttatcctcaaaaaaggcgatggaagggctggggaagtgattaaataaaagcaacgcaag

SEQ ID NO: 20293 - DNA, 1242 bp, Homo Sapiens
  misc_feature (794)..(918): n is a, c, g, or t
gcacgaggaaggtctgaagagtaactttgtccacctgtttgtatcgactctgcacttccctcatgagcagaagataaaactgtaccaggaccagttacagaagtggatccgcggtaatgtgagtgcatgtgcgaactctgttttcatatttgacgagatggataaattgcaccctgggatcattgacgcaatcaagccgtttctagactactacgagcaggttgacggagtgtcttaccgcaaagccatcttcatctttctcagcaatgcaggcggggaccttataactaagacggctcttgacttttggcgggccggaagaaagaggaagacattcagctgaaggacctggaacctgtactgtctgtcggagtcttcaataataaacacagtggcctgtggcacagtggactgatcgacaaaaacctcattgattactttatccccttcctgcctttggagtacagacatgtgaaaatgtgtgtgagggccgagatgagggcccgtggttctgccatagatgaagacattgtcacaagagtggcagaggaaatgacgtttttccccagagacgagaaaatctactcagacaagggctgcaagactgtgcagtcgcggctggatttccactgagctcctatccagatggggtaggagacagctgggaggctccgcacgccagaggccttgcctttcagaagaaccctgaagaccgctttggggttttgcctgtttgcaccttagacttttgggtatagaatcttttttttgagaagaggtctcactccgtcatnnnnnnnnnnnnnnnnnnnnnnnnnnnnnnnnnnnnnnnnnnnnnnnnnnnnnnnnnnnnnnnnnnnnnnnnnnnnnnnnnnnnnnnnnnnnnnnnnnnnnnnnnnnnnnnnnnnnnnnnnnnnngatatagaatctaagagttgattgtggaaaacacgtgaatctattgcgcgcatttgtcatttagcaagatggcagcagtccagctgttctttgcagctggagatgaacttttaaaaatccccttcacacttaaatgtactgaccgagacagaagtacctgaaaacagctgtgcatggcaggcccggcaatagcttctgactcacagcacccgcgcttcagaagctacggtcacaactaaaggagtccagggacttgctgcaggctggggggcactgggtggttctcacagcaggctgcggggcactgtgttctcatggtcaaaa

SEQ ID NO: 20294 - DNA, 1518 bp, Homo Sapiens
  misc_feature (1461)..(1472): n is a, c, g, or t
gcacgaggcccagatgactgcaggggcgttcaacacctatatggccagccctggcccactgtcacctccaggaccccagccctgggcccccaggctgggatagacaccaatgagattgcaccgctggagccagacgccccgccagatgcctgtgaggcctcctttgacgcggtctccaccatccgaggcgagctctttttcttcaaagcgggctttgtgtggcgcctccgtgggggccagctgcagcccggctacccagcattggcctctcgccactggcagggactgcccagccctgtggacgctgccttcgaggatgcccagggccacatttggttcttccaaggtgctcagtactgggtgtacgacggtgaaaagccagtcctgggccccgcacccctcaccgagctgggcctggtgaggttcccggtccatgctgccttggtctggggtcccgagaagaacaagatctacttcttccgaggcagggactactggcgtttccaccccagcacccggcgtgtagacagtcccgtgccccgcagggccactgactggagaggggtgccctctgagatcgacgctgccttccaggatgctgatggctatgcctacttcctgcgcggccgcctctactggaagtttgaccctgtgaaagtgaaggctctggaaggcttcccccgtctcgtgggtcctgacttctttggctgtgccgagcctgccaacactttcctctgaccatggcttggatgccctcaggggtgctgaccctgccaggccacgaatatcaggctagagacccatggccatctttgtggctgtgggcaccaggcatgggactgagcccatgtctcctcagggggatggggtggggtacaaccaccatgacaactgccgggagggccacgcaggtcgtggtcacctgccagcgactgtctcagactgggcagggaggctttggcatgacttaagaggaagggcagtcttgggcccgctatgcaggtcctggcaaacctggctgccctgtctccatccctgtccctcagggtagcaccatggcaggactgggggaactggagtgtccttgctgtatccctgttgtgaggttccttccaggggctggcactgaagcaagggtgctggggccccatggccttcagccctggctgagcaactgggctgtagggcagggccacttcctgaggtcaggtcttggtaggtgcctgcatctgtctgccttctggctgacaatcctggaaatctgttctccagaatccaggccaaaaagttcacagtcaaatggggaggggtattcttcatgcaggagaccccaggccctggaggctgcaacatacctcaatcctgtcccaggccggatcctcctgaagcccttttcgcagcactgctatcctccaaagccattgtaaatgtgtgtacagtgtgtataaaccttcttcttcnnnnnnnnnnnnaaactgaggattgtcattaaacacagttgttttctaaacctcgtgc

SEQ ID NO: 20295 - DNA, 1104 bp, Homo Sapiens
  misc_feature (218)..(236): n is a, c, g, or t
  misc_feature (248)..(469): n is a, c, g, or t
  misc_feature (860)..(908): n is a, c, g, or t
catattaaattaaaagtaagaaatttatttcttctgtaatatgtgtcaaagatattatgaaaaaaagattaaaagtcttttcccccatttttagtaatcttgatattatgaaacaagtgagtactaaaacaaaaacaacaataaatatgagcactacagcaaacatgacatactgtaatagaattttattgaaaaaaataacacgtacttactgaagnnnnnnnnnnnnnnnnnnngaaaccaagtcnnnnnnnnnnnnnnnnnnnnnnnnnnnnnnnnnnnnnnnnnnnnnnnnnnnnnnnnnnnnnnnnnnnnnnnnnnnnnnnnnnnnnnnnnnnnnnnnnnnnnnnnnnnnnnnnnnnnnnnnnnnnnnnnnnnnnnnnnnnnnnnnnnnnnnnnnnnnnnnnnnnnnnnnnnnnnnnnnnnnnnnnnnnnnnnnnnnnnnnnnnnnnnnnnnnnnnnnnnnnnngttcccaaaatgttgggattacaggtgtgagccactgcaccaggcaaactgcgatcttttaggggtgcctcttctctcttttgacttaaggatgttgtcccttaaggaaacctggaggctactactgtgatacactacttgagagatggattgttgctctttcttctacagtctttacaaggagtagattataaagacagaagatgttaaccattgcattaatgtttggaagctgacagtcttctagatttctgctagcaaactgatatgaggtagagtcctgaaagatctttcagcaatttcattctcttgggataagtgagtcactttcagaacagtgtgtgttgtagaattttttggttgtggctgctctactcagattgcatagagnnnnnnnnnnnnnnnnnnnnnnnnnnnnnnnnnnnnnnnnnnnnnnnnnaaacatcttcatagtgtatcatcctgaaaactgaatagtcactttgaggttattgctttttctttccaggtcagttagccaactaaaaaggccccaaaaaaactggcttcatggtccatgtctatcaagtgctcatttgttacagaaacaaaaattctgtcattttccttaagctcaaatattccccccctcgtgc

SEQ ID NO: 20296 - DNA, 1508 bp, Homo Sapiens
gcacgaggcacaattggaaaattgcccatgtggtgctcaaagaggaacagaagtttcgctaccttttccagggcacaaaaggcgaccctcagaactcaactgggggaatttacctagatgacatcactctgacagaaaccccctgccccacaggggtctggacagtccggaatttctcccaagtccttgagaacaccagcaaaggggacaagcttcagagccctcgattctacaattcggagggatatggttttgggttaactttatacccaaatagcagagaaagctctggttacttgagacttgcttttcatgtgtgcagtggggagaacgatgctatcctggagtggccggtagaaaacagacaggtgataattaccatccttgaccaggagcctgatgtccggaacaggatgtcctcaagcatggtgttcactacctcgaagtcgcacacatctccagcgataaatgacactgtcatctgggacagggtccagggtgggaacctatcatacagactgtaattgttttagaagcatcgacttgggctggagtggtttcatttcccaccaaatgctgaaaaggaggagtttcctgaaaaatgatgacctcatcatatttgtggactttgaagatatcacccacctcagccagactgaagttcccactaaaggcaaaagactgagcccccaaggcctcattctccaaggccaggagcagcaggtctccgaagaaggttcgggaaaggccatgttagaggaagccctacctgtcagcctgagccaggggcagcccagccgacagaagcggtcggtggagaacacaggccccctggaggaccataactggccacagtacttcagagacccatgtgacccaaacccttgccaaaatgacggcatctgtgtgaacgtgaaggggatggcgagctgcaggtgcatctctggacatgctttcttctacacgggggagcgctgtcaggccgtgcaggtgcacggcagtgtcctgggcatggtgatcggaggcatggctggcgtgatcttcttgaccttctccatcatcgccatcctttcccaaaggccaaggaagtgacctgcctgctggcattggccagaccacagcagcacctcctccatgcaggccttaactttcccatgttcaatgcagtttggggcagcttttttatcagccttgctttggataggacctccaaggactaaggcctccagccccatgtgtgacccttgtcatctctctgccccacataattatgttactttgctatgtgctcctaatgtatctagtgtgtcctgtgacaacactcatcacacttcattgtaaatcacttgttttattgactgtctttcctatagactgtaagctccatgagggcaggcacatgttgttctcattgaccgtgctggccccagtgcctagatgcatggctggcacattgttggcactcaacaatggttgaatgaataaaacaataaatgaatgcctcgtgc

SEQ ID NO: 20297 - DNA, 1176 bp, Homo Sapiens
catttggatgcaaggatttcactttctacccttcagcagcagctgggccagcctgagaaagctctggaagctctggaaccaatgtatgatccagatactttagcacaggatgcaaatgctgcacagcaggaactgaagttattgcttcatcgttctactctgttgttttcacaaggcaaaatgtatggttatgtggataccttacttactatgttagccatgcttttaaaggtagcaatgaatcgagcccaagtttgtttgatatccagttccaagtctggagagaggcatctttatcttattaaagtatcgagggagacaaaatatcagacagcaatgaccaagagtcagcaaattgtgatgcaaaagcaatatttgctgtgctcacaagcgtcttgacaaaggatgactggtggaatcttctgttgaaggccatatactccttatgtgacctatcccgatttcaagaggctgagttgcttgtagattcctcattggaatattactcattttatgatgacaggcaaaaacgcaaagaactagaatactttggtctgtctgctgcaattctggacaaaaatttcagaaaggcatacaactatatcggataatggtaatggaaaatgtcaataaaccccagctctggaacattttcaatcaagttaccatgcactcccaagatgtacgacatcatcgcttctgtctccgtttgatgctgaaaaacccagaaaatcatgccctatgtgtcttaaatggacacaatgcatttgtatctggtagttttaagcatgcgcttggacagtatgtgcaagcctttcgcactcaccctgacgaacctctctatagcttctgtataggcctaacctttattcatatggcatctcagaagtatgtgttacggagacatgctcttattgtacagggcttttcctttcttaatcgatacctcagtttacgtgggccctgccaggaatcattctacaatttgggccgtggccttcatcagttggggctgattcatcttgcaatccactattatcagaagccctggagctctctccacttgtggtagagggtatagaacttgaccagttagacttacgaagagatattgcctacaacttgtctctcatctatcagagcagtgggaataccggaatggctcaaacgcttttg

SEQ ID NO: 20298 - DNA, 1051 bp, Homo Sapiens
  misc_feature (689)..(702): n is a, c, g, or t
ccgaagtattcagcgcaccctcttgtgtaaggactgactacctggactgatcgcctgacagatcccacctgcctgtccactgcccatgactgagcccagccccagcccgggtccattgcccacattctctgtctccttctcgtcggtctaccccactacctccagggttttgctttgtccttttgtgaccgttagtctctaagctttaccaggagcagcctgggttcagccagtcagtgactggtgggtttgaatctgcacttatccccaccacctggggacccccttgttgtgtccaggactccccctgtgtcagtgctctgctctcaccctgcccaagactcacctcccttcccctctgcaggccgacggcaggaggacagtcgggtgatggtgtattctgccctgcgcatcccacccgaggactgagggaacctaggggggacccctgggcctggggtgccctcctgatgtcctcgccctgtatttctccatctccagttctggacagtgcaggttgccaagaaaagggacctagtttagccattgccctggagatgaaattaatggaggctcaaggatagatgagctctgagtttctcagtactccctcaagactggacatcttggtctttttctcaggcctgagggggaaccatttttggtgtgataaataccctaaactgccnnnnnnnnnnnnnngaggtggggggagggaggaggtatattggaactcttctaacctccttgggctatattttctctcctcgagttgctcctcatggctgggctcatttcggtccctttctccttggtcccagaccttgggggaaaggaaggaagtgcatgtttgggaactggcattactggaactaatggttttaacctccttaaccaccagcatccctcctctccccaaggtgaagtggagggtgctgtggtgagctggccactccagagctgcagtgccactggaggagtcagactaccatgacatcgtagggaaggaggggagatttttttgtagtttttaattggggtgtgggagggg

SEQ ID NO: 20299 - DNA, 1434 bp, Homo Sapiens
gcacgagggcccccgattcccgatccagagacaatggccccgatgggatggagcccgaaggcgtcatcgagagtaactggaatgagattgttgacagctttgatgacatgaacctctcggagtcccttctccgtggcatctacgcctatggttttgagaagccctctgccatccagcagcgagccattctaccttgtatcaagggttatgatgtgattgctcaagcccaatctgggactgggaaaacggccacatttgccatatcgattctgcagcagattgaattagatctaaaagccacccaggccttggtcctagcacccactcgagaattggctcagcagatacagaaggtggtcatggcactaggagactacatgggcgcctcctgtcacgcctgtatcgggggcaccaacgtgcgtgctgaggtgcagaaactgcagatggaagctccccacatcatcgtgggtacccctggccgtgtgtttgatatgcttaaccggagatacctgtcccccaaatacatcaagatgtttgtactggatgaagctgacgaaatgttaagccgtggattcaaggaccagatctatgacatattccaaaagctcaacagcaacacccaggtagttttgctgtcagccacaatgccttctgatgtgcttgaggtgaccaagaagttcatgagggaccccattcggattcttgtcaagaaggaagagttgaccctggagggtatccgccagttctacatcaacgtggaacgagaggagtggaagctggacacactatgtgacttgtatgaaaccctgaccatcacccaggcagtcatcttcatcaacacccggaggaaggtggactggctcaccgagaagatgcatgctcgagatttcactgtatccgccatgcatggagatatggaccaaaaggaacgagacgtgattatgagggagtttcgttctggctctagcagagttttgattaccactgacctgctggccagaggcattgatgtgcagcaggtttctttagtcatcaactatgaccttcccaccaacagggaaaactatatccacagaatcggtcgaggtggacggtttggccgtaaaggtgtggctattaacatggtgacagaagaagacaagaggactcttcgagacattgagaccttctacaacacctccattgaggaaatgcccctcaatgttgctgacctcatctgaggggctgtcctgccacccagccccagccagggctcaatctctgggggctgaggagcagcaggaggggggagggaagggagccaagggatggacatcttgtcattttttttctttgaataaatgtcactttttgaggcaaaagaaggaaccgtgaacattttagacacccttttctttggggtaggctcttgccccaggcgccggctcttctccc

SEQ ID NO: 20300 - DNA, 977 bp, Homo Sapiens
gcacgagggtgcggttctctccggcctcacgggctgcaccacccgctgttttgagggctgtgagtgcgacgaccgcttcctgctttcccagggtgtctgcatccctgtccaagattgtggctgcacccataatggccgatacttgccggtaaactcctccctgctgacctcagactgcagcgagcgctgttcctgttcctcaagctctggcctgacatgccaggcagctggctgcccaccaggccgtgtatgtgaggtcaaggctgaagcccggaactgctgggccacccgtggtctctgtgtcctgtctgtgggtgccaacctcaccacctttgatggggcccgtggtgccaccacctctcctggtgtctatgagctctcttcccgctgcccaggactacagaataccatcccctggtaccgtgtagttgccgaagtccagatctgccatggcaaaacggaggctgtgggccaggtccacatcttcttccaggatgggatggtgacgttgactccaaacaagggtgtgtgggtgaatggtctccgagtggatctcccagctgagaagttagcatctgtgtccgtgagtcgtacacctgatggctccctgctagtccgccagaaggcaggggtccaggtgtggcttggagccaatgggaaggtggctgtgattgtcagcaatgaccatgctgggaaactgtgtggggcctgtggaaactttgacggggaccagaccaatgattggcatgactcccaggagaagccagcgatggagaaatggagagcgcaggacttctccccatgttatggctgatcagtcatccaccaggaacgaagatttcctgaagaagacctggtccctctggaggttgcagtggctgaaggatgcatcatgtgctcctaccctgctctaccgcttttctgggtcacagaggccaaatgtgagagcattgaataaatatcttaagctaagctgc

SEQ ID NO: 20301 - DNA, 1075 bp, Homo Sapiens
gcacgaggcaaggttgcagccggagccgcccagctcaccgagagcctagttccggccagggtcgccccggcaaccacgagcccagccaatcagcgccccggactgcaccagagccatggtcggcagaagagcactgatcgtactggctcactcagagaggacgtccttcaactatgccatgaaggaggctgctgcagcggctttgaagaagaaaggatgggaggtggtggagtcggacctctatgccatgaacttcaatcccatcatttccagaaaggacatcacaggtaaactgaaggaccctgcgaactttcagtatcctgccgagtctgttctggcttataaagaaggccatctgagcccagatattgtggctgaacaaaagaagctggaagccgcagaccttgtgatattccagttccccctgcagtggtttggagtccctgccattctgaaaggctggtttgagcgagtgttcataggagagtttgcttacacttacgctgccatgtatgacaaaggacccttccggagtaagaaggcagtgctttccatcaccactggtggcagtggctccatgtactctctgcaagggatccacggggacatgaatgtcattctctggccaattcagagtggcattctgcatttctgtggcttccaagtcttagaacctcaactgacatatagcattgggcacactccagcagacgcccgaattcaaatcctggaaggatggaagaaacgcctggagaatatttgggatgagacaccactgtattttgctccaagcagcctctttgacctaaacttccaggcaggattcttaatgaaaaaagaggtacaggatgaggagaaaaacaagaaatttggcctttctgtgggccatcacttgggcaagtccatcccaactgacaaccagatcaaagctagaaaatgagattccttagcctggatttccttctaacatgttatcaaatctgggtatctttccaggcttccctgacttgctttagtttttaagatttgtgtttttctttttccacaaggaataaatgagagggaatcctcgtgc

SEQ ID NO: 20302 - DNA, 626 bp, Homo Sapiens
gcacgaggttttttgttacaaatttttaaaactttattatatacataaacaatttgaacatacacagaaatagcatactataccatacacaacatacacagaagtagcatattatacccttatttagctcccagctccatcagctcatatttgaccttgctccatccatacctctagccactgttccattccacgtgttataatgaagaaaataccagaaatattatttcacccatcaatatatttcattatttcagagatatacatatttgtaaaagatgtaaattcttaatttctctgcatatgaaggtaaaaattatagattgtgctacagtttttaatgtactgtttgcattgataaattattaaattgtgattatagccaattgattatgaggactcagcaaataattttctttagacccttcctattacagccgataggccagtgttttccaaactacgttctttggaatgttattgaactacgagctcttagtagatgtaactgaaagaatgggttttgttgtcaagtaagtttgagaaatttttaatactttgctcttgaataatcagagagcagtttagcttagtaaagttttacataaatcctattgtaaagaatc

SEQ ID NO: 20303 - DNA, 818 bp, Homo Sapiens
caaatgacttaaatttaatcatcggaagcaaactaaatggaaaccttacaatagagaaaaattacatgtcagtgtcttttggaaaactgagctgggacagaaagggactgggggctgccccccaacctgatcccttctgaacaaagacgtccacagtgttcctggcactctggctcaggaaaaggggaaactctgctggttctgtgcattgaagtagccttgcctagcactcactcctggccagcatcaggagccccgccttgccggctctggtcatcgcctttctttttgtggcctgaaacgatgtcatcaattcgcagtagcaaaactgccgtctccactgctgtcttataagtctgcagcttcacagccaatggctcccatatgcccagttccttcatgtccaccaaagtacccgtctcaccatttacaccccaggtctcacagttctcctgggtgtgcttggcccgaagggaggtaagtaaacggatggtgctggccccacagttctggatcagggtacaaggaatgacctctagggcctgggcaacagccctgtatggccattgttccacaccagtcatggccttggatttttctgtcaaggcatgggccacagccatctcggaggccccaccccctggcaccagctgagggtccaggaaacattgcgacacacttgcatggcatcctgaaggttgcgttctacttccgagaaaatctctttgctagccccccggaggagaatggtgcaggccttggggtctttgcagtcagtgatgaaagtaaagtattcatctcaattttcttgatttcca

SEQ ID NO: 20304 - DNA, 721 bp, Homo Sapiens
cccccgggctgcaggaattcggcacgaggtaacctcttgctaataatgatttttacttttaagtcacttttgggttcactagtggattaaccagaagtgattgtagttgagtccagttttgccttttaataatgtgttgaagttttagtttttactctttgttgactttgctgcttattggcaccagggacagagtttctagatacaattttatggattggttttaatttttatgagtttgtctctgcagtgattcggtttctcagagtctcatggcatcatattttttccagaatgacacagtagccaccggtggatgacagcccacgggcggcacagtcacttctgcctgttgctctgacaccaacccaggcagctctgctgtggcttctcctgggctctggcattagttggtctgtgtcacattgtcagaacaggtggctgctgtgtggtgccatcgagtccctgctggttccccttgtcctgggagggtcacccattgcccaaggaagtgcatccacctggcaggtgacctggaggagtagcttccccgaggacccccaggcttggcctgtgattgcgcaaacccacatttcctaagcacactggacacccttcgagtgtgggttttaacatccctgtgagattgaatacttgtgccacacatgtcacaaaagagtatggaaataaaagaaaatttatccgaagtggatgaagactg

SEQ ID NO: 20305 - DNA, 1474 bp, Homo Sapiens
gcacgaggctcacactggagaacaatcctatgaatgtaagcaatgtgggaaagcattttatcatcttggaagctttcaaagacacatgatagtgcacactggagatgggcctcataaatgtaagatatgtggaaaaggctttctttctcccagttcagttcgaagacataaaagaactcacactggagagaaaccgtatgaatgtaagtattgtgggaaagcattctctgattgcacaggttttcgaagacacatgataacgcacactggagatggacctcataaatgcaaggtatgtgggaaagcctttgattctcccagtttatgtcgaaggcatgaaacaactcatactggggagaaaccctataaatgtgaatgtgggaaagcctttagtgatttctattactttcgaaatcatgaaactactcacactggagagaagccatataaatgtaaacaatgtggaaaagccttcatttgttgcacttaccttcaaatacatgaaagaattcacactggggagagaccctataaatgtaaacaatgcggaaaagccttcaggtcttccaattacattcgagtacatgaaaagactcacactggagaaaagccctatgaatgtaagcagtgtggaaaagcactttctcatctgaaaagctttcagagacacatgataatgcacactggagatggacctcataaatgtaagatatgtgggaaaagctttgattctcccagttcatttcgaagacatgaaagaattcacactggggagagaccctataagtgtaaactatgtgggaaaggcttcaggtcttccagttacattcaactacatgaaaggactcacactggagagaaaccctatggttgtcagcaatgtgggaaagcattatctgatctctcaagctttcgaagacacatgataacacatactggaaatggacctcataaatgtaagatatgtgggaaaggctttgattatcccagttcagtgcaaagacatgaaagaactcacactggagagaaaccctatgaatgcaaggaatgtggtaaagccttcagtcattcaagttacttacgaatacacgaaagagttcatactggagagaagccgtataaatgtaaggaatgtgggaaaccattccattgtcccagtgcctttcataaacatgaaaggacccacagtatggagaaaccctataagtgtaaagaatgtggggaagcatttcattgtatcagttcctttcataaacatgaaatgactcactagagaaaacccctatgagtgttgaacatgtgagaaagccttaagtactttcagcttcttacaaatacataagagactcacactgaaaaagttgtatgaatataaaatgtactaaaaccttccatttttttcagtaccttttgaaacatgaccaaactcatacttcaaaaatatatatataatgaatgtgaggaatatgaaaaa

SEQ ID NO: 20306 - DNA, 1325 bp, Homo Sapiens
gacctgtttgtatggcatcccttgttctctaatgccactgctctgttttaaaaactcataggcaatttttacttatcagtaattgtttttataatttgtggttttcatgaaacattgctatgcttttatttcgaaaaactgaatttcccaacaggtgaactgaaaagttattttaactattatacttaatcaagatcctgcctctacggaattagctaaacctaaaaatgtttgcattaatgaataaattcttcctgcattccttggcccatttctggagttggtgacctttatcacaattattattttaggcagccagtgaactgctgcttcaaaaatccatagcccagctctgaactttctcgataaagtgccatcggttcacctttaaagacacacattcctttgaaatccacccagtgtttaaaaagcaacttggaaatttacacattagcattgtactttctagccctaatttgtgaggttgcagctatcattatattctgcatgtatgtataacctgttgtgaacaatcatacttaacaaaactactgatggtttatgacaacgtagggtaactacagttcattctgttccaggttatataaaactgcatttcctgaatttggttaaaaactaaggatgatggattgcaaaacagttcttttaaattagtttatatgctttaggtgttttggaatttgccttcttgaacttcctgagtcacacagaaagcaactgtacacagtagaattctgtggcgcagaccatgctgtattaacacatcacttgctgtttcctactgagtgtaccactgccttcccttctagcccaggagaatgtttactcagtttagtgtcttgtatttctataatactccaacaggaatggtagtcacactgtcttgaaattgaatctgtccatctgtttataatcaagaacatatcagaaatatataggtcccaggtaatactcccaaacatcccactttttactgtttcaggccatcatatcattcttaagctacttggggtggtagtagaggattaggttgtctattataaaaccaaaactcattcgtttaatgaacttgactgtcatacctctatttagtaattgcgagggtaagattcatagtaggaatattggaaattttgggcactctgagaataaataggcatatgatacccacttggacttttaacaaaagtaaaggataaatttgcatataggcttggaaagtgaggcagccatgctgttaactgcatttgttgtgatggtgcatttgattgaagcagcctgtctttgtatgccagactgtggta

SEQ ID NO: 20307 - DNA, 670 bp, Homo Sapiens
  misc_feature (132)..(140): n is a, c, g, or t
  misc_feature (357)..(396): n is a, c, g, or t
gcacgaggctttttcctactcattatttgaagaagagagagcctgtggggatagccttatcttggtccacaggactgaagtgaagtcacttgggaaggggagacagaggatgagcggcgtctgtgtagggannnnnnnnngggcctgcagaagggtggtgtgctcccaggactggcatgacaggtgtctcctcctcaccacaggctgtgcccatgagtccctgtgcagaccagtgggcaaggcagctgggccagatctcaggccagccgtttgtgctcctagcagggttgctgtgctggccacacggagaggccctagagagcctcatggattgtaactaaagaagaaacggttccnnnnnnnnnnnnnnnnnnnnnnnnnnnnnnnnnnnnnnnnacaccgttctctcggtactttttttaagctaagtcagcattgtcttccagtgttaaaggcatccctcacctctgcattgaacttacgtatccatgccaaggaatggaatttccatcctgagccagttcagttaggtgtcaattgatactattttaattttttatgcaatctgatgagatgagctcagatttaaaaatctcaaaagcacgtttattgtaacaagaattgttatgtattaatactgcagttttcaataaagattgacttgtgttgc

SEQ ID NO: 20308 - DNA, 827 bp, Homo Sapiens
gcacgagggacacttgtgacacaaggccaacgacctaagattagcccagggttgtagctggaagacctacaacccaaggatggaaggcccctgtcacaaagcctacctagatggatagaggacccaagcgaaaaaggtatctcaagactaacggccggaatctggaggcccatgacccagaacccaggaaggatagaagcttgaagacctggggaaatcccaagatgagaaccctaaaccctacctcttttctattgtttacacttcttactcttagatatttccagttctcctgtttatctttaagcctgattcttttgagatgtactttttgatgttgccggttacctttagattgacagtattatgcctgggccagtcttgagccagctttaaatcacagcttttacctatttgttaggctatagtgttttgtaaacttctgtttctattcacatcttctccacttgagagagacaccaaaatccagtcagtatctaatctggcttttgttaacttccctcaggagcagacattcatataggtgatactgtatttcagtcctttcttttgaccccagaagccctagactgagaagataaaatggtcaggttgttggggaaaaaaaagtgccaggctctctagagaaaaatgtgaagagatgctccaggccaatgagaagaattagacaagaaatacacagatgtgccagacttctgagaagcacctgccagcaacagcttcttctttgagctttgtgagcaggattctggggtttgggatttctagtgatggttatggaaagggtgactgtgcttgggacaagc

SEQ ID NO: 20309 - DNA, 1065 bp, Homo Sapiens
  misc_feature (151)..(163): n is a, c, g, or t
gcacgaggagattatctactgcaaaacaccactgttggaaaaataggtatttttaaattgtttttaatcttttttggtgcttttaaacatgtttagcaaaaaccaattcagttccattccccgcaaaaaacccctaactttactctgaacnnnnnnnnnnnnngcattccatgaggttctgtattcagtcattctctaggtaatgtcatttttgtacacatatatttatataatcactgattgagatttaggaaaaagcatttctaaagaatatttgcttcccttagaactacagactcgaaatctttaaagatggtgcctaagcatctatgtattttttttaagttccacagatttttctgttgggcagccaaggattataaaccacttccctaaaggcaacattaatgcaaaagtccccagatggcaatacaaagtatcccctggtaccacatatattcatttgtgagtttggatatagagcacattatctaaaccattttgtagttccaaaaacccatctaaatttcttgagttcctgaattttgaacaggattacctggagcctggagccactttaagttgtacttctgactaaactggaattatgagtgaggaagagtgtttactaaataaatgactggggcaagcaaaattgaggaggaaattagaaactgtttgacaaactttaagagctacttgaaataacagaagtcttgattaatatgcaaataatggctagaaagtatggtttaactggaccctattatgccttttaaaaataatttcagtaacccataaatacatgttgtaaaaaattcaaatatacagaatggaataaaaaaatgatctccctttattaccctcccaaaggttaccagcgtttgaatttaataatgtatattctttcatgcttttttctgtgcacttacctaagtgtgaatatgtaaagggtttgttttgtatacaaatgggattatactaaaataagtaatgcctatttttaaggataggttaaatttgtgaatgatcatttcaaatatattgaataaaataggcaaagct

SEQ ID NO: 20310 - DNA, 814 bp, Homo Sapiens
aagcaatttccccactcccaagttgggccagtaaagattacatgaaaactggcacacctattggctggaatacagatgcaccaaatgaggatttaaaaactttccgagcgaaaagtagaacaaaaagaaaaaagaatctcctagcattttcccccaaggtttcactctcccgccacacacactctccaaaggaccgctacagatccaactctgcaagagaagacagagcagtgtcaatcaggaagccatgaggacaccaggaggaggttttcagtctcgacacgcaaaagacagagctgcccagccctggggtcctgaagccagcactcacctatgtcagtttcttggctttgttgtagagggaatccactactttgctcatgttctgaattgtttccagagcagcttcgtaagttttatctactgggggttcatcgaaaataatcaggacaccctccccctggtccaaaatcccatgaaatttcttgtcaagaatcatctgtgataatttcctttccacgtcggccttggagagtttgatgagactagatatgtgttcaatctgtactctggaaaaaggctcaatgactcggatcagattctgttctagtaagttatcatacaacttggccaagtgtgtgctgatgattgggtcatcccggagctctgcccggtaatctgtcagagccttttcaaaatctgccagtgatctgttcttgctagccctgagctcacgcattttaatgctttctgtctgcctccctgcataccgaatgcaagccttcccgctcaccaaaccctggacatctccggg

SEQ ID NO: 20311 - DNA, 1636 bp, Homo Sapiens
  misc_feature (1419)..(1443): n is a, c, g, or t
actttcatccaaacacacccttttctgaaaaacataaaagcatgcacatcgacggcattcttataaagaaaaattaataactaagctgtaaatcagtaataatacaaacaaaagtttaaatgatatgtgaaaagacttacaggtaggtatacggctcttaattttagaaaataattcaagtcagtatcaatacaggttaaggagaagcttctaattttccaaacattttgatacaaaatttttttcaacgactgtattttatagaccttttgtgagaagattagtatagttctatgaaacctaacattcaagtgatcttatgcaggtcaggctaccttgttaaaatgagttagaatccacataattccaacagtattgcctctcaaagttcaaatttagaacatacccattatattcaaaatatattaaatccctgtacttaacaaagacatggaattgatctaaattttactttacaggtaagagaaaattacaattcagcatgaggaaattttcataagttttacccatgccccgattattaggccaactatatcctgagtgtccatggatgtgtgcatacattctaatgtacacaaaccaattcacaccacacgactcttcaaagatgatgcttgaaagagtttattctctggcatgggagaagcagtgtaacacagtcacttaattttcccttaatcattatttctttcattttgcttatcatgatccaactggtatgtttaatgtgggccactgatatatttctgcagcaaaaatccagtagcagtaagcagaaatgtcaacttaaagggactatgaggaaatcgaagtttaaattataacacaaaaaatagaacagttcacactgaaaggtcttctcccatgggatatattgttccatggctaaaaatcgtgatctggttcctggaacacagctcttgctctaaggcgatacatattaatgtgtagctccactaaacctaatgggaaataaacaaattcgttcagtcatgacgaattaagtctgtatttcactggcttgagaaggtgaacttcttgacacagacaaatgcaaaatgcctctgcagtagctggtgaagcccactcacaagggcttaaagagttcaactctgaaagtgggcagcacaggctggctctgcatttcttcctagcaagtctacgtgcaagccgctgagcagcaccactgacgggatccaagggaaggaccagagcccagtgggaatccaccacactacagaaacgcgacttctgaatgaatattctgtgaaatcaaagagaagcaggcaaaaggcacacgctagtaaatctaggcagaatgtctgcaggctctcatcaccttaaaaatcttgtgaacttggggtccaaccaaggttcacaccgactcttttgatattnnnnnnnnnnnnnnnnnnnnnnnnncttaacgttttcaagcacttatggcacagacaaagggaagtactaatagcgtagcttaaatcttcaaaaagctgggaaatttaaagttctgctataatgaatcagagtcacaattttaaacttcgttctcatattttataccattttctgtgtgtacagggtgtgcaaattaagcaatttcaatacctcgtgc

SEQ ID NO: 20312 - DNA, 1444 bp, Homo Sapiens
  misc_feature (313)..(347): n is a, c, g, or t
gcacgaggacatcagtgtcttctagaaggtgcctgaccaggttcaccttttaaacgacaaagcatggtttgtggctttttgcaaaattactatgaaccaaaagttgacaaatgttccaaagttattttctctaacatatcacattaaagatctgtttcagaattgtaaaaagtacatctagatgtgtttacagaaagcaagtatccagtatgactggcatgtgttcatgctattcagaatcacttgtaaatagtctgcttttaaaggagggcatgttcagttttctgtgaattaaaatatgctcatgtgtggnnnnnnnnnnnnnnnnnnnnnnnnnnnnnnnnnnngtggcagaagggatttatattaatattctttcccctctggccttcttacagtctgttggtccctttgcttctgttgtcagtgtgttgaattgcaaaccgagtactgctgtaaatactatgtttacttcatgctgaatgtttgcaaagacttgatataagtattaatagtaatgaatcaatgaataaataatgagctagggtttgtgaggctttctacaaataggtcagctccacctggagtgcgaattgccagagacaccttggtagtgcccatcggcaaatcgcaatggcagcatgtgagtggaccattcagaaacttctgcttggtggaaagtaaacagagaggatggaggtttggggcgaatgtcctgaggcagagatggtctttattgtgtgtggtggtggttgtggtatttataataatgcaagcataccctcccttgagtctcaattgaagataaaagaatgtactgagcaagcaaagccaatggagagtatttcacaaaaatactttgtaaatgagatgccagtagtgttcaaagttgtatttttaaaagataaatattcctttttatacctcagttttgtgtcctgtttttaatgacttacgctctaagtaatccattagtagttatctcagttccttcctttgggttactagaatgttggaaaaagatgccaagtctgtcttgacaactggaaacagggttccacagcagcccattcgtgctgaaaactggcttccccctgaagcaccctgctgtggcaccagcaggaagctcaggttaattttacactagcttgctcactgatgcatctctcatcaatgctacggaaggctttgattcatcagtctcgggctcttggaatacctaattttaataatatctatgaaatcaagggaaactttccatttacagttatttcttgtttaaataaactaaattaatttttaggggagagcagtaggaaaaagagctaatgcatgcggggtttaatacctaggtgatgggttgaggtgcagcaaaaccaccatggcacacgttcacctatgtaacaaacctgcacatcctgcacatgtaccccggaacttactt

SEQ ID NO: 20313 - DNA, 968 bp, Homo Sapiens
gcacgagggcactgtttcaatgctggtaattgaaaccattttaatatatttggttgtattcactttatatgtccttccaaaaatgttgttgtgtacataccatgctttcaatgttggcttccaagttttttaataagaaactttttgtatttacttggtccttttcttttaccttatagttaagtgtcttaagctgtagactgtggcagtgaatgggtaagctggagatgttgctgctgcccatccatggtttttgggtggtgcaacactactaggtacttctcagccctgccttgggtgtgccctacggcttcagagacctctttatggcagcatttaacatacagcttgtaaatgctggtgaaacataatctcagcaacactgctttaggactgaactattaatacaaatttttgttattgataccttaaggaactttttacttctgaaccttgactccaggtaccacggggccattacaaaaggcttaaaatatgaatctggttatctcaccaaaaatcaattaattattttagaagacaacaactatactcaatatggatgtaggcagaagcttaaaagacctactgccacattaatttcattacctttaagatgctacagatagatagatagatagtatatcattttaaagttgtttcctaaaatgttaagatgtcaatggcaactggattctacatcctggtttctggaaaaatgcttatcttagaattagcaaaacatacaagtagaataattaacaatatgccttcagtatcccaactacccagaacagtggttctaaaactaggttgcagtttgaaatcactttaaaaccccaggggatggggagaaggcagcacaggcatcattttgggaaaagctcttcaaatgatcccataattaggatagggtatacaagtacattatgttgcaactaaaaaggaacaaaacatgaaggcaattt

SEQ ID NO: 20314 - DNA, 892 bp, Homo Sapiens
tccagttctgctctggatttacaaaaaattcctggagccatatatataccctctggtttccccctttcgttagtcgtatatggcctaagaaagcaatacaagaatccaatgatacaaacaaaggcaaagtaaactttaagggtgcagacatgaatggattaccaacaaaaggaccaacagaaatctgtgataaaaagaaagactaaagaaattttcctaaaggaccccatcatttaaaaaatggacctgataatatgaagcatcttccttgtaattgtctctgacctttttatctgagaccggaattcaggataggagtctagatatttacctgatactaatcaggaaatatatgatatccgtatttaaaatgtagttagttatatttaatgacctcattcctaagttcctttttcgttaatgtagctttcatttctgttattgctgtttgaataatatgattaaatagaaggtttgtgccagtagacattatgttactaaatcagcactttaaaatctttggttctctaattcatatgaatttgctgtttgctctaatttctttgggctcttctaatttgagtggagtacaattttgttgtgaaacagtccagtgaaactgtgcagggaaatgaaggtagaattttgggaggtaataatgatgtgaaacataaagatttaataattactgtccaacacagtggagcagcttgtccacaaatatagtaattactatttattgctctaaggaagattaaaaaaagatagggaaaagggggaaacttctttgaaaaatgaaacatctgttacattaatgtctaattataaaattttaatccttactgcatttcttctgttcctacaaatgtattaaacattcagtttaactggt

SEQ ID NO: 20315 - DNA, 907 bp, Homo Sapiens
gcacgagggtgctgatcgccgagactgactcacagtacacttcggcagtgacagagaacatcaaggccttgttccccacggagatccattctgggctcctggaggtcatctcaccctccccccacttctaccctgacttctcccgcctccgagagtcctttggggaccccaaggagagagtcaggtggaggaccaaacagaacctcgattactgcttcctcatgatgtacgcgcagtccaaaggcatctactacgtgcagctggaggatgacatcgtggccaagcccaactacctgagcaccatgaagaactttgcactgcagcagccttcagaggactggatgatcctggagttctcccagctgggcttcattggtaagatgttcaagtcgctggacctgagcctgattgtagagttcattctcatgttctaccgggacaagcccatcgactggctcctggaccatattctgtgggtgaaagtctgcaaccccgagaaggatgcgaagcactgtgaccggcagaaagccaacctgcggatccgcttcaaaccgtccctcttccagcacgtgggcactcactcctcgctggctggcaagatccagaaactgaaggacaaagactttggaaagcaggcgctgcggaaggagcatgtgaacccgccagcagaggtgagcacgagcctgaagacataccagcacttcaccctggagaaagcctacctgcgcgaggacttcttctgggccttcacccctgccgcgggggacttcatccgcttccgcttcttccaacctctaagactggagcggttcttcttccgcagtgggaacatcgagcaccggaggacagctcttcaacacgtctgtggaggtgctgcccttcgacaaccctcagtcagacaaggagg

SEQ ID NO: 20316 - DNA, 2019 bp, Homo Sapiens
  misc_feature (101)..(109): n is a, c, g, or t
  misc_feature (493)..(517): n is a, c, g, or t
  misc_feature (1020)..(1048): n is a, c, g, or t
cccacgcgtccgagcatctaaagtgaagacttaagaaaaacttagtgactactagattatccttaggactctgcattaactctataatgttcttggtattnnnnnnnnngcatatttgtcacagaaatttagttaacatcttacaactgaacatgtatgtatgttgcttagataaatgtaatcactgtaaacatctatatgatctgggattttgtttttattttgaaatgggagcttttttgtttacaagttcattaaaaactaaaaactgtttctgtaaggaaatgagattttttttaaacaacaaaaaatgccttgctgactcactattaaataaaaatctccccaattttttgatagactacttcaagccatttgttacatggtattcctttgcaagtcaatttaggtttcgtgttataacttttcctctttttttaagaaaaatgaaaaaagtaattcttttgtctgaaggggaaaggcattctttcannnnnnnnnnnnnnnnnnnnnnnnnatgacttgcaggcacaatatctagtactgcaactgccagaacttggtattgtagctgctgcccgctgactagcagctggactgattttgaataaaaatgaaagcattaaagggtttccctacaaaacatttttctttaaaatacttttgaaatggctataagcagttgactttcacccttggagagcatcacactgtgtgaggttcagtgattgttgaccctccccagcccctcctgcttctttaagttatctgtgtgcgtgcgcttcctctcaatcttctttgcacgctcatttctttttctctgacccatgagaaaggaaaacttactgatgataatttttaaatagtgtaatttattcatttatagcatgtcaggataaattaaaagaacatttgtctggaaatgctgccgggagcctattgtgtaaatgtaggtattttgtaaaataaccttgaaattgtaaattgacacgtgtttggtcagattgtgtcaagtttaannnnnnnnnnnnnnnnnnnnnnnnnnnnnatttgaaaactactttagcaataattaattccatgattatcacattctgccattaagggatattagtaccgtaatactgaagaaattttattaagtctgaacttctggggtaggcagcttctttgtttcttttctatccacccttgtcggttgaggtatttgtttcttgactaataaaccctttgatacttttagccagaaatcagtctcataaagctatttttgagtatagtttgtgtaaaataaaaatgtttagctttggtaataacttccaagctgaactccctctagcaagatatttttcagtgcttttatttactatgcacttagactatgcactttttctgaaatatttttgtaacacttttttgtatttttgccatttgaaaaggttgtggtgtagttggtctgtaattaagttgcagatttaaaactgctgttagctttgtaaatcaaaatataggtgttttttgtcctggtatatcgtcattccatctgcagctggagctggaatcccattgatcttctagctaccattcattttcttcactgttcacaaaagaagagtgtgaaattcagtgaatgctgttactaatcctgttacgagatgaatctcatttcaccaaaattaaattatgtttttccgctaaaatgatgatacaagttgaagacacatcactctgaaattggaagacctcaccacttaaggctccacagtggcttactcagctgaactctagcagtgtatgtttgaaacagccaaagatggcgatgaaccaagtgtaaattgatctaagcagcccatgcagtttgtgttgaatcaacaaacagtgtattgttgaagtgaaattattttctgaaatgacttgttagaccagttttgaggacatactcaaaagtagagtaataatggctcctgggatggagaaatatgagatgaacctggaacattctattatggtgcctcgtgc

SEQ ID NO: 20317 - DNA, 1484 bp, Homo Sapiens
gcacgaggaagggcaggaagatcccaacagtttgcgccataaatataactttatcgcggacgtggtggagaagatcgcccctgccgtggttcatatcgaattgtttcgcaagcttccgttttctaaacgagaggtgccggtggctagtgggtctgggtttattgtgtcggaagatggactgatcgtgacaaatgcccacgtggtgaccaacaagcaccgggtcaaagttgagctgaagaacggtgccacttacgaagccaaaatcaaggatgtggatgagaaagcagacatcgcactcatcaaaattgaccaccagggcaagctgcctgtcctgctgcttggccgctcctcagagctgcggccgggagagttcgtggtcgccatcggaagcccgttttcccttcaaaacacagtcaccaccgggatcgtgagcaccacccagcgaggcggcaaagagctggggctccgcaactcagacatggactacatccagaccgacgccatcatcaactatggaaactcgggaggcccgttagtaaacctggacggtgaagtgattggaattaacactttgaaagtgacagctggaatctcctttgcaatcccatctgataagattaaaaagttcctcacggagtcccatgaccgacaggccaaaggaaaagccatcaccaagaagaagtatattggtatccgaatgatgtcactcacgtccagcaaagccaaagagctgaaggaccggcaccgggacttcccagacgtgatctcaggagcgtatataattgaagtaattcctgataccccagcagaagctggtggtctcaaggaaaacgacgtcataatcagcatcaatggacagtccgtggtctccgccaatgatgtcagcgacgtcattaaaagggaaagcaccctgaacatggtggtccgcaggggtaatgaagatatcatgatcacagtgattcccgaagaaattgacccataggcagaggcatgagctggacttcatgtttccctcaaagactctcccgtggatgacggatgaggactctgggctgctggaataggacactcaagacttttgactgccattttgtttgttcagtggagactccctggccaacagaatccttcttgatagtttgcaggcaaaacaaatgtaatgttgcagatccgcaggcagaagctctgcccttctgtatcctatgtatgcagtgtgctttttcttgccagcttgggccattcttgcttagacagtcagcatttgtctcctcctttaactgagtcatcatcttagtccaactaatgcagtcgatacaatgcgtagatagaagaagccccacgggagccaggatgggactggtcgtgtttgtgcttttctccaagtcagcacccaaaggtcaatgcccagagaccccggggtgggtgagcgctggcttcccaacggcccaagttgcctcttttaggatctctttggatttgggagc

SEQ ID NO: 20318 - DNA, 2705 bp, Homo Sapiens
  misc_feature (2332)..(2340): n is a, c, g, or t
  misc_feature (2509)..(2539): n is a, c, g, or t
gcacgaggccctgatggagcatccaagtgaaacttttcttgccactattgaggaagatctaatgaagctcatcatcaaatatggcatgactgtagtgcaacattgtgtgagctgtcttggagctgttgtaaataaagtgacacaaaattttaaatttgtgtgggcttgtttcaatagatactatggtgccatttcaaaattaaaaagtcaacaccaagaggacccaaataacacttcacttctaacaaacaaaccagcacttcttagatcccttttcaccgttggagcactatgtcggcattttgattttgatctggaagattttaaaggcaacagcaaggttaacataaaagataaagtacttgaactattgatgtattttacaaaacactcagatgaagaagtacaaacaaaagctatcattggtctaggatttgcctttattcagcatccaagtctaatgttcgagcaagaagtgaagaatctatataataatattttatctgataagaactcctcagtcaatttaaaaatacaagtgttaaaaaacctccagacctacctacaagaagaagatacacgtatgcagcaggcagatagagactggaagaaagttgcaaaacaggaagacttaaaagaaatgggtgatgtttcctcagggatgagtagttccatcatgcagctttatctcaaacaggtgcttgaggcattttttcacacccagtcaagtgtacgccactttgccctaaatgtcattgcattgactctaaatcaaggtcttattcatccagttcagtgtgtgccatatttaattgctatgggcacagacccagaacctgctatgcggaacaaggctgatcagcaacttgtggaaatagacaaaaaatatgctggattcattcatatgaaagcagtggctggtatgaagatgtcttaccaggtacaacaggcaatcaacacatgcctaaaagatcctgtaaggggtttcagacaagacgagtcctctagcgctttgtgttcacacctttactccatgatccgtggaaaccgccaacacagacgagcctttcttatttctttactcaacctctttgatgacacagcaaaaacagacgtgactatgctcttgtatatagcagacaatctagcctgttttccataccagacacaggaagagccgttgtttataatgcatcatatagacattacactctcagtttctggtagtaacctactgcagtcattcaaggagtctatggtaaaggacaaaaggaaagagagaaaatcatcacctagtaaggaaaatgagtcaagcgacagtgaagaagaagtttccaggcctcggaagtcacggaaacgtgtagattcagattcagattcagattcagaagacgatataaattcagtgatgaaatgtttgccagaaaattcagctcctttaatcgaatttgcaaatgtgtcccagggtattttattacttctcatgttaaaacaacatttgaagaatctttgtggattttctgatagtaaaattcagaagtactctccatctgaatctgcaaaagtatatgataaagcgataaaccgaaaaacaggagttcattttcatccaaaacaaacactggacttcctgcggagtgacatggctaattccaaaatcacagaagaggtgaaaaggagtatagtaaaacagtatctagatttcaaacttctcatggaacatctggaccctgatgaagaagaagaagaaggggaggtttcagctagcacaaatgctcggaacaaagcaattacctcactgcttggaggaggcagccctaaaaataatacagcagcagagacagaagatgatgaaagtgatggggaggatagaggaggaggcacttcagggtcattgagaaggtcaaaacgaaattcagactctacggagttggcagcacagatgaatgaaagtgttgacgtcatggatgtcatcgctatttgctgtccaaagtacaaagatcgaccacaaattgcaagagtagtgcagaaaaccagcagtggcttcagtgttcagtggatggcaggctcctacagtggctcctggactgaggctaagcgccgtgatggccgcaaactggtgccttgggtagacactattaaagagtcagacattatttacaaaaaattgctctaacgagtgctaataagctgactaataaagttgttcagactttacgatccctgtatgccgccaaggatgggacttccagctaatgaatttgtacatgcagccaaatttacaggaatttttttaaaaggcagaaaaacttgaaataccaacattctggcnnnnnnnnntcagttttatgaagagtaagtggaacctgggatgcaggaacaaaagaaggaaatgttgggcaaacatttttgtgggagctcccttcgctgttgtgcagcagaaacagattctcagttcatttttactcccactgtattatagtttaacaaaaattgtttatatcttggnnnnnnnnnnnnnnnnnnnnnnnnnnnnnnncaagtgaatgttggaaattagtctgttaatgttcttaataaagtgttcttggagtttaacctagcagcggatggctttctttagcttagcccagtttccagggaagcattgttttttccaggctgtaaaatggcagaatctcctggatatataatttattctgttg

SEQ ID NO: 20319 - DNA, 877 bp, Homo Sapiens
gcacgagggttcttggccgccatctgtactgtagcactggcctctgtgccacagctactgtttcttaaaggactgcttctgccctctgcctgccagtgcccattccactgtgaggtgtcattccctgcatctagtgacaactgtctggattgcctgctgcaaagctttgatttggcaaaggagaccatggaagaatcatggtggatccagaagttatacgtgacccacaccatggcttttaaaagtctacccatgtttgtggcagcaaatgagcacagtaagagcaaagctgaacaacttgcctcctctactcctccaaagcttttcttcaggcagccggtgcacagtggactttttcacttctatactttgtatgcggccttccacacttccagagaatgtcagtgtgcaatgtgtctggagggtggggagaggaattctgtgagccttttcatttcggtgacagaagagatgggcagagcaacttattttccacattaaattgtgcatttgggaagcaagtagccatagtacacacacaacacgctatcagcttgggtaaggacagtgggatttatgtgaacatcaggcaaagccatgagatcaaaccatcccaagcctttcaccaatgaggtacaaccacctgggggctagctaatcttgaatgttttcctgagacaggagcgtatgtgaaaacatcaaacactgcacatgacaggatgggtcctctcatacagatgggatggggttagaaagccagagccagtttttccatctggcgtttcctgtgtcctccaggtttatatgggaatcgaaacagtttgttaatctgattgggaaattccatgggcagatttcccttcctgaaaggccaaaa

SEQ ID NO: 20320 - DNA, 978 bp, Homo Sapiens
  misc_feature (817)..(847): n is a, c, g, or t
gcacgaggcgaatgcatgctgcttatatccggccaggaggagtgcaccaggacctaccccttgggcttatggatgacatttatcagttttctaagaacttctctcttcggcttgatgagttggaggagttgctgaccaacaataggatctggcgaaatcggacaattgacattggggttgtaacagcagaagaagcacttaactatggttttagtggagtgatgcttcggggctcaggcatccagtgggacctgcggaagacccagccctatgatgtttacgaccaggttgagtttgatgttcctgttggttctcgaggggactgctatgataggtacctgtgccgggtggaggagatgcgccagtccctgagaattatcgcacagtgtctaaacaagatgcctcctggggagatcaaggttgatgatgccaaagtgtctccacctaagcgagcagagatgaagacttccatggagtcactgattcatcactttaagttgtatactgagggctaccaagttcctccaggagccacatatactgccattgaggctcccaagggagagtttggggtgtacctggtgtctgatggcagcagccgcccttatcgatgcaagatcaaggctcctggttttgcccatctggctggtttggacaagatgtctaagggacacatgttggcagatgtcgttgccatcataggtacccaagatattgtatttggagaagtagatcggtgagcaggggagcagcgtttgatcccccctgcctatcagcttcttctgtggagcctgttcctcactggaaattggcctcnnnnnnnnnnnnnnnnnnnnnnnnnnnnnnnatgttcatgtacacttggctgtcaggctttctgtgcatgtactaaaaaaggagaaattataataaattagccgtcttgcggcccctagtctttaaagggaaaacctcgtgccgaattcctgcagcccgggg

SEQ ID NO: 20321 - DNA, 908 bp, Homo Sapiens
gcacgaggctaaacatgggtttttaacttcaagatctgccccagtaatttaccaaaggtagcaaaataatagtgaagatggaatatgtctgctacaaatgcttatttttattgttgctattttcagtgtatacataaactaaaaattagggttgatttttttgctctccattttgacttgcaagaaataatacctcaagataatctgatttattagctatttttaaacatttttaatcacaagctgtattagctttgctgctatataggtgttatgtgtaaatgccacctattaatacgggactgaaaacgttagagacacactgcattgcagataaaatgcaggcagcacaatatggcctaaactgccatagttttagaatgtgaaaaaaatgcatgtttacttacctgtatacaccatatgcatgcactagaattattaactaacgaggtgaggtattgcaaatgttcaaaaaagctctcttgaatctaggtagcatgaacaaattataaaatttgtttaaaaaagcaaacttgcatgcattattgtgacttcaagtttaaaaaatcgtcttacatgtgtacaatatgcaaattagttttagattagagagtgcagccattttgtgatctggtcagtagtggaattcgattttatgcagactggatgtaatatttgtaatccctgtgcaattttgtgacgtgcggttctaattcatgtgcagtgatatagtatagataaaagaatgagtaaaagaaaatacaagaattctaaagaaagttggttttagcccctttgatagtccatggttaagacatcctttataaaccaaagatggccagcacactgctaaccagtcaccaatgtaagacccataagaaaccatatttaaaatctgatttttagaa

SEQ ID NO: 20322 - DNA, 2372 bp, Homo Sapiens
  misc_feature (999)..(1012): n is a, c, g, or t
gcacgagggtcgttcgttgggcggtgttggtttttcgctcgtcgactgcggctcttcctcgggcagcggaagcggcgcggcggtcggagaagtggcctaaaacttcggcgttgggtgaaagaaaatggcccgaaccaagcagactgctcgtaagtccaccggtgggaaagccccccgcaaacagctggccacgaaagccgccaggaaaagcgctccctctaccggcggggtgaagaagcctcatcgctacaggcccgggaccgtggcgcttcgagagattcgtcgttatcagaagtcgaccgagctgctcatccggaagctgcccttccagaggttggtgagggagatcgcgcaggatttcaaaaccgacctgaggtttcagagcgcagccatcggtgcgctgcaggaggctagcgaagcgtacctggtgggtctgttcgaagataccaacctgtgtgccatccacgctaagagagtcaccatcatgcccaaagacatccagttggctcgccggatacggggagagagagcttaagtgaaggcagtttttatggcgttttgtagtaaattctgtaaaatactttggtttaatttgtgactttttttgtaagaaattgtttataatatgttgcatttgtacttaagtcattccatctttcactcaggatgaatgcgaaaagtgactgttcacagacctcagtgatgtgagcactgttgctcaggagtgacaagttgctaatatgcagaagggatgggtgatacttcttgcttctcatgatgcatgtttctgtatgttaatgacttgttgggtagctattaaggtactagagttgataaatgtgtacagggtccttttgcaataaaactggttatgacttgatccaagtgtttaacaattggggctgttaagtctgaccatacatcactgtgatagaatgtgggctttttcaagggtgaagatacaagtcttaaccacagtgtaacttacagtttcctttnnnnnnnnnnnnnngtaaacctggcagctatagaatacactatgtgcatttataatagctattttatatattgtagtatcaacatttttaaattaaatgttttacattcacaagtggtggggagtcttgtcattaaggtgtgtgtaatttagagtccagttggttttcttctgactgcacttgttctcatagtagtaaaatgctatgcgcatttataccttgcataagtcctcattctaccacatgttaaccctctagctgataatgcaaacactaactgggggattttatttataagggctctagaaaaaacgagttattcacaccagcatcatcttaactaacattctgaactagttagtgcagcttttcattgtgttgtgtggttggtctcataactaggttgagtttttctcctctgctgaggaaacagtaccgaagttctttttcttgtggcatttgtattataaaaacttggtgtgggggaggagcacaaaactccagcccactgaacctctgccaattaagatggtgttgggttaggttacatctggttactgtcctgggaaaatcatttttatagagatggccttccaagtggttttaaaatttactgaagtttttaggtcaattatgtatgttgactaaatttacaaataaacttgtttatccaactaagtgtccaaaacctaaattgaatgtactaagttttcacatgtcccattatctaggtccttgtatactaatgttttgaacttagatcatttcaggtgttgtttggtggataaaggaaccttttatttataaagatactgtagaaagcatgtgaacagctctctgcttgattaagatgccataatagtgctgtatttgcagtgtgggctaagacaaagtatattaataagcttttcagcccccccactcccgttccgtagtgtagaagcccacaggtgtagaactcagtcttaaacttcagtatgaaaccagtttccttgtgcgatgatggccactaaagcatagtacgtggatgtcagtgagacagcatgagagccagcagtcatcaaagcgttccacgtttgaagttagcaactgcttaaagttatgccctattaaaattgctttctcaaaagtttgggttaatttcaaatgtgatattttggagggaaggtaaagtaggtatctttcaggtcgtgataatgagctcctatgaaaggatgcaatataatgacccgcttttctagaaagttcataatcagctcttgaacaagcacacttgattcctcactgtgcttcagaatgagattaagatcagatgttgggaacgtgctatgctgtaccgtgtctgggaaacaaagtacacaaacctggctacgg

SEQ ID NO: 20323 - DNA, 845 bp, Homo Sapiens
gcacgaggggaaaatgaatgttggaattattggagtaatataatttgtatcaaaatgtccttttgaattaagagatttagttatgtttactaagaatgtaaactttgaattggtttgcattttaacaattaggatggtttattgatgtgaattttgaaatgtagaggtataatgttaaattattttatactttatggaaatcaagtgaaatgtttgaaaaaatgccgccattatcctctggtattttctactctctggaattatgtgctgtaaatgatcggctgtaaatgtgaggcgcaccacccacccctgtgtggaaagtgttgtggcgcttcctgccacccacccacctctctgccgttgctccttgtgacacttgtctgtcgtctcccatccaaactccaagcttacagctacctcagtactgctttgcttgtctgaaacacctcctttgccttccttcagtgtcccgctcaggtgcagcctcctccctaaagctcatctcagcttttgatctgaatgatgatggaaacatgcagacagcctctcagtcttactatttaatgttgtagctgggaaaaaacccagagaggttaactgatatactgggttgggactaggatgtgggttttgtgactctgaatcccatgttctcaaactacgctgccttccgaagtctggcatttgttagctcatgcttccttgtagtccagcttcttatgtgcctgttatattctccagtaagattgtaagccccttaagggcagggacgtctttgcatctctagcactgctatagtgttctatccttagttatgaactagataaataaatggtggtggcaac

SEQ ID NO: 20324 - DNA, 1126 bp, Homo Sapiens
gcacgaggctggcaagcgtaatgttattgaagctgtttatagtagactgaatccacatagagaaagtgatggggcctccgatgaagcagaggaaagtggatcacagggaaaattggtggaagctctcaggcaaatgagaattaatcataggggaaactaccgacaacttctggaggagatgctgactagttacaggctagctaaagtagagggagaagaaagccctgctgaaccagctgccacagctacttcttcgaacagtgatgctggaaacccagtgacaatgcaggaaagccatactgaatcagaaagtggtcttgctgaattagacagctctaatgaagatgcagggacaaagatgagtggtgaaaaaatatgactttcctttttggtaatatttttgtgatctttgatggtttttaacctaggaagtgtaatgtatgcatttatataactgttttgttatttgaatcttggaaaactagttttattatattcagatagccttgttttttaaaaaggcctttgcatacacctttatgagatagtgtaaaattgactatttatagtactatggatttaatgaaattatatgtcatttcacattgtatgccagaaattaggctaccaattatgaattaaagtcagtagttaaattaatactagatagaattagaaattttgattagagagattatgctatattatggaaaaacttgttaatgtagaattatactgcttcatattattttacctattagtacactcatagttagctttgtaataaatttatgttttctttaataattttagttcttcaaagaatggctgatgctggcctgtaatttttctttcaaggatgataatttgtgtgttgtttgatttgtttatattttacatctctgtagttttatttttagaagttgtgagatattggatgtgtggctatttttcctttctctgtattctttatgaaacataacttttgaaaaacctatgtattattcatacagctttggtttgtatattctgtatagcctaactacacacatcaaaatgtatgtcaaccaagtgtttagaatgaaattataagtgttttaagtccaaataaagcatgtgatgtgga

SEQ ID NO: 20325 - DNA, 986 bp, Homo Sapiens
gcacgagggtgaatgggactgagctgaactgcagctgggtgcacctggacctgggcagtgatgtggcccagcccctcctgactctgcctggcacagcctgtggccctggcctggtgtgtatagaccatcgatgccagcgtgtggatctcctgggggcacaggaatgtcgaagcaaatgccatggacatggggtctgtgacagcaacaggcactgctactgtgaggagggctgggcaccccctgactgcaccactcagctcaaagcaaccagctccctgaccacagggctgctcctcagcctcctggtcttattggtcctggtgatgcttggtgccagctactggtaccgtgcccgcctgcaccagcgactctgccagctcaagggacccacctgccagtacagggcagcccaatctggtccctctgaacggccaggacctccgcagagggccctgctggcacgaggcactaaggctagtgctctcagcttcccggcccccccttccaggccgctgccgcctgaccctgtgtccaagagactccagtctcaggggccagccaagcccccacccccaaggaagccactgcctgccgacccccagggccggtgcccatcgggtgacctgcccggcccaggggctggaatcccgcccctagtggtaccctccagaccagcgccaccgcctccgacagtgtcctcgctctacctctgacctctccggaggttccgctgcctccaagccggacttagggcttcaagaggcgggcgtgccctctggagtcccctaccatgactgaaggcgccagagactggcggtgtcttaagactccgggcaccgccacgcgctgtcaagcaacactctgcggacctgccggcgtagttgcagcgggggcttggggaggggctgggggttggacgggattgaggaaggtccgcacagcctgtctctgctcagttgcaataaacgtgacatcttgggagcgtt

SEQ ID NO: 20326 - DNA, 891 bp, Homo Sapiens
gcacgaggattatatctatgcactggtgagcatctcctgattccacttacttttctccctgtgaacagtttaccggtgccatgctgaagagaaagacatctaagtgataacatgaatgaagtcttaaaatttaaagtatttttactgctatataaactaaagactacattgtgcatattttgttaacactgtctcttgttatgataaacactgaaatagcatgttaaacagttgcctatactttaatataatcagttggggaaaactggccttttctcccccactgtatgattgtttcttgaaaggtaaattgctaattttatacagtgtaattctgttcttcacaaaataggtttcattattctatatttaaactgttggtcagaaaatgatctgcaattcaagtaagtctgcattacttttttctttaaaaagtactttaacatgccttatttattatattagcaaatgagctaataacagatgaaattttcattttttgacagatataaccttgcataagtagtatttagggtgattttgatactatctttagagttttgcattggatattaaaaaatatattggcacaatgtattggaagaaaatgagtagtatctggtttaatttttaatatttagggacattttaaaaaatcaatgttttaattagactaaaaattctttatattttttatttactttttaaagaaacatctgtcaaagtaatattgattccaaactgatgtttgtgtgaatttacatgtctattttcatgaactaagaatagagtttctttgagttgaggagaaaaaaatatatatgtgggtccatttattaggttaaagttgacccattcagtgtaaaaataaccatagtgtgtgagctaaag

SEQ ID NO: 20327 - DNA, 912 bp, Homo Sapiens
ctgaaacaggcatacaggctctagtcaagaatgaattagagtgaaggaaagctgtgtgacacctggcattcctctctgttcatggagcttctttgaggcttgaagtttgattttactatctagacctctctggctaatacctattcttcaaccacctcggttactctgacataggaatttacttcttttccttgagtggaaaacactttagaaaataataacaaacattattataaactaatatatgtgagagtacttagttgaaacaaaaaggaattttagtagacagtattatattatctttgaaaatcaaggagaagtttatgcaacttaaaatgtttacacactgtgctgcaatctactgtttgtgaatgtcaatgtattatcaggaaacatgtctatacgatcgcagagttgtatttcctcacaaacttctttacgaagagtgaaatatgtttttgtacctctcagtttcagtcagggacatattttgtgcaatatttctgtgattgtgcctatgtgtgatgaatgaatgcatttcaatcatacattgcctaaatcataacttgatgatgcttgggaaagaatcaacagttaaaacttcatgaagttctaatgtctgtgttccaaaacacatcacattattaggttgtagggagatatgtatgtgtgctccctggggtggggagttttctagttactagaccatctccatttttagcacttggcatcctcatgatccttttataaataggagattaacaggagagcagcaatacgattttgccaatggaataacagatttgccggcattcactgaaagaaggcagatattgggtccttgtgacttcactgactcttccaattgtatgatttatcatgtattagataacccagtttcagaataataaa

SEQ ID NO: 20328 - DNA, 1013 bp, Homo Sapiens
ccatgggccttgcgggaggacctgctgcggggcatctacgcttacggttttgaaaatccatcagcaatccagcaacgagcaatcaagcagatcatcaaagggagagatgtcatcgcacagtctcagtccggcacaggaaaaacagccaccttcagtatctcagtcctccagtgtttggatattcaggttcgtgaaactcaagctttgatcttggctcccacaagagagttggctgtgcagatccagaaggggctgcttgctctcggtgactacatgaatgtccagtgccatgcctgcattggaggcaccaatgttggcgaggacatcaggaagctggattacggacagcatgttgtcgcgggcactccagggcgtgtttttgatatgattcgtcgcagaagcctaaggacacgtgctatcaaaatgttggttttggatgaagctgatgaaatgttgaataaaggtttcaaagagcagatttacgatgtatacaggtacctgcctccagccacacaggtggttctcatcagtgccacgctgccacacgagattctggagatgaccaacaagttcatgaccgacccaatccgcatcttggtgaaacgtgatgaattgactctggaaggcatcaagcaatttttcgtggcagtggagagggaagagtggaaatttgacactctgtgtgacctctacgacacactgaccatcactcaggcggtcatcttctgcaacaccaaaagaaaggtggactggctgacggagaaaatgagggaagccaacttcactgtatcctcaatgcatggagacatgccccagaaagagcgggagtccatcatgaaggagttccggtcgggcgccagccgagtgcttatttctacagatgtctgggccagggggttggatgtccctcaggtgtccctcatcattaactatgatctccctaataacagagaattgtacatacacagaattgggagatcaggtcgatacggcccgggaagggtgtggccatt

SEQ ID NO: 20329 - DNA, 1509 bp, Homo Sapiens
ctttcagatattattccgagtccatcatctacaggattattaaagtctggtaagaccaattctgtggaatctcttccagaactgttgacatcagactctgaaggaagctatgcaggagtgggtagtcctagagatttacagtcccctgatttcacaacaggatttcattcagataagattgaggcgaaagtcaaaccgtatgttaatggtacatctcctgtgtattctagggaagatttaaaaccatgggaaaagtcaccaatacttaaaatatctgctccacagcctattcccagtaacagaattgatactaccagctctgccagttgggttgctggttctttcagtcctgtcagccctcctgttgtggatctcagaactatcatggaaatagaagaaagtagacaaaaatgtggagctacaccaaagtcacatttaggcaaaacagtttctcatggagttaaactttctcagaagcaacgaaaaatgattgcattgactaccaaggaaaacaattcaggaatgaatagcatggaaacagttttattcactccttcaaaagtccccaaaccagtgaatgcatgggcatcttctctgcattcagtttcatccaagtcattccgggatttcttactagaagaaaaaaagtctgttactagccatagttcaggcgatcatgtcaaaaaagtttcttttaaaggaattgaaaattctcaggcaccaaaaattgtcagatgctctacccatggtaccccaggaccagaaggcaaccatatttcagatttaccacttctagacagtcccaatccctggctatcttcttcagtgactgctccatccatggtagccccagtcacttttgcatctattgtagaagaagaactacaacaagaagcagctcttattagaagtcgagaaaaaccgttggctctgattcagattgaggagcatgccatacaagatttattggttttctatgaggcatttggcaaccctgaagagtttgtcattgttgaaaggacaccgcagggaccactggcagtacctatgtggaataagcatggatgctagttcactgtggagttgagatgcattttacataattatgagtttgttcatataaagaaaagctgtggaaaagagtcttagagattttgtaatatcattctaaatagattaagaaaagatataatttctttactgcagttaaatcatataatgtttgtatgattaaaaataaatttctcagaattgtgattttagtaactttatataaaatgtgtgagacaaaaacttattaaggttaaatagaattgtttcttctgaataatctaacaaaggaaaatataagtgattgaatcataagatataaggggggtaaagtattaaaaataacttttttgtttgataacttgaaaatttagaagattttgccagtatgtgttgttgcttgacttcttaatatggcattgatgaatttaaagtaggagcatcagttattacttctga

SEQ ID NO: 20330 - DNA, 1580 bp, Homo Sapiens
gcacgaggatttgttttagctggcagtgctgaagaaggagtcatgactccagaactagcaggagtgattaaacggttatggcgagatggtggggtacaagcttgcttcagcagatccagggaatatcagctcaatgattctgcttcatattatctaaatgatctggatagaatatcccagtctaactacattccaactcagcaagatgttcttcggacgagagtgaagaccacaggcattgtagaaacacatttcaccttcaaagacctatacttcaagatgtttgatgtaggtggccaaagatcagaacgaaaaaagtggattcactgttttgagggagtgacagcaattatcttctgtgtggccctcagtgattatgaccttgttctggctgaggacgaggagatgaaccgaatgcatgaaagcatgaaactgtttgacagcatttgtaataacaaatggtttacagaaacttcaatcattctcttccttaacaagaaagacctttttgaggaaaaaataaagaggagtccgttaactatctgttatccagaatacacaggttccaatacatatgaagaggcagctgcctatattcaatgccagtttgaagatctgaacagaagaaaagataccaaggagatctatactcacttcacctgtgccacagacacgaagaatgtgcagtttgtttttgatgctgttacagatgtcatcattaaaaacaacttaaaggaatgtggactttattgagaagcatggatgttagtgaaagttactacagtgtggagtgttgagaccagacaccttttgctgtctcatggggcagctacaagcatgaacgggaccagggaatggcagcagcatgcagaatcttagcactctttagcacaatattttgtattagggaacttttaattgacatgagatgctaaagtcagacattggaattggaagaactataaagtgtgattcgatcgtcaagacatcacttggatttcttaatcttaaatgcttatggaagatgtgaagttgaggtgctgcattctagaacttcaatatgtagcttactcttttttccccccttcttaaaccaccagtggttcatttttaaggttttttcatcaagagaagaataactttactaaattttatttctttatttgcaaaagaatctttattaaaacaaacaatcttaactatgcacatgatgtgaccagatcatcttgaaaatattcctctttagtaggaactctttgtttttaactcttggtatggtcagaatataatacttccataattacttataattctttccggttactggggctataaatacaactttttaaatgaaatttatgttattatcctgctcaaagtaccattatggtttccatatggtaattacattggaaagttctgcaataagattctagttctctcttttctttaagcttatggttgaaggtaaccttgtttgtgcagattaccaaattactgctgatgtagtatgataaagtcagcttcttggatacagacacaacccagggcagctgccaatcagaaatgcaaattgctaa

SEQ ID NO: 20331 - DNA, 835 bp, Homo Sapiens
  misc_feature (373)..(385): n is a, c, g, or t
gcacgaggtttgaaaacagataaatgtaacaaccagtcaaagaagcaggggaaaagtaagctcctccaaagttgcttgcagtgctggaaatagatctcatttttaggttttctcttcgttccagataccaaataaatgggacagagaataaaatttttgttaaaatatgtgctcatctcctaagtagctcttcagagtctgaccgtaagtaaaaacacacagaattgtgttgactgggggaggtgaatcacaaaaaagttacgaggagtttaagagttaaatattatttgatcgtggctgtcaaatttagtgaacaacatagattggatttggagttggtagtaggtatggttctcataccagaattctcttnnnnnnnnnnnnnggacaattggaattgccttatttatttttaaaatcaatgcttactagttggtaggattcccaggtcagcagcagggttgattaaataatcttgacaatgagcagctgccatcttgggggatttcattctgtggttttttaaatgtttcgtctttgatgctaccatccagggcttcttattgtgaccttgtagcctattttgttcctgctgttctctaacatggtgcagttcacgcagactggtttaggtacttcacaactcaccattgtctctctgaccccaagcctagtcccttttacatcaccatcttctcagacttcttgcctattcttaaaatatgttttggttatgattgaattagacatcagcttagcattcctgtaacgtttaacgttgttgaagttcaggcacatataaaattctccctgatgtgtgtgtaatataaacaaa

SEQ ID NO: 20332 - DNA, 1570 bp, Homo Sapiens
  misc_feature (1019)..(1031): n is a, c, g, or t
gcacgaggcgcaagtgcgcgtggccgtggcggctggggtggggttgagtcagttgtgggacccggagctgctgacccagcgggtggcccaccgaaccggtgacacagcggcaggcgttagggctcgggagccgcgagcctggcctcgtcctagagctcggccgagccgtcgccgccgtcgtcccccgcccccagtcagcaaaccgccgccgcgggcgcgcccccgctctgcgctgtctctccgatggcgtccgcctcaggggccatggcgaagcacgagcagatcctggtcctcgatccgcccacagacctcaaattcaaaggccccttcacagatgtagtcactacaaatcttaaattgcgaaatccatcggatagaaaagtgtgtttcaaagtgaagactacagcacctcgccggtactgtgtgaggcccaacagtggaattattgacccagggtcaactgtgactgtttcagtaatgctacagccctttgactatgatccgaatgaaaagagtaaacacaagtttatggtacagacaatttttgctccaccaaacacttcagatatggaagctgtgtggaaagaggcaaaacctgatgaattaatggattccaaattgagatgcgtatttgaaatgcccaatgaaaatgataaattgaatgatatggaacctagcaaagctgttccactgaatgcatctaagcaagatggacctatgccaaaaccacacagtgtttcacttaatgataccgaaacaaggaaactaatggaagagtgtaaaagacttcagggagaaatgatgaagctatcagaagaaaatcggcacctgagagatgaaggtttaaggctcagaaaggtagcacattcggataaacctggatcaacctcaactgcatccttcagagataatgtcaccagtcctcttccttcacttcttgttgtaattgcagccattttcattggattctttctagggaaattcatcttgtagagtgaagcatgcagagtgctgtttcnnnnnnnnnnnnnctcttgaccagaaaaagatttgtttacctaccatttcattggtagtatggcccacggtgaccatttttttgtgtgtacagcgtcatataggctttgcctttaatgatctcttacggttagaaaacacaataaaaacaaactgttcggctactggacaggttgtatattaccagatcatcactagcagatgtcagttgcacattgagtcctttatgaaattcataaataaagaattgttctttctttgtggttttaataagagttcaagaattgttcagagtcttgtaaatgttattttaataatccctttaaattttatctgttgctgttacctcttgaaatatgatttatttagattgctaatcccactcattcaggaaatgccaagaggtattccttggggaaatggtgcctcttacagtgtaaatttttcctcctttacctttgctaatatcatggcagaatttttcttatcccttgtgaggcagttgttgactgagtttttcatccttacaatcctgtcccatggtatttaacat

SEQ ID NO: 20333 - DNA, 1421 bp, Homo Sapiens
gcacgaggattttaaacacacaagatttaattgaaaggacatcaataatcataattgtgtatttaacaggtggttttttattagttttcttgtgtttcagactttatgcagccatataaactgttctctaggcatgctgtgacattttaataaaaagcaaaaggagcatttataattatctcatttgttaaggctgagaaggttgtttttataataggtaattatattgaatgcattttcactgaatatggtatgtatgctaaattatatgaacctttccccaagaagggccctagaaattgatgtggctttcctcttaaatattaattattagtcctgaaagaaagataacatatgtgatttttgtggttaggagagttgctgtcatgattgttttttcttcagcctcctctgacttttcttttggggcttcagattttatgattacatcttgtccccctagaacatcccccttcctcccatactgcttttaaacagatgcccaagaaggcaagcaggaatgcctcttgtgggggagggcagggagaaataactagttcaaaccaactatctatctatgctttgcaaagactaaggcgtattataggaagagggctagaaacctaactgattcttctcagttttctcattttaaaacagcccagtattcctttgtatcctcaagggtccttgagaatacttctgttattgagaccctgtgggctacttgtactgtacctcctctcaagccaagaagggctgtgggataatttaccatgaatccttagtagcaatgacagcagagttaaaaaataaaaggtgttttactttcaggctcttgttttggttcagaggagattttaaatattgaatgacacttctacagaacaacggtttttcttctgccaaggctacttcctttaacgaagtgcctttaattcagccttatccaactagggaaaataatgttggacaagtctaggatttgaagagtcagtgaacttttagtgtcagggaataaacatggtgggtagattaggtttgaaaaaaacttccttagaggtatttattctcaatacctgacaggggcccatgggaatgacttcagaagcatcccggataatagatgggtaaaaagtctaggcaccctgaagaacaggtgagacagctggcctctggacagaggtaggcatagtacagtacgatatatcattcctctggtcctaaatatacaaacttattcatgtttttaggtgatgatggtcattgaaactcacttctttcaggtgtagctacaattgtgtatgtacaatattagagaaaggacaggctttttatgagtaacacacaccatataataaaacagcctttctggctgacacatggttaaatgcataccttcccagtactggggggaaaaa

SEQ ID NO: 20334 - DNA, 525 bp, Homo Sapiens
atattaaggagagttttattgtaaagataggcaggatctacaattttatatttttccaagtgtataaaaactctcagagtagagatttatgtctgtcgtaccagcagacagattatttataaattgggaaagggaaagtttactttttgccaaactgaggcagagggggtggcaccttaatatcttggcctctctccaacttcttttcacaatccaccaggtaattgactccatcgatgactatctgaacaagctcaacctctgatcgaccaattctatctatgttggaaatgtcgtacacatctgcgaccgcggcagtgtccacaccacctgtgccacgcttctggagtcttaggttttccaggatcttagaaaagcgtgggtccttgctgagctttgggatcctaacgtggacaccagctcgtagtcctgttccaaggttcgaaggacaggtcaaaatgtatcctaggcgctcattccacatgaactcccagcctcgttcttggattaaccgttccctcgtgc

SEQ ID NO: 20335 - DNA, 664 bp, Homo Sapiens
gtggtttgagaggctgggagggttgaggggaagataaacttttaaaaagctcttatctttcatttcaatcagttaaaaatacttgctcagtgtaacaattttgcttctcagcttccactctaatattgttgtgccattaagcaatttagctaatcctgacatttcttagattcataatgttaggagcatttaatctgtattttacaagttaggaagcagaggatcagagatgggaaaggactagcccaaggccaacattaacaagccctctaacaaaaactttacaatacatttatgttgaatggaactccaagatctcacctctccatccaggaatggagtccatgtaatcaaagtgaacttaaaaataggacaggttcaacaagtcaggagattcacagcaactgatcaaagggagtccagtcaacgtgagcaagcgtgattatgatgaggaagccccctctgctttaatccacaaggaacgtaacctgaagtaacctgatgttaaccaatctgctgtgtctactatgctgtttccttgttcctgctagtgctgctttacaaatgcagaccattctatcatacctggcagggcttctgttttattttgtaggctggatgctacccagttcatgaatcgctaataaaagccaattagatcttt

SEQ ID NO: 20336 - DNA, 394 bp, Homo Sapiens
  misc_feature (56)..(65): n is a, c, g, or t
  misc_feature (169)..(219): n is a, c, g, or t
gcacgaggatgaaagtatctgccttcttgggcaaatgctaataaaacctttatttnnnnnnnnnnccaaactattctttatttgatagccctgggacatggtgccctccacccaataaagcaccctccagcaaccctcccacccctcacccgatacatagacatagggnnnnnnnnnnnnnnnnnnnnnnnnnnnnnnnnnnnnnnnnnnnnnnnnnnngagatctggatccgtcttcacttcctgttggcctgagcagtaccaataacacactggttcaccttggaggcaaagcgtagagagttgagggactcggagacgttctcttccagtggagaaatgttcacaaacatgagcatcttagcactaccacccagagagttctgcctcgtgc

SEQ ID NO: 20337 - DNA, 726 bp, Homo Sapiens
gcacgaggctcactcattggcttctttcccacacacctgaagagcactgactgtgtgccgggcactagtgatacaaaagagtgtgacagttgttcagtctgcattttcgatcatgggctacatgccgagtgctggggcacagagatgaacaagatcggttccttcacttcttcatgccacaagtgtttattgagcacctgtgtgccaggcctcacagactcccagttgggttgaagaatggttgactgagtttgattcttcctgtaccctcggtcgtctgagctgtgtgcagacaacatccccccaccacccaagagggagggtagctcttccgccaccaggggcaagcacaggtcctggtggccccacgccacatgttagcccccctggagggggcgccagttggagacgggggctgggtgtccctggcccactcccggtcccctgtgctttacctccttgcccttgtgtctcaggtgtggtccctgcctgcttgatgaagttgctctgttcaagcctttggtgggatcatgtgtttgggggcttttaggggacccagctgcactggggcactgcccgtggcctgggtaggacatttcccagcaagggctggaggagttgccgtgccttcagcctgaatcgaatgtcagaaccagccagcggtgcttcaccctcttggggataacttgcttagttttttaataaatgttcctggttggttttcac

SEQ ID NO: 20338 - DNA, 932 bp, Homo Sapiens
  misc_feature (791)..(810): n is a, c, g, or t
  misc_feature (813)..(829): n is a, c, g, or t
gcacgagggcgggcagacagcccctgccagcacccgcctcttccaggtccgcgccaacagcgctggagccacccgggctgttgaggtattgcctaaggctggtgcactgaactccaacgatgcctttgttctgaaaaccccctcagccgcctacctgtgggtgggtacaggagccagcgaggcagagaagacgggggcccaggagctgctcagggtgctgcgggcccaacctgtgcaggtggcagaaggcagcgagccagatggcttctgggaggccctgggcgggaaggctgcctaccgcacatccccacggctgaaggacaagaagatggatgcccatcctcctcgcctctttgcctgctccaacaagattggacgttttgtgatcgaagaggttcctggtgagctcatgcaggaagacctggcaacggatgacgtcatgcttctggacacctgggaccaggtctttgtctgggttggaaaggattctcaagaagaagaaaagacagaagccttgacttctgctaagcggtacatcgagacggacccagccaatcgggatcggcggacgcccatcaccgtggtgaagcaaggctttgagcctccctcctttgtgggctggttccttggctgggatgatgattactggtctgtggaccccttggacagggccatggctgagctggctgcctgaggaggggcagggcccacccatgtcaccggtcagtgccttttggaactgtccttccctcaaagaggccttagagcgagcagagcagctctgctatgannnnnnnnnnnnnnnnnnnntgnnnnnnnnnnnnnnnnnacagtatccaaaaatagccctgcaaaaattcagagtccttgcaaaattgtttaaaatgtcagtgtttgggaaattaaatccaataaaaacattttgaagtgtg

SEQ ID NO: 20339 - DNA, 1175 bp, Homo Sapiens
aaggctttaacactttcttatctgaaacaaatttaactctaaaaacatatgactcaacaatgtacaaagatttaaaaatttgccaatctgtcaatcattttaaagagtccatataatatacacatagcaatataatattcataaccagaaactgcactaagtaaacacatcatttagtttaagctctacctgaaaacatgctgttttattaaaacaaaacccaaagacttaaatctcaagttatatggttttacaattaagtcttactgaagcagcacaaatttcctttcttacaaacaagttaatatgcaggaaaaacccacaaagtgcacaccaacaatgggacaaattgtaatatgtgaaatacaaataaatcctgaagttaatctgaaaaatgtcaaggagttaccaaaaaggttatgtagtgcccttgatttttattttacctacaagtctacaaattctaaaatttactcaattgatttaacttttttaataaacagcaccagtcttgcccattgatacaattaaaatttgaccttctcagttcttagttcacaagtttattatgaaaaacactgcagtgctcttgtgcagtcacatcgtcttacaggaaggggaaaaaacagttctgttcaaaacaactcaccaggttctgacaataacaaagaacaacatggggctgagatttgagtagggaataaactgagtgcagacaaatcatataattaaattaaacggtatccctgaaaataaaaagaacaatttcaaaactcacaagtaaaagggaggccttggtaattatttttaaaaatgttcattaagctccaatgattgtttgctgctatccttatctacagtcatgctgagtaaagctatagctaaatggaagttaaattgtattcacgaggtgttaatgtttacatcttattatctgcagtctctcagagaaagcaaaagtaactacaaatagcgctatgccaaaaactggtttcttgaccaacaatgtcccttcagcatgcaatgaactggttcattctaaagtggtcacggctgttgatgacaagaggctttgtatttttatatggcacatcttttggtccatgtgaaaacaagttttttgaatgttaactattttctgacactttggagttactgttgctcttcccatttcc

SEQ ID NO: 20340 - DNA, 458 bp, Homo Sapiens
gatcccccgggctgcaggaattcggcacgaggtgacaacgttcatgtggctctttccttggttgaatataaaccataacttcagaaagcaatggagtttgtctttggaacaacatttgtttgtgacaatatggataatgccaaaaaagtggcctttgataagaggataatgactagaactgtaactctcggaggtgatgtgtttgatcctcatgggacattgagtggaggtgctcgatcccaggcagcttccattttaaccaagtttcaagaactcaaagatgttcaggatgaactgagaatcaaagagaatgagctgcgggctctagaagaggaattagcaggtcttaaaaacactgctgaaaagtatcgccaactaaaacagcagtgggagatgaaaactgaagaggcagatttattacaaaccaagctccagcaaagctcatatcacaagcaaca

SEQ ID NO: 20341 - DNA, 1803 bp, Homo Sapiens
gcacgaggcaggtttctacattaaaatgtcaaaatgaacagctccagacggcagtcacacagcaagtatcacagatccagcagcacaaagaccagtataatcttcttaaaatacagctaggaaaagacaatcagcatcaaggttcttacagtgagggggctcagatgaatggcattcagccagaagaaattggtagattgcgagaagagatagaagaattaaaacgtaatcaggaacttttacaaagccagctgactgaaaaggactctatgattgaaaatatgaaatcttcccaaacatctggcacaaatgaacagtcttcagcaatagtttcagctagagattctgaacaagttgcagaattaaaacaggaactggcaactttaaagtctcagttaaactcacaatctgtggagatcaccaaactacagacagaaaagcaggaactgttacagaaaacagaagcgtttgcaaaatcagttgaggtacaaggagagaccgagactataatagccaccaaaactactgatgtagaaggaagactgtcagcattattacaagagaccaaagagttaaagaatgaaattaaagctctgtctgaggaaagaactgccattaaagagcagctggattcatctaatagtaccattgccattttacaaactgagaaagacaaactagagttggaaattacagattctaaaaaagaacaagatgatctcttggtgctcttggccgatcaagatcagaaaatactgtcattgaagaataaactcaaggatcttggtcatccagttgaagaagaggatgaacttgaatctggagaccaagaggatgaggatgatgaaagtgaagatcctggcaaggatctagatcatatctagttttcaaatctctaggaacaatagagattatatcataactctgaagatggactctaaactttggtttacctccatggaaaataaagatttagaaaccaggtggaaaacattcactattaagactattgatatatttttgtaatgttgccacccatgttgaaaaccttaaaactgaatttatgtagaacacacatcttttatttaaatccatctgaactgtcccaaaatgtaatttgcaaagagcttcaaacaccaaaaatataccattttaaggcatgtggtgacaatgctatttgccttagttcattcgttgtttactttgcaaaatttgtgacttttaagtactaacacatttgattgaatgtgtattgaattggaattattatttctaaattcagcatttgagtccttagttgatgattttcttttaaagaaattagtttatttaaaagcaagatagcctgggttgggagttagtgcatatcatcagccctccatctaatgtgattgctaagatgtgcaggataggacagcttagaatgagtgccttgacacctacatatggctgcattccatacctcagtgaagaagccgaaggatgctgacacacagtgatgtggagggcattccggagaaacttttgcaacagtgtattaatgtgattggttttctttttgttttaagctaaacatctaaaacaaatttcaagttaacagttcatacaactcagatttagtattattgtttatcataaaacatattatgttcctagttttaaaaagacccaaagtatgattaatataatttattggcatttttgctgaataggtttaagtcagataatagattttaaaaaagcaaatgaggcaatgtgtcaaaatttaatgtttcataataaaaatagatacgttgacttaat

SEQ ID NO: 20342 - DNA, 1283 bp, Homo Sapiens
gcacgagggccagaacggcgacttcacgcgcgctctcaagaccgtcaataagatactacagatcaacaaagatgacgtaactgccctgcattgtaaagtggtatgccttatccagaatggaagtttcaaggaagctttgaatgtcatcaatactcacaccaaagtgttagccaataactctctctcctttgaaaaggcatattgcgagtacaggctgaacagaattgagaatgccttgaagacaatagaaagtgccaaccagcagacagacaaactgaaggagctttatggacaagtgttataccgtttggaacgctatgatgaatgcttagcagtgtatagagatctcgtccgaaactcccaagatgattatgatgaggagaggaaaacaaacctttcagcagttgttgcagctcaaagcaattgggaaaaagtggttccagagaacctgggcctccaagaaggcacacatgagctgtgctacaacactgcatgtgcactgataggccaaggccagctgaaccaggccatgaaaatcctacaaaaagctgaagatctttgccgccgttcattatcagaagacactgatgggactgaggaagacccacaggcagaactggccatcattcatggtcagatggcttatattctgcagcttcagggtcgaacagaggaggctttgcaactttacaatcaaataataaaactaaaaccaacagatgtgggattactagctgtaattgcaaataacatcattaccattaacaaggaccaaaatgtctttgactccagaagaaagtgaaattaaccaatgcggaaggagtagagtttaagctttccaagaaacaactacaagctatagaatttaacaaagctttacttgctatgtacacaaaccaggctgaacaatgccgcaaaatatctgccagtttacagtcccaaagtcccgagcatctcttacctgtgttaatccaagctgcccagctctgccgtgaaaagcagcacacaaaagcaatagagctgcttcaggaattttcagatcagcatccagaaaatgcagctgaaattaagctgaccatggcacagttgaaaatttctcaaggtaatatttctaaagcatgtctaatattgagaagcatagaggagttaaagcataaaccaggcatggtatctgcattagttaccatgtatagccatgaaaaagatattgatagtgccattgaggcttcacacaagctatccagtggtatcaaaaccatcagccaaaatcctcctgctcattt

SEQ ID NO: 20343 - DNA, 1340 bp, Homo Sapiens
  misc_feature (1115)..(1149): n is a, c, g, or t
gcacgaggcgcttccgctcccggcgcaggcgctgcagcttggccagagcggagggggctcgggagaggagtggacgccgctggccaggatggtgctggagagcgtggcccgtatcgtgaaggtgcagctccctgcatatctgaagcggctcccagtccctgaaagcattaccgggttcgctaggctcacagtttcagaatggcttcggttattgcctttccttggtgtactcgcacttcttggctaccttgcagttcgtccattcctcccgaagaagaaacaacagaaggatagcttgattaatcttaaaatacaaaaggaaaatccgaaagtagtgaatgaaataaacattgaagatttgtgtcttactaaagcagcttattgtaggtgttggcgttctaaaacgtttcctgcctgcgatggttcacataataaacacaatgaattgacaggagataatgtgggtccactaatactgaagaagaaagaagtataataataataacaatattttctcattctttgtgtatagaaaattttaaaatggtggtcttaattattactactggttgaacaattatttcttccaatttattttcttcctgcactactgtttgtatttgatcctttgtctattcagtcacttaattagaaattaaattgtcaagcctcttattctgacttcaaagaattaatgtatcttccaacaataaaatcacttctgattttaatctaggaaaacctaaattgtggctatggatccaaagctgtttgtttctttgaatatcaatattttcaacaggatcttgtatttaaaattcccacctacattgttaaatatgttattttttcatatctcttttggttttgataatctgaagtgtttttttctcgttttggccttccaaactgcatttggttaggtgaattaagaaaaatattgccatcaagaattacttgtgttttcacagagatagactctttgctttatagagattgttgtgtatttaatatgaatatcccagctttagaaaagaagtaaactggatacaaaaagttccattgaggaacagttatttacagtataaaagatttgtttactttacaaaaggctnnnnnnnnnnnnnnnnnnnnnnnnnnnnnnnnnnnattttaaactgactcagtgacagctggggtggaatggcaagaacacttacaaccaaactcatgggctgctgcaatttgaagataattggtaataaacataagacattaattcatattaaaatagttcagtgttcaaaattgtgtttatgtggatatttttctctttttaacactataaaccattaaaatac

SEQ ID NO: 20344 - DNA, 1127 bp, Homo Sapiens
caaaatcccagttccacagaactgattttattagccaatacataccaaagacgggtggaaaagaagtattatttttgtagttttctttcataatggaagccttatgctattacagactgcagttttccagtcttttgattaagccttgccagttgtgtgccgctgcagcaccaaagaaactgttttgcagcctgtcacctcctctggcaggcagccatcctggtctcggaaagtggggtcagcaccagactggagcagcagctctacaatatccagaaactcacaggcagaggcataatgtagagctgtttggccttcattgtcctgacagttaatgtcagctctatgttgcagcaacactgtgactagttccttatgtcctcgatcacaggcccagtgaagtagagccctaccctcttcatctttcacattcacatccacatttttcgatttgatggctttggttatatggtcaatgttgttttccctgcagtaatcaaatatatttttgtcttcttccctgatggtttcttcatgatatagagaactaataactggcccaccaaaacctgtatttgcttcttttcctttcttctctggtatctgaggattccaacctggatctagttttttaactactgcgatatattcctgcattgcttggctggggcttgaatcaccaagtgctttccaagcttcccatttttgctttccttcaaaatcaaagaagcttggtttaggagtattacaatttccaactttgacctgtttgtacctggcatacaggtacaagagctgctccctgctggccacctgaatcaggccttgcaggtgcgcggcagccttctcaaacagctcggccaggcaactggtctcctcgatctcagggctatgggggaactccacctccccggagtcgtcccctgagctcagctctccaccgctgtcgccggtgatggcccccgcgggcaggaatgatgaagccatgtctccttgctcgctccgtccctctgtgtccggtctgtcctccttggattgggtgtaaggccggcttggaggcctggcccaccagtctgggtcgcgagcctgagctccagtcggacccaagctcagtcgcggcctcgtgc

SEQ ID NO: 20345 - DNA, 854 bp, Homo Sapiens
  misc_feature (32)..(43): n is a, c, g, or t
aaaccccgggctgcaggaattcggcacgaggnnnnnnnnnnnnaaatgagaacattaatttacttacactcagataactctctaaagagccattgtccaattttacaagatgtgcaacaggcagagaaggacaaacattgcaaataagttcttgcccattcatggtgcaagttctcagaagttactcttgtccaaatccttctgtttcttctatggcaaacaacagcttttccttcagttgctcatagctcttgtatggtggcaggtccaggcgattaaaacaggtatgacttctgggtagccaattttctttcccaactttttcaatgcaaaatttctgtggtccattgctccccatgagatcagcaaatcctcctactggcaatcggcaggttccagtaacaaactgcagaagtctcattctcttctcattatcaatttctttaacaaactgccaaaaccacatgatttgtttgctggtccttgcataatgacggtagatggcatgtctttgccagtcattcaaatcaatctcttgcattccacataaaaggacctctaattcctttgcatcaaagtattgcaaatattgctggggaaaaatttcattaaagccttcaaagaaagcttgtgtctgttcttcaacacctcgagacaacctccactcagctaccattctgatgtattcctctttattttcttctgttacaagaatattgccaccattaggtttcagatcatgactcttatttcacctaaatttctttgtcaacggaaagtacatttccaaatcacattcctcaatattgttttcctttaacccaatgaaaaaatgtaaaatctggatcatagat

SEQ ID NO: 20346 - DNA, 803 bp, Homo Sapiens
acgctgcaaacattttaatgattattgttgagcatacattttggaaattttttacttcaaacggcaacaagttaaataaatgtttataatatacaaagaaaatacaaccgaaagtaaaactcgctgtaagtgtgccttgcacttagaccaggttttccccccttaatacatctttatttttgagctgcaaacacacttaagactttgatcttcatagtatggcatttaggaaataaaaatatactcccaccttaaagaaataaaaagtttggtgcatgattatatgccaaacaaagagagaacactagaatactcttgatagtgcaggcatcattaaaaaggaaaagaaaaagcttgagatgctcattaattctctatgttttaaggaagcaggatttttgaccaagtagcttaaaagccagcaaaacagggatcagtgacagcaactgtagtgtatggagtatgaaatgacaaactttacacaaatacactgttagaaatttaccagtgaacactgaagatctgagaagctgctctttggaacagtcaagtgggaccaccttattccagtcacataagcccttgtaaagtaacacagtgttctgtgctatatacttgctggctgggtagttacaggatttgttttgtcattagcagctaaaaaacttattccacatgttcttaaagccttaatggtggaaaaaaaggcaagtgtcattagcatggtggatcatatacttctctgcacacaaacacaagaggcttcactagtatttttaaagtctctgatgtctccctcgtgc

SEQ ID NO: 20347 - DNA, 1128 bp, Homo Sapiens
gcacgagggttttaagaaatttaaaaagagaaatgtgaagaacctgaaatttgcctaaaatctcaccatctaccacacttaaaactttgatatgcatccttttgtacatttctccatgtagtactttttgaatatatatatatctttcctggtagactgtcttacagttttttgagtaacattttatacttggatttttctgttgggttggactaatctggctgttcgcaagtgtgcactatagtgttttttatctgtactggaggaccttgatagccatttattttcagctttcaatcttgcagtttattatgtaatctgcaaattgtaattactggctaattaatgagctcctatttctttctctagggttctctataaaggtgtcttaaaaaggttgattttgttatatgagcctttgtttggattgcttcaagaggtcgctaggattcaaccaatgccttacttcaaagattttacctttccttctgatatcactgaatttttaggacagccatattttgaagcctttaagaaaaaaatgcctatagcttttgcagctaaaggaataaataaattgctaaataaactgtttttaataaatgagcagtcaccaagagccagtgaagaaaccttgcttggaatttcaaaaaaagctaaacaaatgaagatcaatgtacagaataatgtggatcttggacagccagtaaagaataagagagtcttcaaagaagagtcatcagaatttgatgtgagggctttctgcaaccagctgaaacacaaagctactcaggagaccagttttgattttaaatgttctcaatccagactaaagacaaccaagtattcttctcagaaagtgataggaactcctcatgccaaaagtattgtgcaaagattccgagaggctgagtccttcacacaactttctgaagaaatccagatggcagttgtatggtgcaggagcaaaaaactcaaggctcaggccatttttctgggtaacaaacttcttaaaagcaaccggcttaaacatctggaagctcaggtactagtttgccaaagaaactagagtgcataaaaacgtctatttgcaaccaccttcttcgtggctcggtatcaaaacttcaa

SEQ ID NO: 20348 - DNA, 804 bp, Homo Sapiens
gcacgagggagatttagggggtgcctcatggggtgggcaggcctggggtgaaatgagaaaggcccagaacgtgcaggtctgcggaggggaagtgtcctgagtgaaggaggggacccccatcctgggggatgctgggagtgagtgagtgagtgagatggctgagtgagggttatggggagcctgaggttttatgggcctgtgtatccccttctcccggccccagcctgcctccctcctgcccgcctggcccacaggtctccctctggtccctgtccctctggtggttggggatggagcggcagcaaggggtgtaatggggctgggttctgtcttctacaggccaccccgaggtcctcagtggttgcctggggagccggacggggctcctgaggggtacaggttgggtgggccctccctgagggtctggggtcaggctttggcctctgctgcctctcagtcaccaagtcacctccctctgaaaatccagtcccttctttggatgtccttgtgagtcactctgggcctggctgtcgtccctcctcagcttcttgttcctgggacaagggtcaagccaggatgggcccaggcctgggatctcccaccccaggaccctcaggccctctcccctgctgctttgcggggggcagggcagaaatggactccttttgggtccccgaggtggggtcccctcccagccctgcatcctccgtgccgtagacctgctccccagaggaggggctttgatccacaggacgtgtgggtggtgcctggcactcggggacccccagctgccccagccctggt

SEQ ID NO: 20349 - DNA, 1009 bp, Homo Sapiens
cccccgggctgctggaattcggcacgagggcggcccggggcgactgagcggacaaacggaagtgtaggttacggtctgagacatcaccgccaagctgggcatcggggagatggccgagactgaccccaagaccgtgcaggacctcacctcggtggtgcagacactcctgcagcagatgcaagataaatttcagaccatgtctgaccagatcattgggagaattgatgatatgagtagtcgcattgatgatctggaaaagaatatcgcggacctcatgacacaggctggggtggaagaactggaaagtgaaaacaagatacctgccacgcaaaagagttgaaggttgctaataatttatactggaatctggcatttttccaagccaagagaagatcgaatggctttttgcagctaactactatgtgtagacaggttttatattataaagtatgcattcttatcacctagtatatagttagtttgtagagtgatttccccccagtttcttgaacatggtatcttcacatcttggaccttggtcagttgtgctattcattattaaacactaaaactttggcggttcttgcataacattgtcagattttttagtgtatttctgtgaagtcattttttttcttgtcattccttttgtagtagttgctgtttggataaaagttgatgtgtgattttttattaaacaaatagtaaacccttcaattatagttagtcttggtgaagtaagatgtttgtagactttagagttctttaattcttggcacaacgtgactgttgagctaacaccaaatagtgtgttggcaatacttttcaaatggctgaaaacacctaaaaattgttcattccgaaatatctgtcactgctctgttgccaaactcagaatagaacttagacgtatgtctgagtccctgagatcacatgctaaagtcgatgaaagtaaccactgccactgtctgtgtcagaactttacagtacagaaaataacagaatagcc

SEQ ID NO: 20350 - DNA, 999 bp, Homo Sapiens
gcacgagggtaacctttggatggggttgggcccagcctggaccactagccgggccgactggacaggcgatgagcccctgccctaccaacccacattctcggatgactggcaacttccagagccctccagccaagcacccttaggataccaggaccctgtttcccttcggcggggaagtcataggttagggagcacctcacactttcctcaggagaagacacacaaccatgaccctcagcctggggaccccaactccaggccctccagccccaaacctgcccagccagccctgaaaatgcaagtcttgtacgagtttgaagctaggaacccacgggaactgactgtggtccagggagagaagctggaggttctggaccacagcaagcggtggtggctggtgaagaatgaggcgggacggagcggctacattccaagcaacatcctggagcccctacagccggggacccctgggacccagggccagtcaccctctcgggttccaatgcttcgacttagctcgaggcctgaagaggtcacagactggctgcaggcagagaacttctccactgccacggtgaggacacttgggtccctgacggggagccagctacttcgcataagacctggggagctacagatgctatgtccacaggaggccccacgaatcctgtcccggctggaggctgtcagaaggatgctggggataagcccttaggcaccagcttagacacctccaagaaccaggccccgctgatgcaagatggcagatctgatacccattagagccccgagaattcctcttctggatcccagtttgcagcaaaccccacaccccagctcacacagcaaaaacaatggacagggcccagagggtgaagcaacagtgtcccttctggctgtgttgggagcctccccagtaaccaccctatttattttacctctttcccaaacctgagcatttatgcctagggctggtcaagaatctgtttcagtccctct

SEQ ID NO: 20351 - DNA, 1091 bp, Homo Sapiens
gcacgaggcctgtctttgtggctccggaaaggcgtttgggatgccaacgatgaggctgctgtcatttgtggtgttggctctatttgctgtcactcaagcagaggaaggagccaggcttttggcttccaaatcactgctgaacagatacgccgtggagggacgagacctgaccttgcagtacaacatctacaatgttggctcaagtgctgcattagacgtggaactatctgatgattccttccctccagaagactttggcattgtgtctggaatgctcaatgtcaaatgggaccggattgcccctgctagcaatgtctcccacactgtggtcctgcgccctctcaaggctggttatttcaacttcacctcggcaacaattacttacctggcccaggaggatgggcccgttgtgattggctctaccagtgcacctggacagggaggaatcctggctcagcgggagtttgacaggcgattctcccctcattttctggactgggcagcctttggggtcatgacccttccctccatcggcatccccctgctattgtggtactccagcaagaggaaatatgacactcccaaaacgaagaagaactgattggggcttccacagccctcctctcccaagaaatccaggctcctctcccaagaaatccaggtgctttccagactccaaagggtatcttaaatgcaatctcttctctcttagcccttggccactttctcctggatcctgccctgctctcagccatagtgaaggaccagccctaggagtctgcgagagcctccttggttccatcgtgaagccataaacaggaatgcctttggcaatagccttgagcctagagggccctctgatgccccactgaggtgctgttggtttattgctggcaacgtgaattctctcaggggtctaggaggggcattttggagactgcctgacaccacccctatcccctgcctcccctctcagaagagggtggaagatgaaatgaaagctatgggactcttggaggatacccagtgtctattctgggttagagaagtgcttactaaggggttttctaataaaaacaaatgccccattg

SEQ ID NO: 20352 - DNA, 933 bp, Homo Sapiens
  misc_feature (64)..(81): n is a, c, g, or t
cggtggcggccgctctagacccaaaagaatcccccgggctgcaggaattcggcacgaggcgagnnnnnnnnnnnnnnnnnngagttgtgtagccctttattagcaactaaaatagaaggtatctgttgtacaacatgggtagtaattgactataactggagatttattatattctaatacagatcatttataaatgcaatttctttattaaaaagcttccacctttttgtttgtttgtgtacaatttgcaaaactattctgaaagcggaatatatgtgcacaagtctgcaaagagtgcaaatttaggatatggtaaatgctttacaagttactttcaaaaaactgtctgccacaactgagcctttacattgtcatcttttttgatcaaaatattttgatgccagccttccttccactgccctaaactataaagcattttttaatgagttgaaattaaggaaggactacacctactagaaaaaaagagaagaaagttctattagtttgaggtttcagaatccccccaaaccaggaccagtatcgtggtaaaggctaggctgggactaattgttctataatactcataccctttccatggctttagctgtataaggcaaatgcatttcaatactgtgttcatcttcatctgtctgcagagacatgcgttcaaacattcctgtcttccacagttctccgtaaatcttttggtcaatacgaaggtcatacagaggtgttctatatatatccacactggaaagtgcacatcgagagaggggcacatgatgagaaggcccaaggatgaaaattctccgggtaatagacggatccacttgtttataagcatgggcagcacaagacccacagtacgtatatcctgcatgggggccataatgggctctagcaggtcttttgtagactgtacttgtgaaagcc

SEQ ID NO: 20353 - DNA, 1280 bp, Homo Sapiens
  misc_feature (322)..(391): n is a, c, g, or t
  misc_feature (852)..(932): n is a, c, g, or t
  misc_feature (1076)..(1087): n is a, c, g, or t
gcacgaggagaagctattctcgcagaattaaaatagagagcaatagggctagggtaaagattagagatagaaggagatctaatagaaatagcattgaaagagaaagacgacgaaatcggagtccttcccgagagagacgtagaagtagaagtcgctcaagggatagacgaaccaatcgtgccagtcgcagtaggagtcgagataggcgtaaaattgatgatcaacgtggaaatcttagtgggaacagtcataagcataaaggtgaggctaaagaacaagagaggaaaaaggagaggagtcgaagtatagataaagataggannnnnnnnnnnnnnnnnnnnnnnnnnnnnnnnnnnnnnnnnnnnnnnnnnnnnnnnnnnnnnnnnnnnnnttttaagttcagtagtcaggatgatagattaaaaaggaaacgagaaagtgaaagaacattttctaggagtggttctatatctgttaaaatcataagacatgattctagacaggatagtaagaaaagtactaccaaagatagtaaaaaacattcaggctctgattctagtggaaggagcagttctgagtctccaggaagtagcaaagaaaagaaggctaagaagcctaaacatagtcgatcgcgatccgtggagaaatctcaaaggtctggtaagaaggcaagccgcaaacacaagtctaagtcccgatcaaggtagtatactttttaaagtattttgtctgatttttaaaaaaaattgactgaatttattcaaagttgaaagtgtcctttctctctctctttaataaactcagtttggtacttgataaataatcatagtcttaaatgttagaaatcctatnnnnnnnnnnnnnnnnnnnnnnnnnnnnnnnnnnnnnnnnnnnnnnnnnnnnnnnnnnnnnnnnnnnnnnnnnnnnnnnnncagatcaacaacccctccccgtcgtaaacgctgaggaatgatgtggcaagaatgccatgatgttctttaaaaaaattccatgagttttaagggcttgtctcattatagaggcacattgtggctgtgtaggtgaaaccagaatcnnnnnnnnnnnnaatctgtaaataggtgtactttttccaatgctgctccaagttacttaataggatttctttgtattacgtttttttcaaaaaatatagtgcataataagactataaacatgccattctctttcagctgtaatgttcttaaaattattcttgaatgtactgtgatgtcaataaagctctttagttcatttttgtt

SEQ ID NO: 20354 - DNA, 1225 bp, Homo Sapiens
gtcttccgcggagtgacaggggtccctctgggtcggatccggcggcagtggtggcttcggtatcgccgccctttctcaccgcgccccttttccagcccgcgacgtctccgcgctagcgaggcagcggcggccgccgagaaacaagtggcccttcctgttaacctccgagaagcccttcacaaactgcggcctggcaaaaagaaacctgactgatcggcggtgatcaggttcccctctgctgattctgggcccccaaccccggtaaaggcctcattgttccgtttcctgccgccttcctccgtagccttgcctagtgtaggagccccgaggcctctgtcctcttcccagaggtgtcggggcttggccccatcctccatcttcgtctctcaggatggcgagtagcagcggctccaaggctgaattcattgtcggagggaaatataaactggtacggaagatcgggtctggctccttcggggacatctatttggcgatcaacatcaccaacggcgaggaagtggcagtgaagctagaatctcagaaggccaggcatccccagttgctgtacgagagcaagctctataagattcttcaaggtggggttggcatcccccacatacggtggtatggtcaggaaaaagactacaatgtactagtcatggatcttctgggacctagcctcgaagacctcttcaatttctgttcaagaaggttcacaatgaaaactgtacttatgttagctgaccagatgatcagtagaattgaatatgtgcatacaaagaattttatacacagagacattaaaccagataacttcctaatgggtattgggcgtcactgtaataagttattccttattgattttggtttggccaaaaagtacagagacaacaggacaaggcaacacataccatacagagaagataaaaacctcactggcactgcccgatatgctagcatcaatgcacatcttggtattgagcagagtcgccgagatgacatggaatcattaggatatgttttgatgtattttaatagaaccagcctgccatggcaagggctaaaggctgcaacaaagaaacaaaatatgaaaagattagtgaaaagaagatgtccacgcctgttgaagttttatgtaagggtttcctgcagaaattgcgatgtacttaaactattgtcgtgcgctacgctttgaggaagcccagattacatgtatctgaggcag

SEQ ID NO: 20355 - DNA, 1136 bp, Homo Sapiens
gcacgagggtttattatatgcttattacaaaagaaaaagtcttttgccttattttagggcttccatgtaaaacctagttaaaatacaaaaagtaaattagagaaaaattctgcttaggtagtgaaaattgatagcaacttataagctgtatccttaaaaacctagtcacagatatagaattacgtaaagataaaatgataagcctacttattggcaagaaacaggttaggccacttaagcagcatgtttctaccactatacaaatacatcggcaggtccaaacattaaaccaccattcgattgacaaccttttatttttcaacttaggtaacagtccaaaatcagtgtagattggcgaaaaactaggcaaaaacagcaaaaagtgcagtttaatttagcaaaggctcaagacagtatgtggaaggaaggtgagatttccctcctactgcggcaaggcaagcggcagttactgcccgacagtaacgatggtgtgcgcacccccgatgagaatgctgctgcaacacagactgggacgccgcctcccccattagacctgccagctcattcgtgaaaatctaccaggaacacatcaatgaaaaaaatatgtcaaatatgagttctctgttataagcaataaaatcacaaaatcaactcagatttgaaatttagggtaagctaggacaatttcctactttttaatatatagatattttagatttgacaatcgtttccacatacactcagacaggcttacagaagaatttcaaatatcaaatagagaagctgttaattcacgcacgttatgacttcagttaattcttccagtgtttagacttcagagctgctaataacactaaactcaataccgtgtttgttgagtctgtcaatcaactttgttttggaaaaagctgctccaggtgtgaagaccccgcccgccttaggcagatgagaagcatcacttagaagagtcatggctgcctgaaccatagctatgggggtagccacatagccagcctctggtcctttcacctgagtacaaattttgatatttggtttgttcttatctgtaccagtgccttggctgtatccttgaccaaagaatgtcagcgtgaacccacgcgtccgcggacgcgtgg

SEQ ID NO: 20356 - DNA, 1269 bp, Homo Sapiens
gcaagagggagaagtcctgcacaaattcactgtggatctcccaaagaaacacggtagaggaggtcagtcagccttgcgttttgcccgtttaagaatggaaaagcgacataactatgttcggaaagtagcagagactgctgtgcagctgtttatttctggggacaaagtgaatgtggctggtctagttttagctggatccgctgactttaaaactgaactaagtcaatctgatatgtttgatcagaggttacaatcaaaagttttaaaattagttgatatatcctatggtggtgaaaatggattcaaccaagctattgagttatctactgaagtcctctccaacgtgaaattcattcaagagaagaaattaataggacgatactttgatgaaatcagccaggacacgggcaagtactgttttggcgttgaagatacactaaaggctttggaaatgggagctgtagaaattctaatagtctatgaaaatctggatataatgagatatgttcttcattgccaaggcacagaagaggagaaaattctctatctaactccagagcaagaaaaggataaatctcatttcacagacaaagagaccggacaggaacatgagcttatcgagagcatgcccctgttggaatggtttgctaacaactataaaaaatttggagctacgttggaaattgtcacagataaatcacaagaagggtctcagtttgtgaaaggatttggtggaattggaggtatcttgcggtaccgagtagatttccagggaatggaataccaaggaggagacgatgaattttttgaccttgatgactactaggtagtcgacatgggtccggcaaaacgtgcctcaccctccagcatccaacccaaggagcatacccatggtggaatccaaacagatccctgccttacaattggaacatttccagaacttaatccatgagcattggatattgaaaagaaaaccgaaacaaaaccagacccagccctacactttggtttgtcatggtgtcagcgcagcagcctacaactaagttcctaaacgccactttggactaatttaaaaaagaatcccagtttttacttttactggatggtgaaattggttgctcttgtattttatgaaaaaaaatgatttttttaaccttcatacatagaagcaaaaatactttaactgctgtaaaccttcaaaagttaataaagtgagatcatactggtttgtttcttattttgattggaaaaattaaattgctgcatttc

SEQ ID NO: 20357 - DNA, 1176 bp, Homo Sapiens
gcacgagggcgccgacgggacgcgctgggaccggcgtcgggggtcgcggggaccatgcagcggaggtgggtcttcgtgctgctcgacgtgctgtgcttactggtcgcctccctgcccttcgctatcctgacgctggtgaacgccccgtacaagcgaggattttactgcggggatgactccatccggtacccctaccgtccagataccatcacccacgggctcatggctggggtcaccatcacggccaccgtcatccttgtctcggccggggaagcctacctggtgtacacagaccggctctattctcgctcggacttcaacaactacgtggctgctgtatacaaggtgctggggaccttcctgtttggggctgccgtgagccagtctctgacagacctggccaagtacatgattgggcgtctgaggcccaacttcctagccgtctgcgaccccgactggagccgggtcaactgctcggtctatgtgcagctggagaaggtgtgcaggggaaaccctgctgatgtcaccgaggccaggttgtctttctactcgggacactcttcctttgggatgtactgcatggtgttcttggcgctgtatgtgcaggcacgactctgttggaagtgggcacggctgctgcgacccacagtccagttcttcctggtggcctttgccctctacgtgggctacacccgcgtgtctgattacaaacaccactggagcgatgtccttgttggcctcctgcagggggcactggtggctgccctcactgtctgctacatctcagacttcttcaaagcccgacccccacagcactgtctgaaggaggaggagctggaacggaagcccagcctgtcactgacgttgaccctgggcgaggctgaccacaaccactatggatacccgcactcctcctcctgaggccggaccccgcccaggcagggagctactgtgagtccagctgaggcccacccaggtggtccctccagccctggttaggcactgagggctctggacgggctccaggaaccctgggctgatgggagcagtgagcgggctccgctgccccctgccctgcactggaccaggagtctggagatgcctgggtagccctcagcatttggaggggaacctgtcccgtcggtccccaaatatccccttctttttatggggtaa

SEQ ID NO: 20358 - DNA, 618 bp, Homo Sapiens
cgggctgcaggaattcggcacgagggtgaaagaaatatattactaaaacgtcagtgagcaataatgtcagctgtcaagcactagatttatttttgcaggatatggagtgcaatgaactgagtcaatatggcaaggtgtatgtgatctgtgggagttatgccatttaacataggaagtgcatgggactttccctctctgcactccagctcttactgtaccattagaagatgcagaattctgttggtgtgcaaaaagtatagccttacattcaagcagaatggatctgaagaaagcagcaatatctgttactagagaacattcccatgtgtttaaactcttcacttcttagatgcatttaaattcttaatgcaaatgacgtagcaatttgaaaacttctccgtattacttgtgtttaaaatgtcttgctttaaatacaaaacaaatggtaaaggggattatcttttgtttagatggttaaatattatttttgccttagatagctttgtaataatttttctccagacagttcaacacttttgaaaaatgacatgaattttcattaaaaacccttttcctatgtttattgtatacaagaattatgcaataaaatttctttat

SEQ ID NO: 20359 - DNA, 1094 bp, Homo Sapiens
gcacgaggagaacgaggctaaaatgaaagccatcattcatcttactcttcttgctctcctttctgtaaacacagccaccaaccaaggcaactcagctgatgctgtaacaaccacagaaactgcgactagtggtcctacagtagctgcagctgataccactgaaactaatttccctgaaactgctagcaccacagcaaatacaccttctttcccaacagctacttcacctgctccccccataattagtacacatagttcctccacaattcctacacctgctccccccataattagtacacatagttcctccacaattcctatacctactgctgcagacagtgagtcaaccacaaatgtaaattcattagctacctctgacataatcaccgcttcatctccaaatgatggattaatcacaatggttccttctgaaacacaaagtaacaatgaaatgtcccccaccacagaagacaatcaatcatcagggcctcccactggcaccgctttattggagaccagcaccctaaacagcacaggtcccagcaatccttgccaagatgatccctgtgcagataattcgttatgtgttaagctgcataatacaagtttttgcctgtgtttagaagggtattactacaactcttctacatgtaagaaaggaaaggtattccctgggaagatttcagtgacagtatcagaaacatttgacccagaagagaaacattccatggcctatcaagacttgcatagtgaaattactagcttgtttaaagatgtatttggcacatctgtttatggacagactgtaattcttactgtaagatctgaaatgcgtgctgatgacaagtttgttaatgtaacaatagtaacaattttggcagaaaccacaagtgacaatgagaagactgtgactgagaaaattaataaagcaattagaagtagctcaagcaactttctaaactatgatttgacccttcggtgtgattattatggctgtaaccagactgcggatgactgcctcaatggtttagcatgcgattgcaaatctgacctgcaaaggcctaacccacagagccctttctgcgttgcttcca

SEQ ID NO: 20360 - DNA, 1408 bp, Homo Sapiens
gcacgaggggcctccgccaccacctcagctgcggaccgaggcgagatggcggccaccgagggggtcggggaggctgcgcaagggggcgagcccgggcagccggcgcaacccccgccccagccgcacccaccgccgccccagcagcagcacaaggaagagatggcggccgaggctggggaagccgtggcgtcccccatggacgacgggtttgtgagcctggactcgccctcctatgtcctgtacagggacagagcagaatgggctgatatagatccggtgccgcagaatgatggccccaatcccgtggtccagatcatttatagtgacaaatttagagatgtttatgattacttccgagctgtcctgcagcgtgatgaaagaagtgaacgagcttttaagctaacccgggatgctattgagttaaatgcagccaattatacagtgtggcatttccggagagttcttttgaagtcacttcagaaggatctacatgaggaaatgaactacatcactgcaataattgaggagcagcccaaaaactatcaagtttggcatcataggcgagtattagtggaatggctaagagatccatctcaggagcttgaatttattgctgatattcttaatcaggatgcaaagaattatcatgcctggcagcatcgacaatgggttattcaggaatttaaactttgggataatgagctgcagtatgtggaccaacttctgaaagaggatgtgagaaataactctgtctggaaccaaagatacttcgttatttctaacaccactggctacaatgatcgtgctgtattggagagagaagtccaatacactctggaaatgattaaactagtaccacataatgaaagtgcatggaactatttgaaagggattttgcaggatcgtggtctttccaaatatcctaatctgttaaatcaattacttgatttacaaccaagtcatagttccccctacctaattgcctttcttgtggatatctatgaagacatgctagaaaatcagtgtgacaataaggaagacattcttaataaagcattagagttatgtgaaatcctagctaaagaaaaggacactataagaaaggaatattggagatacattggaagatcccttcaaagcaaacacagcacagaaaatgactcaccaacaaatgtacagcaataacaccatccagaagaacttgatggaatgcttttattttttattaagggaccctgcaggagtttcacacgagagtggtccttctctttgcctgtggtgtaaaagtgcatcacacaggtattgctttttaacagaactgatgctccttgggtgctgctgctactcagactagctctaagaatgtgattcttctaaagcaaagtcattggatgggagaggaagaaaa

SEQ ID NO: 20361 - DNA, 748 bp, Homo Sapiens
gcacgaggctcagtaattcctttattttgattttaaattaatcacaaccatcgaagtggtaagaaacagctgacaggtgtacttaaaaatactgaattgacagctacattgaatgcagggtttcccagggtagttcttattttgtcacttactccaattacattcaaggtcgttatgcctcatctttttcctgagctgtggcagctctaactggggcacccagagagatacataccaggtaatctccacttctacttttctggtagcttggccctggcaaaatgagccccacaatctagaaagtaggatgctaaacaaagttgaatcaacatatctttttagaaaatatcaggttagagaatactcctgaggacctgtttctaaccagagttgacaaatgtgaaaaatgcatcagctagacagcagtcatgtgaacacagcccggaactgcaagtcaaggaaatgggttctgggcctgccttcccaggtaaccaaaaccattattcaaaagcaactactgaaatgccagcttgtggggaaagaaatgggaaaggtgataaaatcacaattaaatgcatgtatatacatgaataccaaagctattatgtagaaataaaatcaaaacactttagaccaagaagaaatcagagacctcctagtctattgcccccagtgtaaaaattaaaaaactctggagtaatcattgccattaagcattagtatgagggaaataattttaactctgagg

SEQ ID NO: 20362 - DNA, 1218 bp, Homo Sapiens
  misc_feature (1104)..(1113): n is a, c, g, or t
gcacgaggcaggaatgtcctgtatgcccaagtgggcaagaaccccaacttgtttctcaggggacttgattgttctcttagctggtggaatatgttggcttatgtgtttgaactctgtcgtgtttaattggtttatataatatatgtatgctatcttgattcatgaacttgatcctattaatttatatgctgatattgtactttagacatacgcttgtctcctgaatgtcctctgaatatttatagttaaatgatttatatttgaaatgtgttgccagacttaacccagcagacactctgacatcacggagcttcactgatgacaggtaacgaaacttcctatgttatgtcaggtagtagtaagtagtattggaatgatgttttcatttttggtggctctcaactggaattggtagtgtttccaggccaagggtcgactgcaggttgtttgagaaatgatgagtaggtcagtctaggaagaaagagaaagtagcaggaaaggaagtgggaagggccagccaaggacagactgtagaggatccacatcaggtggccacgaggacttgcaggctatagttatggtggtgacatgcatgaggtgggctggtagagcaggaagctctgtgatgtcagagcatctactgggactacaggtgcactgtagtccccactactgggggtggcaatgaagacactctgtctgttgggccctagaatttaatgtggatttcctccttccttccaagttctgagattcttaaatgagagctggctgtcttctagaggtaagacctggaatggagtccagttggtactttttcactccctcttagaatctcttatgaaaaaatgatcagagagaaaagtggggttttgtttccccacctaataatatatcctacaaccagccaaatgcacttttgtgaaaatggggtgtgaggagtggttctgcagcttgagtcctctggttttaagtagtttgtttctacttgtttaaagaatcttctggtctgaccacttaaagtaaaaactacatgatttattttcggggcaattatgtttagctttcatcattatactccaacagacccgtctgaaggggtannnnnnnnnnaacaataatgtttgtaacattttgttgtgtcatttagagggtcacttgtttgtattgcaataacccctgggaccatttccgggttaaagattaatttttgtttta

SEQ ID NO: 20363 - DNA, 1445 bp, Homo Sapiens
  misc_feature (327)..(339): n is a, c, g, or t
  misc_feature (1014)..(1022): n is a, c, g, or t
gcacgaggactttgtgcttgcatttgccgaagcttatatcccaccattgccacgggcattctccatctccttgcaggtctgtgtacactgggctcagtaagttgttatgttgctggaattgaactactccaccagaaactagagctccctgacaatgtatccggtgaatttggatggtccttctgcctggcttgtgtctctgctcccttacagttcatggcttctgctctcttcatctgggctgctcacaccaaccggaaagagtacaccttaatgaaggcatatcgtgtggcatgagcaagaaactgcctgctttacaattgccannnnnnnnnnnnnaaaataatactgatattttccccacctctcaattgtttttaatttttatttgtggatataccattttattatgaaaatctattttatttatacacattcaccactaaatacacacttaataccactaaaatttatgtggtttactttaagcgatgccatctttcaaataaactaatctaggtctagacagaaagaaatggatagagacttgacacaaatttatgaaagaaaattgggagtaggaatgtgaccgaaaacaagttgtgctaatgtctgttagacttttcagtaaaactaaagtaactgtatctgttcaactaaaaactctatattagtttctttgggaaacctctcatcgtcaaaactttatgttcactttgctgttgtagatagccagtcaaccagcagtattagtgctgttttcaaagatttaagctctataaattgggaaattatctaagatcattttccctaagcattgacacatagcttcatctgaggtgagatatggcagctgtttgtatctgcactgtgtctgtctacaaaaagtgaaaaatacagtgtttacttgaaattttaactttgtaactgcaagaattccagttcagccgggcgaggattagtattatttttaactctccgtaagattttcagtaccaccaaattgttttggannnnnnnnnctttcctcttcacataccagggttattaaaagtgtgctttctttttacattatattacagttacaaggtaaaattcctcaactgctatttatttattccagcccagtactataaagaacgtttcaccataatgaccctccagagctgggaaacctaccccaagatctaaagttctggctgtccattaacctccaactatggtctttatttcttgtggtaatatgatgtgcctttccttgcctaaatcccttcctggtgtgtatcaacattatttaatgtcttctaattcagtcatttttttataagtatgtctataaacattgaactttaaaaaacttatttatttattccactactgtagcaattgacagattaaaaaaatgtaacttcataatttcttaccataacctcaatgtctttttt

SEQ ID NO: 20364 - DNA, 1419 bp, Homo Sapiens
gcacgaggataacactgggcaaaaaagtcattgaagaccgagatcactacattcccaacactctcaacccagtctttggcaggatgtacgaactgagctgctacttacctcaagaaaaagacctgaaaatttctgtctatgattatgacacctttacccgggatgaaaaagtaggagaaacaattattgatctggaaaaccgattcctttcccgctttgggtcccactgcggcataccagaggagtactgtgtttctggagtcaatacctggcgagatcaactgagaccaacacagctgcttcaaaatgtcgccagattcaaaggcttcccacaacccatcctttccgaagatgggagtagaatcagatatggaggacgagactacagcttggatgaatttgaagccaacaaaatcctgcaccagcacctcggggcccctgaagagcggcttgctcttcacatcctcaggactcaggggctggtccctgagcacgtggaaacaaggactttgcacagcaccttccagcccaacatttcccagggaaaacttcagatgtgggtggatgttttccccaagagtttggggccaccaggccctcctttcaacatcacaccccggaaagccaagaaatactacctgcgtgtgatcatctggaacaccaaggatgttatcttggatgagaaaagcatcacaggagaggaaatgagtgacatctacgtcaaaggctggattcctggcaatgaagaaaacaaacagaaaacagatgtccattacagatctttggatggtgaagggaattttaactggcgatttgttttcccgtttgactaccttccagccgaacaactctgtatcgttgccaaaaaagagcatttctggagtattgaccaaacggaatttcgaatcccacccaggctgatcattcagatatgggacaatgacaagttttctctggatgactacttgggtttcctagaacttgacttgcgtcacacgatcattcctgcaaaatcaccagagaaatgcaggttggacatgattccggacctcaaagccatgaactctcttaaagccaagacagcctccctctttgagcagaagtccatgaaaggatggtggccatgctacgcagagaaagatggcgcccgcgtaatggctgggaaagtggagatgacattggaaatcctcaacgagaaaggaggccgacgagaggccagccgggaaggggcgggacgaactcaacatgaatcctcaagctggacttaccaaatcgaccagaaacctccttcctctggttcacaaacccatgcaagaccatgaagttcatcgtgtggcgctgctttaagtgggtcatcatcggcttgctgttcctgcttatcctgctgctcttcgtggccgtgctcctctactctttgcc

SEQ ID NO: 20365 - DNA, 1249 bp, Homo Sapiens
  misc_feature (960)..(970): n is a, c, g, or t
gcacgaggattgccttaggtctttttaaatagtgtattattatcgttggggctggctctatgcttgaaaaccagtttatttataacctgttataagtgctatattctgtttgcagttaggaaatgcagaattcaaagtgatctcctagcttgtaagcaaactgagatgcactatcccttttctataaaaaataagttaatgtgtcaagaaaccaactctattaaggtggggtttaatattaccctttcctatgtgttttatctaattattttggttgttaatatggtgataatggaaagtcaagttaaattttaaatattaagaattctgatttattgagattgaattatgccaccacgtttatgtaaaaatgaaggtggcaccgtggtgagacctaatgagaaatagttactcagttgtaaaaattttgatttattctctttcttctgacctccttgcctcttgtcttgaaccatagcaaaaggatactgcatctctcattactgtagtgctgaggttattgaagttatacaaaacacatctcagtctctgtttcttggaaaggtatctattacatcctgctagctgactgacaaaactaagcagggagaataaagataattgtattttatgttttgcacacaaacgcagaatttgtataaccatatgacttcatagttgtgatctcaaaaaagaaggaatttctcctttgtttcttgcagttaatgtaagaatactttaaatctctaagcttctgaagtgttagaggtagagatggtctagtaagatgtagtagtaatgttttatccatttagcatgtgtttattttttcatatgtactcaaaggtgacttattggttcacctcagtgatattacagctaaaaaaatcattcattagcaaaaggaaaagtggtttcaacctaacatcagaagtgttttttattattattttatattgnnnnnnnnnnntgaactctaacagttttttacatacaaaacacagtgtcatgaaggttattcataattgcattatagaggaatgtagtatgtcataagtactttgtaaagatttgacattcaactgtagtatccatatgttgcttaaatttccttatgagccccatgatggaaagacttaaagatgaatttgagaaaaattgaaagaaattagattatcaggttctgttaaattgttaacatgtatcttgcttaaatttctgtttaattaatttatatccacccaagtac

SEQ ID NO: 20366 - DNA, 962 bp, Homo Sapiens
attttaaaagggggggccaaattattattattttaaaatttgattacaaccaattttgttggcattaaaattagaggcattaagctggaatggatatataccaaaaccagaaattgagtttagcaaaaatgggaataggagttgttcagtaatttcagattacaaatcaatttagagaaacaaaccccatgcttacattgattgtgccacagatttaaacttcagtagtgcattagtaaactgttcacatttagatcttcaccttgagatttgacagctgtttcttgaaaaaaatctcagtaccttgtgcaaataaaatcggtcttccatgtgccttagcacacacttaaaatttatccattgtatatatacaaaacacctgcaatgtgggcagggcaaaatacatactttcataacaaaactataatatacctctcaagtatgaacaatatacacataatacatggtatacagtatttacaaaatataaaatataatacaagctgtttgtatgtaattttttaaactcatcttttgcaattgtatgttgcaacaaggcaaatttccatttctgtaccaattttctcaagagtccagggatatgggaaaaattatgttttacacacatactgaaatctgaaatctaagtttgaactttgaggagggtttttaagtgtactgccatcagctccctgttttggttggaattttcaacagtgcttcccatccagtgactaggaggctttggaagaacactaggagaaggtggatcactaaactttgccccagcataattttcctttggctcacttcagttagaaatgctgatttctccaaatgcgaatttttaatgttctcggtatttttaaaaggctttttttcctgcttctgaattctgtcagatgaaacagaatcctgccaaaagttgttttcatttctttttgcagaggtgatcctcgtgc

SEQ ID NO: 20367 - DNA, 868 bp, Homo Sapiens
ttcacatttattcagtaaagcccaatatgcttggcagccgaatctgcaatgataacatttactattttacttggttccttaacttttaactaaacagaaaaacaaaactcccgtgcactaaggtcgttttcacagtatatcactgaacatttcattctttaaatgtaccctccgcattaatctgaggttcaaaccgctccatcgtgacggcagacaaatcctcgggttcgagactccatacgccgactccttctgcagcccctgccgccatagccgcacccagtgcagtggtttcgggcattgagggcttcactactggtatatacagaatgtctgcttgtagctgcataagaattttgttgctggtcattcctccatctacctgcaaatgactgagtggaattccacagtctcgattcatggcatccaaaatctctcgagtttggaaacaaacagcttctaatgcagcaaaagcaatatggcatttattggtgaactgagtgagtccacagattatccctcttgcgctgggctcccaataaggtgcatataaccccgaaaatgctgggacgaagtagcagccataagaagtacctacttctttagcaagtttttcaatttcttctgaggtctttataattccaagattgtctcttagccagcgaataacagcaccagctatagctacagaaccttccaaagcataatatactggtttgtctctgccaagtttgtaagccactgtggtgagaaggccatgatcagaaaatacacacttatggcctgtattacatagtaagaaacatcctgttccatacgtatttttggcttgtccaatctggaagcacatttgtcccaccaatgcagc

SEQ ID NO: 20368 - DNA, 2525 bp, Homo Sapiens
ccccgggctgcaggaattcggcacgaggggactttcttaatgagctttgggaagataaggaagggaagaagaagatgaacaagaacaatgccaaggctctgagcaccttgcgtcagaagatccgaaaatacaaccgtgatttcgagtcccatatcacaagctacaagcagaaccccgagcagtctgcggatgaagatgctgagaaaaatgaggaggattcagaaggctcttcagatgaggatgaggatgaggacggagtcagtgctgcaactttcttgaagaagaaatcagaagctccttctggggagagtcgcaagttcctcaaaaagatggatgatgaagatgaggactcagaagattccgaagatgatgaagactgggacacaggttccacatcttccgattccgacccagaggaggaagaagggaaacaaaccgcgctggcctcaagatttcttaaaaaggcacccaccacagatgaggacaagaaggcagccgagaagaaacgggaggacaaagctaagaagaagcacgacaggaaatccaagcgcctggatgaggaggaggaggacaatgaaggcggggagtgggaaagggtccggggcggagtgccgttggttaaggagaagccaaaaatgtttgccaagggaactgagatcacccatgctgttgttatcaagaaactgaatgagatcctacaggcacgaggcaagaagggaactgatcgtgctgcccagattgagctgctgcaactgctggttcagattgcagcggaaaacaacctgggagagggcgtcattgtcaagatcaagttcaatatcatcgcctctctctatgactacaaccccaatctggcaacctacatgaagccagagatgtgggggaagtgcctggactgcatcaatgagctgatggatatcctgtttgcaaatcccaacatttttgttggagagaatattctggaagagagtgagaacctgcacaacgctgaccagccactgcgtgtccgtggctgcatcctaactctggtggaacgaatggatgaagaatttaccaaaataatgcaaaatactgaccctcactcccaagagtacgtggagcacttgaaggatgaggcccaggtgtgtgccatcatcgagcgaggtgcagcgctacctggaggagaagggcactaccgaggaggtctgccgcatctacctgctgcgcatcctgcacacctactacaagtttgattacaaggcccatcagcgacagctgaccccgcctgagggctcctcaaagtctgagcaagaccaggcagaaaatgagggcgaggactcggctgtgttgatggagagactgtgcaagtacatctacgccaaggaccgcacagaccggatccgcacatgtgccatcctctgccacatctaccaccatgctctgcactcgcgctggtaccaggcccgcgacctcatgctcatgagccacttgcaggacaacattcagcatgcagacccgccagtgcagatcctttacaaccgcaccatggtgcagctgggcatctgtgccttccgccaaggcctgaccaaggacgcacacaacgccctgctggacatccagtcgagtggccgagccaaggagcttctgggccagggcctgctgctgcgcagcctgcaggagcgcaaccaggagcaggagaaggtggagcggcgccgtcaggtccccttccacctgcacatcaacctggagctgctggagtgtgtctacctggtgtctgccatgctcctggagatcccctacatggccgcccatgagagcgatgcccgccgacgcatgatcagcaagcagttccaccaccagctgcgcgtgggcgagcgacagcccctgctgggtccccctgagtccatgcgggaacatgtggtcgctgcctccaaggccatgaagatgggtgactggaagacctgtcacagttttatcatcaatgagaagatgaatgggaaagtgtgggaccttttccccgaggctgacaaagtccgcaccatgctggttaggaagatccaggaagagtcactgaggacctacctcttcacctacagcagtgtctatgactccatcagcatggagacgctgtcagacatgtttgagctggatctgcccactgtgcactccatcatcagcaaaatgatcattaatgaggagctgatggcctccctggaccagccaacacagacagtggtgatgcaccgcactgagcccactgcccagcagaacctggctctgcagctggccgagaagctgggcagcctggtggagaacaacgaacgggtgtttgaccacaagcagggcacctacgggggctacttccgagaccagaaggacggctaccgcaaaaacgagggctacatgcgccgcggtggctaccgccagcagcagtctcagacggcctactgagctctccactctgtttcccgcctgggccatccaaccttgaagtcctaaaccacacctcagtcactaaaggtctgtttaaagttgaaacctcgtgc

SEQ ID NO: 20369 - DNA, 432 bp, Homo Sapiens
  misc_feature (306)..(315): n is a, c, g, or t
agtctcgtccaactttattgctctggagaacaggagggcaagccagcgcggggcggtagtgcccaggcatccctctccccgaggccgccggcccggccgtgccgtcggggaggaccccgcacccgccgcgagcgcgcacacaccctcggtgacaaataaatacggcggccgccccgcccgtggggtcggggatccgccctgccctatacggggaagggcgccggcggcccctagcggacacgcgcgcggcctccgggacggccgggtcgtccgcagcgcaggcccggggcggcggcggacgccggnnnnnnnnnnaatttatgggccacccgggccggcggcctcagctcagcacgcagcgctcccgccggctcaactgccggcttagcttgtggtgccgctgttccaggccgcgctccaggcgctcgtcct

SEQ ID NO: 20370 - DNA, 1773 bp, Homo Sapiens
cacccacgcgtccgatgtatttgcaggtagtaatagcattaaaaaatatactcgtgtgtaaacacatactaattttgaccttgaaagatgaattccttcaagaaaaataaaataatgcttaagataatgtgtacgaaattaaataaaggactttatttacatactacataaggtagcaaactgttgaatgagtttgaaggtatcacttattttttatgcatgtggttttagctttagaaagaaatgcgttatagaaacaagtaatagcaagaaaattgatgtatattttaatgatacattaaaattcccttttaatcataatagttaactctacttactgttttaacatacatttgatttaacaaattgttcagcataacacttctaattaagtttatcaagttgtactgtattagataatcagcagtgtatctggagtatgtttaaagagaacagttcgcaatacaaaaagttacatggagctttacatcttaactttctttgtcaatttaaatgcaatgtataaaaagtttattttgctattgtgaaaaactaaatgtaaaggaaatcacctactttcatgcaggtgtataatcttgaaaaggaaaaatgcttccatgttgaagccagattttctgtagtaaaacttttaaatattattttaaaagaaatatgtatataaatatctctatattctttggaatgatactaaagtctctggtctaggaccataccttatataaaggtataagagaccatgacaatgtctgaaaatggaatagataatgatgccttttatttaaagtggcccacataatatacattgagtactccatctctccaaatgtatttccataatgtgttgaaaacatgctaacatttgtatgatttttatacttctgccgaatagacttagaatcagatgaattgtctgtgtgtcttgcaaaagagttggggacaacttgggcaggcctatgaagtgcatagggagtgtatgtcttctgaatggttttattgttcttgtaatctagcttaaagaaatgttaactgggagggtgctgaggccactcactgcattaattttgtgtgtttagagttctgttgtcaaaagaaaactaatgaataaattagtttgtcattctagaatttaaagttctaagattagtataaagagtatatagattgttaatccccaccagctagactttgaacttaagtcagacttaaagatttgagaaattatttgtgtcatttactagacgtgatttttagttctgtttgattatatttcctacacaaacttcttatttaacaggatagcctactaaattaaatgtttcttatttcacttaactcatttgattaaactgtattctaaaacatttggggtttttccccctattcagttttaatcttggaatatgcatttgtaaattgtgatgtcattgagactatatttatatttgacttggcaacattaacatgtcctaagacttagtgcagagaagcttggcagtacgttctttgacttaaggatggcataaaataatcatttttgaacctgtgtaataaagcttgaaagcagggaaaagaatttccttttcccccttttttgtgttgtctataggaattaacttgggattgttttgtgggtttttgtttgttttaaatgtaaattgagaatcttttataagaaataaaagcattattgggtgcctttgtttgtaaaccaaaaagtaataaatgaatccctatatttccaaaacctcgtgc

SEQ ID NO: 20371 - DNA, 1592 bp, Homo Sapiens
gcacgaggagtaaacccagtttatttacataatacatattttgtcatgcagcttactgaattgcagttagtgtaataacaaaaaaagacaagcactgtcttgctatttgaaaatggcttaatatagaaagataattgtttcttaaatgagttaaccacaaccatataaattgctagacaatttaaaacagccatagataattttaaaatgtaaaatctgtaggcaaaaagcttttatagttcacacattggtaaaattaaaaccagtcttttttagtaataaaactggatagtatattttaatcttactttaatctataaaaacaaaaataacttaaatatacatcattacaaggctcagatttgtagacaactttaaaatattttttaatgttaacaatgtcttcaaaattttaccagtagtgctgtgcacacagtaggtggtcattaaatgctgactgacatacagaagtgtttctagttaacagcaatccatattcattcattcattccctattttataataaatatatcatagcagtgaaaaaatgagaggataactttcttacaatatttaacattttcatacagagttgaaatgtttacatggaataattttccctacagaaagacctgtacaccctttaaattcaaagaaacacggatttaaaaacacagtatactcttttcatgttattaattcaaatgcaagtatgtattcatatactaatacagggactgcaaaattgaaatgattcaatgtttttttattttgagaaagtttataataaaaatggctccacacctaaaataatgattttcccctcatttttaacttaagtgtaactactcagtgtcttttgtttggccaaaatgacaaatatctattaaaaggcaataaaatcatgtaagccaataagggatgttctaggagaaatatatcctactactgttgcaccaaaatcttctatcacttaacatatggatcaaaattttaaccttataaggtaaaacagccattttcaaagcagccttccatcataacgatgggtaagacacggtattcctttactgagcctcctggggggaaattctctttgctgagatactatactagcatggggaatttatattccaaaaacactacactggaaaagaaacacaacattttactgatgtattaactgaggcacattagtgactttccaagtatcatatgcacaaaaggcattttgggaataagcttcatcatcaattaacattttttctgatattcagtaattttactgttctgaaaatacaccagtatttaaaacagctcatgtcaactcatgaagaaacttgggtaatattttatactccaataaacaatgtaagtttttatgaatgtctactttaagggatttaactaatgcatatgaaagaccaaagaataagagggctacaatgtatgatagggcagtgagttctattttttaagtatatacaataaaaagaaagtttaatgcttcaggcccaaatattaagtgtttatcaagattctgagttatcaatgcaatgctaacacatgcagaaaccgaggacccctcgtgc

SEQ ID NO: 20372 - DNA, 894 bp, Homo Sapiens
gcacgagggagctgactctgggaggcgtttgggcccagagaagtggatccgccgcttgcgccgcatggagtccgaatcggaaagcggggctgctgctgacacccccccactggagaccctaagcttccatggtgatgaagagattatcgaggtggtagaacttgatcccggtccgccggaccccagatgacctggcccaggagatggaagatgtggactttgaggaagaagaggaggaagagggcaacgaagagggctgggttctagaaccccaggaaggggtggtcggcagcatggagggccccgacgatagcgaggtcacctttgcattgcactcagcatctgtgttttgtgtgagcctggaccccaagaccaataccttggcagtgaccgggggtgaagatgacaaagccttcgtatggcggctcagcgatggggagctgctctttgagtgtgcaggccataaagactctgtgacttgtgctggtttcagccatgactccactctagtggccacaggggacatgagtggcctcttgaaagtgtggcaggtggacactaaggaggaggtctggtcctttgaagcgggagacctggagtggatggagtggcatcctcgggcacctgtcctgttggcgggcacagctgacggcaacacctggatgtggaaagtcccgaatggtgactgcaagaccttccagggtcccaactgcccagccacctgtggccgagtcctccctgatgggaagagagctgtggtaggctatgaagatgggaccatcaggatttgggacctgaagcagggaagccctatccatgtactgaaagggactgagggtcaccagggcccactcacctgtgttgctgccaaccaggatggcagcttgatcctaa

SEQ ID NO: 20373 - DNA, 2257 bp, Homo Sapiens
  misc_feature (274)..(306): n is a, c, g, or t
  misc_feature (1983)..(2006): n is a, c, g, or t
gcacgaggaaaaaatattttacataattactcatttttgttgagtaagcaaaattacaaagtgtttttaaaaaaacctgtacaaatatgtttatgtattaaatcaccatccaaaatatttaaggaatatataaaaagatttttatgatcatagaaacatctattttcaaaacaatataaattaagcttttccccttgattcctgttggatatccatgttcagcatgacagtcagcactcgtaaatgccaagaaaagaattacctgaaaaagatnnnnnnnnnnnnnnnnnnnnnnnnnnnnnnnnnttggtagaatccatatacaatatggattgaaaattaagtcaccaagaatacatttagcatctttgtgttgggttctatacctaaaaattttccctccctgcccaaggtgattggaaagtactgcaattgagctaaaattttatctaggatggaaaatcaggatagactcgtttaaaaacaagtatattaaatgggttaaattaagcttttacagaacatgcttaattttgatattgagctctaaatgcaaaactcttttatactgaaaaaacacttaaagtagttttgtgtggcatcacagtgatttgtcatgaaaagccatatatgggggacatgctaaaatggcttctgaatgaaatacgacagcagagaaagatgccactgaaatgctgaaattatctttgctgagcagcttttgaatgctaaggggttccagtatgtgacccaaagaaagagttgtctcaactccttggtacagggttcattcaaacccccaagctgtgagagtgtgtttatttttaattttttaaaaggtatttaatttccaaccacacttcttatttttttgaaaagacaattttccatttcagtattacattttacaagaagtcactgctttttaggtggtggcatcaatatttaaataaaatcccagaaatgtattttaaagaatttcaggtttgaaaactcaaaccaacagaaagatatcacacctttgtatgtgcttctttgttcttgaagtagtcattatggttcattggaatctactgtagcataagcttctaggttgctccatttcttaggaaaatagcaatgaatgaatgtatagtagttgcttgtgtgaactactgctgtaaagtttgctgacatttctgcaacaacatttctccatctgatttaccagaacctgtaacaagaccagaacatgtatttatccagaaactcctgggctctgctttgttcaaagaggagcaaatccacatagaaattaaatgttataaatttatttttttcaaactaatttccaaagaatttagctgaagactcagagtcagccctacctcttgactctccacatctgcatctaagatcctgaaggccaaaggaatgtgcctgtgggatgccaaagccatcagtagctggaagaaagaatacctctttctagaggtttggtgtcctcttgctggcctgtcattatttggaaatacgcgcttttggaatttccttcattttcgctatttccaggttcagaaatcatacctaccacttgttctttctttgcccagtaaaactcagggtttctcttattcagagttaccatgttgcacacccccagtgctcagcctgcccagaagcccttctctgatctcagcaagatcttagtagtaaagctaacggatccattgaaattcatactcagcatctgtgactactagacaaagcccatttactgaaccataagtgtgcacttttaaactaaattattaactgaaagggaaaaaatagaaatgagggcattttgaagtttttagaaaagagaggaagagctgttggccagatctaagagatacttataagcccggcacaatttttaacataagtcattcctggctattaagtaaaatatttcatgaaccagaagtcctgtttctctaatattataatttgttgaggttnnnnnnnnnnnnnnnnnnnnnnnncatgtgcagacacatgtacacatataaattgaatacaaaaatagctctataacaccaaaaaacagagtttacagaaaataaacacaaaagctatatctgcaagacaagtttgattcatctagtttcatatagtttcatatagtttcattttgattaatatttagggtttaacttatagttctgcattaatttaaaaaacaagtacagagcgtttggattaaaaaagtcaacaaatgtttcaaaacagcttt

SEQ ID NO: 20374 - DNA, 954 bp, Homo Sapiens
gcacgaggagtgatcctgggacccgtggccgacattgctatgcagaagttgactgctgagatgcctgaccagtttgaaatcgcagagactgtgtccaggaccgacagcccctccaagatcatcaaactagacaccgtgcgggtgattgcagaaaaagacaagcatgcgctcctggatgtgaccccctccgccatcgagcgcctcaactatgtgcagtactaccccattgtggtcttcttcatccccgagagccggccggccctcaaggcactgcgccagtggctggcgcctgcctcccgccgcagcacccgtcgcctctacgcacaagcccagaagctgcgaaaacacagcagccacctcttcacagccaccatccctctgaatggcacgagtgacacctggtaccaggagctcaaggccatcattcgagagcagcagacgcggcccatctggacggcggaagatcagctggatggctccttggaggacaacctagacctccctcaccacggcctggccgacagctccgctgacctcagctgcgacagccgcgttaacagcgactacgagacggacggcgagggcggcgcgtacacggatggcgagggctacacagacggcgagggggggccctacacggatgtggatgatgagcccccggctccagccctggcccggtcctcggagcccgtgcaggcagatgagtcccagagcccgagggatcgtgggagaatctcggctcatcagggggcccaggtggacagccgccacccccagggacagtggcgacaggacagcatgcgaacctatgaacgggaagccctgaagaaaaagtttacgcgagtccatgatgcggagtcctccgatgaagacggctatgactggggtccggccactgacctgtgacctctcgcaagctggcagctggtccgtcctccttctccctccctgggg

SEQ ID NO: 20375 - DNA, 1147 bp, Homo Sapiens
gcacgaggcccccaataactcgctcatgcttttttttgtacggaatagataattaagagtgaaggagttgaaacttttcttgttagtgtacaactcattttgcgccaattttcacaagtgtttgtctttgtctgaatgagaagtgagaaggtttttatactctgggatgcaaccgacatgttcaaatgtttgaaatcccacaatgttagaccaatcttaagtttcgtaagttatttcctttaagatatatattaaacagaaatctaagtagaactgcattgactaaccagtccctctggatggtggtgaacctgaagcatgctttaacctctaagactgtctaacacgcgtttcattcaatgtctccacagactgggtagcaaaaaaatcaccttttagttttagtttttaatctaaagatgttagacagatgctgagtgtgcgttttctcaaccgcttcaacattgtaagcgatgtatgctttggttgacaggaagttccttttccaggcaggtcccgttgccacctcctgctcactcagtcccgggctctgccgagtggtcctgggaatggcggcgggcccgtccagcgtgggccaccactggggccgggggccacgggccgcatgctgggcgggccctccagagaaggacacaaacgtgtttcgtaagcccaggcaccaatgggaatggaccaaagagtttcagggaaactccagtatattccagagtcagatctaagctccaggcacgcctgaagatgtgttgctactctgacatcccgagtttctgtccacacattgcatgcacagcgccccacacattggatactgttgttcacgataatttctcccgttttccagagcatttaacatagcttggaggcgtaaaatggctctgtattttaataacacagaaacatttgagcattgtatttctcgcatcccttctcgtgagcgcttagacctttttctattttagtcggattttgttttggaattttgcttttgtatgaacactcagcagaaaagtacttacttcttgccagttatctattaaccaaaacctttgatttgtagttttaaagattaaccctcaaagttctcttcataactgccttgacattttgggttgttctgttctgttaa

SEQ ID NO: 20376 - DNA, 1292 bp, Homo Sapiens
  misc_feature (64)..(102): n is a, c, g, or t
gcacgaggccaaaacaaagggaagaagagaaccttctgtgactcctaaaatgttccatgctgcnnnnnnnnnnnnnnnnnnnnnnnnnnnnnnnnnnnnnnnaaacatgaatataatgcttacttcaaattgtttagtaaaacaaaataactaaagaaatgtgagcttcccaaggtttctaaactatcgctgttgtatattctatagcgttccttattctttgagggaaactgtgcttgctgtgatccattttgtctctagcttctagttgtgattcttgtccataagcaccaaatttgatgcccatgatttctaaaggtcatttcttttatctgaatgaaaatggtggtactaagactgtgaaaattatgtgaaacctaaagtagttgccaaagtggctcagggttgtaaaattcattgacttaattattcatgtgccagatcaacccctttattttctctttagctgtgcatatttaaaatattggaaagtatcagatttacagattttctttgactaatttttttcacataactttaggattttcgaaagttgtaaccataactggatatcttagctgagcaaaggcggttataatttgtctttttaagatcactggaaattgataaaattttgtgataattatgattattctgtgccatttacagtttctaatactatactgtatgaaatatgtataaatatatgatgctgagtctgtggaatgatacttctgaaatcaaaattcctcataaggcatgaagttgtaaaaacttgaatgtgtatagttagatatttaaatggttgcttcttcatagaattgtctgctttttaaaactggaagtacaggattttcttcaggtaaaatctgtgtgttccaattacagttgtagctgaaggaagtatgctttggtgagtcaattagtatgggaacttgactaaagacccccagtgttgtaacgtacctttgtacccagacaaaacaattatgttacattcctcaaagtggcatgggctttcttctctaattcttttgttttattagacccaagacaagttctaaaaattgaatgcaatgagagattgtccagaaatgtaatatatactaaaatataccacttaagcattgattgccttttcttgtttgcttcaagaatataaaacttgttacttgagcttggaatcatgggcttgattgaattaattactcttggggaaaaagacaccttgtggcattaagtcttgctttggttaaagccttatttcacataattgctaaaactcatttttg

SEQ ID NO: 20377 - DNA, 892 bp, Homo Sapiens
gcacgaggtaattacaccactgtaagtagattctgcctctgaccctcccacaggacacaaccggatgtgattcttgtcacttctattttaaacatgcatactgggaaaaacagaaacacaagagtgctatgggtacacgcgacgtgtgagaagaaaggaaccccctggagacacggacgcggtgtgcggtgacagccaggcctcactgacaacagggcagcgaatcgcagccgggacgcctctgaggcggaagcagtcttgggatttcctgtcacgctctcgatgcttctgcccactctggtttgtcacggggatgcttcattttggacagtataaaaccggtgattaatgcatatcttgctcttcagcaaaatactattcaagtagttttaacttaaatattttaaaagtaatctttacattattgaagattgttaaaaaatacagaatctgacaacttttcactcaatctgatgctctgaaactcttcacttctgttttatcataatttagaaggcaatccctggcctctataaaactctctgcaggattagcttcaagatccatctttcccccactggttcgagtttaaaaggctttcagaaccttttgccactgcattataaagagaacatgaaccccttcccattacttcctttagctacacatgctatgactgagagtgtgctggaagctaaacaagccccagctgatttctgccacataaaagggcgccgtgaagaatttccctgttgaaaccttaatgaagacgatgatccccagtgaagctttatgaagagacggcacagcagagtgaaatgtttggcaatcacagttaattagaattacatcctttgatcagggatgatgctatctccgcgaactcagtcgt

SEQ ID NO: 20378 - DNA, 864 bp, Homo Sapiens
gcacgagggtccggcgcaactccgcaccgcagagccggcgcctcctcggcagacagaacctccactcaatacaccagaaaacagagagtatcttgcagaaattatgttcgaatcatttaacgttccaggactctacattgcagttcaggcagaaggttatgtaattggaagctgcatcaaacacatcccgattgcaggtagagatattacgtatttcattcaacagctgctaagggagagggaggtgggaatccctcctgagcagtcactggagaccgcaaaagccattaaggagaaatactgttacatttgccccgatatagtcaaggaatttgccaagtatgatgtggatccccagaagtggatcaaacagtacacgggtatcaatgcgatcaaccagaagaagtttgttatagacgttggttacgaaagattcctgggacctgaaatattctttcacccggagtttgccaacccagactctatggagtccatctcagatgttgttgatgaagtaatacagaactgccccatcgatgtgcggcgtccgctgtataagatggaacaaattccactgagctatcctcaaggtcacggattccatcctctgtcacctccatttcattgagatgatatattgagcccatgcgtagccttttatttgagatttccaaggccagcaatgttctcttcctctcccttttctttgtataaaaattcattctcaagaaaaactctcatatcaattgtttacatgtcactatggctaagacactaaaagccctctccctgcaaaactggtggcaaagctctctagagaaccacaaactgttgcatccttactacgtggggcagcagcaagcc

SEQ ID NO: 20379 - DNA, 877 bp, Homo Sapiens
gcacgaggccgaggtggtgtacctcatcatccgggcctgtgcccgccgagcccagcgccgctccaatccaccttcccgcaagggctcgggcttcggccaccgcctctcacctgaatacaagcagaatgagatcaacaagctgctgagtgagcaggatggctccctgaaagacatactgcgccgcagccctggcaccggggctgggctggctgaaaagagcgaccgctgctcggcctgctgatgccacataccaggcaacctcccatcccacccccgaccctgccctgggcgagcccctccttctcccctgccggtgcacaggcctctgcctgctggggattactcgatcaaaaccttccttccctggctacttcccttcctcccggggccttccttttgaggagctggaggggtggggagctagaggccacctatgccagtgctcaaggttactgggagtgtgggctgcccttgttgcctgcacccttccctcttccctctccctctctctgggaccactgggtacaagagatgggatgctccgacagcgtctccaattatgaaactaatcttaaccctgtgctgtcagataccctgtttctggagtcacatcagtgaggagggatgtgggtaagaggagcagagggcaggggtgctgtggacatgtgggtggagaagggagggtggccagcactagtaaaggaggaatagtgcttgctggccacaaggaaaaggaggaggtgtctggggtgagggagttagggagagagaagcaggcagataagttggagcaggggttggtcaaggccacctctgcctctagtccccaaggcctctctctgcctgaaatgttacacattaaacaggattttacagt

SEQ ID NO: 20380 - DNA, 1468 bp, Homo Sapiens
gcacgaggctcggaattgccgtgtgcaacatcccgtctgcagccgtggaagagacagcggactctaccatctgccacatcctcaacctgtaccggaggaacacgtggctgtaccaggcactgcgggaaggcacgcgggttcagagcgtggagcagatccgcgaggtggcctcgggagcggcccgcatccgtggggagacgctgggcctcattggctttggtcgcacggggcaggcggttgcagttcgagccaaggcctttggattcagcgtcatattttatgacccctacttgcaggatgggatcgagcggtccctgggcgtgcagagggtctacaccctgcaggatttgctgtatcagagcgactgcgtctccttgcactgcaatctcaacgaacataaccaccacctcatcaatgactttaccataaagcagatgaggcagggagcattccttgtgaacgcagcccgtggcggcctggtggacgagaaagccttagcacaagccctcaaggagggcaggatacgaggggcagccctcgacgtgcatgagtcagagcccttcagctttgctcagggtccgttgaaagatgccccgaatctcatctgcactcctcacactgcctggtacagtgagcaggcgtcactggagatgagggaggcagctgccaccgagatccgccgagccatcacaggtcgcatcccagaaagcttaagaaattgtgtgaacaaggaattctttgtcacatcagcgccttggtcagtaatagaccagcaagcaattcatcctgagctcaatggtgccacatacagatatccgccaggcatcgtgggtgtggctccaggaggacttcctgcagccatggaagggatcatccctggaggcatcccagtgactcacaacctcccgacagtggcacatccttcccaagcgccctctcccaaccagcccacaaaacacggggacaatcgagagcaccccaacgagcaatagcagagaatgccagaaggtaatcactcagatacacttgggaccaagagacagtgaaaaatagatgaactaagagaaaaagaatcggatggtctttgtaactgattctggacatatgcatcattgatgttgcagtgttgaaactacaagagctagaaaactgaagatgtcgtctgcttacggaagcgctgaaagactaggatgtgatttattaacgaccaacttctgttattgtgtgttaagtttttcatctgtgcatcaaatcacaaaaagaataaatagagctttttctttatcagtcccttgggcacagaaggtcctgaacaccctgctctacaatgttgcatcagagttcaaacaacaaataaaaaatattaagagggaaatccccatcctgtgacttgagttcccttaagtcctctggggctggtgacctctttttgctaataggaaatcaattactacaaaatggggagaaa

SEQ ID NO: 20381 - DNA, 1494 bp, Homo Sapiens
gcacgaggtgtagctgcgcagcgtcgcgcgcgctaccgcacccaggttcggcccgtaggcgtctggcagcccggcgccatcttcatcgagcgccatggccgcagcctgcgggccgggagcggccgggtactgcttgctcctcggctttgcctctttctctgattattattataagtggtcctcggcggattcctgtaacatgagtggattgattaccatcgtggtactccttgggatcgcctttgtagtctataagctgttcctgagtgacgggcagtattctcctccaccgtactctgagtatcctccattttcccaccgttaccagagattcaccaactcagcaggacctcctcccccaggctttaagtctgagttcacaggaccacagaatactggccatggtgcaacttctggttttggcagtgcttttacaggacaacaaggatatgaaaattcaggaccagggttctggacaggcttgggaactggtggaatactaggatatttgtttggcagcaatagagcggcaacacccttctcagactcgtggtactacccgtcctatcctccctcctaccctggcacgtggaatagggcttactcaccccttcatggaggctcgggcagctattcggtatgttcaaactcagacacgaaaaccagaactgcatcaggatatggtggtaccaggagacgataaagtagaaagttggagtcaaacactggatgcagaaattttggatttttcatcactttctctttagaaaaaaagtactacctgttaacaattgggaaaaggggatattcaaaagttctgtggtgttatgtccagtgtagctttttgtattctattatttgaggctaaaagttgatgtgtgacaaaatacttatgtgttgtatgtcagtgtaacatgcagatgtatattgcagtttttgaaagtgatcattactgtggaatgctaaaaatacattaatttctaaaacctgtgatgccctaagaagcattaagaatgaaggtgttgtactaatagaaactaagtacagaaaatttcagttttaggtggttgtagctgatgagttattacctcatagagactataatattctatttggtattatattatttgatgtttgctgttcttcaaacatttaaatcaagctttggactaattatgctaatttgtgagttctgatcacttttgagctctgaagctttgaatcattcagtggtggagatggccttctggtaactgaatattaccttctgtaggaaaaggtggaaaataagcatctagaaggttgttgtgaatgactctgtgctggcaaaatgcttgaaacctctatatttctttcgttcataagaggtaaaggtcaaatttttcaacaaagtcttttataacaaaagcatgcagttctctgtgaaatctcaaatattgttgtaatagtctgttttcatctttaaaagaatcaataaaaacaaacaggggttta

SEQ ID NO: 20382 - DNA, 758 bp, Homo Sapiens
gcacgaggcaggcatgagccaccgtgctcagccgcaaaattctttatgaattttacacttggcaaatgttaatgacggaagccatagtctgctcctaatacatgtccaaagcattgactgttgtgtcattagctgcctggttacattagctccctggcttcttgtttagaccactgctaatcccttaaaaacaagaggtctggcactagtagcacaacctaaggtggcattacagatctttgagcgagccacagcaacttttctgccaagtcagcttagtttagacttaagtgaatcaggctattgctatcctaatgtatgtctctatgagtgtatttagccacacatctgcccttggttgactttctgactcattgcttgcttgcttgtttccttgctttggaaaactattgaagattgctaaaaaataccactgcaaagtgatggaaaagggtggagaacaggggagtagccaggctggatggctcaaatataaatgaatgaggaattctttatgaagtatcagtcagattttatgattaagtgatgtaatataggaattatgtaaaagggaagaatgtctgatactgatctattagagaggtactttagaggcttcttgattggcataaagttcctaaggttatagattttccccccttttggctgtatagcaaagtgttttaatccacggttgtgccttattgttccattaaaattgtatcttcgatccatcaataaatacttgtggttgaaac

SEQ ID NO: 20383 - DNA, 766 bp, Homo Sapiens
  misc_feature (607)..(642): n is a, c, g, or t
ttcggcacgaggcagccagctaccaccctacaccgtcgcccatggcctatcaggctagccccagcccgagccccgttggctacagtcctatgacacctggagctccctcccctggtggctacaacccacacacgccaggctcaggcatcgagcagaactccagcgactgggtaaccactgacattcaggtgaaggtgcgggacacctacctggatacacaggtggtgggacagacaggtgtcatccgcagtgtcacggggggcatgtgctctgtgtacctgaaggacagtgagaaggttgtcagcatttccagtgagcacctggagcctatcacccccaccaagaacaacaaggtgaaagtgatcctgggcgaggatcgggaagccacgggcgtcctactgagcattgatggtgaggatggcattgtccgtatggaccttgatgagcagctcaagatcctcaacctccgcttcctggggaagctcctggaagcctgaagcaggcagggccggtggacttcgtcggatgaagagtgatcctccttccttccctggcccttggctgtgacacaagatcctcctgcagggctaggcggattgttctggannnnnnnnnnnnnnnnnnnnnnnnnnnnnnnnnnnnccctccctggtgctcattggaatctgagtagagtctgggggagggtccccaccttcctgtacctcctccccacagcttgcttttgttgtaccgtctttcaataaaaagaagctgtttggtctaa

SEQ ID NO: 20384 - DNA, 944 bp, Homo Sapiens
aaaaaatacagaaagatatgataataagcactgaacaattttattaagttctttgccaaaatgcaaacatatgaaatgagattgtgtacaatagaccaaaggctacctagagaccaacagtcatataaaaataatttaaggcaagctttattgatttattttaaataaggtaagtgaaatatgggctcagaattaaataagattttcaagaaagttcttgtagctgtaaaataggagaatatgaatgtcaaaattttgactgtttctgtgccaaacagaaagtttcacaaatgctttccaaactgcaataaaaagaactttaataataccattaagtctacaaagttactgtcaagttgacagtattcaaatactacaatattttctaaatgtaaattttgtaacatcttgaatactttctaagcccacttttctgtcattacaaaaataaaattccaagaaatttctgctacattaatcttaagagatcaaaataacctatgtagttttctaggttaatgtaattcaagtaaagtggtactaaagaaaacacatcattttaataaaaaccaaacctgcttaagagacataacagagttaagcaaaagtataaactactataataagcagttgcttagatttaatataagaggatttgttttcactggaaaaaacgttaaagccctttcttttttctggagctgaaacagtggcttgtgttctagttattcaatatttctacagtaatttttttaatttttgtacttgtcaatgtgttcacgggctacaataagtctttgaatttgtgaagtaccttcataaatctgatagattttggcatccctcattagtttttctacaggatattctgtattaaatccattgcctccaagtatctgcacagcatcagtagctaactgatttgcaatatctccacctcgtgc

SEQ ID NO: 20385 - DNA, 1375 bp, Homo Sapiens
gcacgaggacggccgcctagcgcgcgccgggactgcatttcccataggcccacgctgcggagcaccgcccacccgagtctcacgcgagtgcgctgccgcgaggtgtccctgccgcagcccccgcccgcccgcagagcttttgaaaggcggcgggaggcggcgagcgccatggccagtccgggctgcctgctgtgcgtgctgggcctgctactctgcggggcggcgagcctcgagctgtctagaccccacggcgacaccgccaagaagcccatcatcggaatattaatgcaaaaatgccgtaataaagtcatgaaaaactatggaagatactatattgctgcgtcctatgtaaagtacttggagtctgcaggtgcgagagttgtaccagtaaggctggatcttacagagaaagactatgaaatacttttcaaatctattaatggaatccttttccctggaggaagtgttgacctcagacgctcagattatgctaaagtggccaaaatattttataacttgtccatacagagttttgatgatggagactattttcctgtgtggggcacatgccttggatttgaagagctttcactgctgattagtggagagtgcttattaactgccacagatactgttgacgtggcaatgccgctgaacttcactggaggtcaattgcacagcagaatgttccagaattttcctactgagttgttgctgtcattagcagtagaacctctgactgccaatttccataagtggagcctctccgtgaagaattttacaatgaatgaaaagttaaagaagtttttcaatgtcttaactacaaatacagatggcaagattgagtttatttcaacaatggaaggatataagtatccagtatatggtgtccagtggcatccagagaaagcaccttatgagtggaagaatttggatggcatttcccatgcacctaatgctgtgaaaaccgcattttatttagcagagttttttgttaatgaagctcggaaaaacaaccatcattttaaatctgaatctgaagaggagaaagcattgatttatcagttcagtccaatttatactggaaatatttcttcatttcagcaatgttacatatttgattgaaagtcttcaatttgttaacagagcaaatttgaataattccatgattaaactgttagaataacttgctactcatggcaagattaggaagtcacagattcttttctataatgtgcctggctctgattcttcattctgtatgtgactatttatataacattagataattaaatagtgagacataaatagagtgtttttcatggaaaagccttcttatatctgaagattgaaaaaaataaatttactgaaatac

SEQ ID NO: 20386 - DNA, 1061 bp, Homo Sapiens
gcacgaggcccacttttatgacagttttcttccgcagcttggctcttaaattttactggcaggtgtatggttgttggagggttcctagtgagttgggggacctggcaatagagctgcttggttggaggaagtgaagctggcttagtaccagcagctgatctcttccacgtgctgctgctttttttgccactctgatactaaaccagagaaagctgcaggggataaagaagctgtggctgttttttgcttttgggtggcaatgagaaagagtcacagtgtgggttaaagggatctgcagtggggccaaggatgccaccccaccctcagctgtaggcaagcttgcacataaataacccccgtcagtggagtgttcgggatgcagggggcactatagtgttcttggacttgtcgtcctggggcagttttagttctttatatttagtgggtcagtgccaagtgctaccacttcccaataaaggaatggggacccagaggctgggtccctggctaccttgttatgaggttttgttatttctctgacaagattgctttggaaagagctgcttttagggattattttttgaataccccgagtggggagcagggttctcctcaaagcctcacaaccataggatcataggaaaggggccctattttcctgctgcttcccagctcagaacatatactgaatggaatgtatttttaagagaataaagtctatttttttgtattttaaagattgagagggctaagaaagtagccctcaaataaactgttattgcattataggcccctttgttgggggcagcctgttggtccacacctacttgctcaggcaggtgctctggtctctctcacccctgccccttagagtctaggtgcagcagctccaagcatgggaccaaggaggccagaacctgtcgctggaaaccagggcaaagcagtggctcagggctccttgggtgcatgtgtatcattggagctgcctgtctgcatgtatcctctggcgcgaatgctctctgttggctctgcagtacatatgtaaccaataaagctccctc

SEQ ID NO: 20387 - DNA, 1770 bp, Homo Sapiens
gcacgaggctttgagaccctctgttctgtgaactgtgagctctacttcatggtgggtgtgaattctaggaccaacactcctgtggagacgtggaaaggttccaaaggcaaacagtcctatacctacatcattgaggagaacactaccacgagcttcacctgggccttccagaggaccacttttcatgaggcaagcaggaagtacaccaatgacgttgccaagatctactccatcaatgtcaccaatgttatgaatggcgtggcctcctactgccgtccctgtgccctagaagcctctgatgtgggctcctcctgcacctcttgtcctgctggttactatattgaccgagattcaggaacctgccactcctgcccccctaacacaattctgaaagcccaccagccttatggtgtccaggcctgtgtgccctgtggtccagggaccaagaacaacaagatccactctctgtgctacaatgattgcaccttctcacgcaacactccaaccaggactttcaactacaacttctccgctttggcaaacaccgtcactcttgctggagggccaagcttcacttccaaagggttgaaatacttccatcactttaccctcagtctctgtggaaaccagggtaggaaaatgtctgtgtgcaccgacaatgtcactgacctccggattcctgagggtgagtcagggttctccaaatctatcacagcctacgtctgccaggcagtcatcatccccccagaggtgacaggctacaaggccggggtttcctcacagcctgtcagccttgctgatcgacttattggggtgacaacagatatgactctggatggaatcacctccccagctgaacttttccacctggagtccttgggaataccggacgtgatcttcttttataggtccaatgatgtgacccagtcctgcagttctgggagatcaaccaccatccgcgtcaggtgcagtccacagaaaactgtccctggaagtttgctgctgccaggaacgtgctcagatgggacctgtgatggctgcaacttccacttcctgtgggagagcgcggctgcttgcccgctctgctcagtggctgactaccatgctatcgtcagcagctgtgtggctgggatccagaagactacttacgtgtggcgagaacccaagctatgctctggtggcatttctctgcctgagcagagagtcaccatctgcaaaaccatagatttctggctgaaagtgggcatctctgcaggcacctgtactgccatcctgctcaccgtcttgacctgctacttttggaaaaagaatcaaaaactagagtacaagtactccaagctggtgatgaatgctactctcaaggactgtgacctgccagcagctgacagctgcgccatcatggaaggcgaggatgtagaggacgacctcatctttaccagcaagaagtcactctttgggaagatcaaatcatttacctccaagaggactcctgatggatttgactcagtgccgctgaagacatcctcaggaggcccagacatggacctgtgagaggcactgcctgcctcacctgcctcctcaccttgcatagcacctttgcaagcctgcggcgatttgggtgccagcatcctgcaacacccactgctggaaatctcttcattgtggccttatcagatgtttgaatttcagatctttttttatagagtacccaaaccctcctttctgcttgcctcaaacctgccaaatatacccacactttgtttgtaaatt

SEQ ID NO: 20388 - DNA, 1243 bp, Homo Sapiens
gaaattattaatccctgcctgtgctctacatagcctcatgggcatcattggatagctcagagggcccttgattctggcaaggcaaataaagccagaatgagaaattaccatcttctactagagaaaaccaagagaaaaatttttatgctaggatgcctttatgaccacttaattttttaatcttagtttaatggtctctccctggtgctaactgctgacagtggccacctcttttttgggggttgaggggcctacataactagctggccttaccccatatcttttgttcaaacataataccatctttttgcttcttctgaactttagatctccataacacatgtactgtagaatgtgatggaaaagcattgatgagaatttattggcagttcagattgtgttttcccaacttaggctctttattaattggttaaggttttctccaaaaagggcatttcaacaatgggaattatttaatgtaacagtgggcacagattacttatcttccttctctgctttgtgactcaccagcagtaacacacacaatccacatcttgtgcacctcaaatgaacagacttggtttccttgctttcttgacatttccatgactgtttcacatacaaactattgggtgaggtttttcagctgttaccgacccacgtcctgctgtctctgtgtggtcctacaaaaactgtccattcccacccctttgctttgccatttgcaagagtctggaattgtcaggtctcagcttcgaaaagtcctggttccactgacaggacacattctttagtgggaattaagacctacaaagtctagtttgtatgtaggtatgaagggaattttttaaataaattgaaaagctgtgaacagcattagaactttgtctatttcttaattttaaaatatgctgatatgccttaaactgtagttgtagatccttgtcattttgctgtttgaaaataaccaatgtgttttctaaaactgtcgtgtaatctactttcattgttaatgcagaattgtcatatatgtaagctgcatgttagacatttgtcttttttaaactaaagtaattgtattgatgtgaagcatatcattttttcaaatatgaaagtgatcacttagcaacatgcttggtaatttggcatctgttaaggtaggagagtggtgaacagataatctatgcatatatcactagtgccaagacataaagcgggggaaaatatatttttaccctcgtgc

SEQ ID NO: 20389 - DNA, 1206 bp, Homo Sapiens
  misc_feature (45)..(59): n is a, c, g, or t
cggtataaagatagatcaattacccacccttaaatagctagattnnnnnnnnnnnnnnntggaaaagaaagctgtggaggtgtgccccagcacggctgctttgaaaggtttatcatctatccgtttggtttatggataaaaagaaaatggtaactcagggtaaccaggagccgacaacaactcctgacgcaatggttcagccttttactaccatcccatttccaccacctccgcggaatggaattctcaccgagtatggggtgcctcacactcaatactatgccggcctgaccggtgagcataacctgacactctacggaagtacgcaagcccacggggagcagagcagcaactcacccagcacacaaaatggatctcttacgacagaaggtggagcacagacagacggccagcagtcacagacacaaagtagtgaaaattcagagagtaaatctaccccgaaacggctgcatgtctctaatattcctttccgcttccgggaccctgacctccggcagatgtttgggcagtttggcaaaatcctagatgtagaaataatctttaatgaacgtggctctaagggattcgggttcgtaactttcgagaatagtgctgatgcagacagggccagggagaaattacacggcaccgtggtagagggccgtaaaatcgaggtgaataatgctacagcacgtgtaatgaccaataagaagatggtcacaccatatgcaaatggttggaaattaagcccagtagttggagctgtatatggtccggagttatatgcagcatccagctttcaagcagatgtgtccctaggcaatgatgcagcagtgcccctatcaggaagagggggtatcaacacttacattcctttaatcattcctggcttcccttaccctactgcagccaccacggcagccgctttcagaggagcccatttgaggggcagagggcggacagtatatggtgcagtccgagcggtacctccaacagccatccccgcctatccaggtgtggtttaccaggacggattttacggtgctgacctctatggtggatatgcagcctacagatatgcacagcctgctactgcaaccgcagccaccgctgctgcagccgctgcagccgcttacagtgacggttatggcaggtgtacacagccgacccctaccatgcccttgcccctgccgctagctatggagt

SEQ ID NO: 20390 - DNA, 1791 bp, Homo Sapiens
ccccgggctgcaggaattcggcacgaggggaagatatagataagaatgctgatggtttcattgatctagaagagtatattggtgacatgtacagccatgatgggaatactgatgagccagaatgggtaaagacagagcgagagcagtttgttgagtttcgggataagaaccgtgatgggaagatggacaaggaagagaccaaagactggatccttccctcagactatgatcatgcagaggcagaagccaggcacctggtctatgaatcagaccaaaacaaggatggcaagcttaccaaggaggagatcgttgacaagtatgacttatttgttggcagccaggccacagattttggggaggccttagtacggcatgatgagttctgagctacggaggaaccctcatttcctcaaaagtaatttatttttacagcttctggtttcacatgaaattgtttgcgctactgagactgttactacaaactttttaagacatgaaaaggcgtaatgaaaaccatcccgtccccattcctcctcctctctgagggactggagggaagccgtgcttctgaggaacaactctaattagtacacttgtgtttgtagatttacactttgtattatgtattaacatggcgtgtttatttttgtatttttctctggttgggagtatgatatgaaggatcaagatcctcaactcacacatgtagacaaacattagctctttactctttctcaaccccttttatgattttaataattctcacttaactaattttgtaagcctgagatcaataagaaatgttccggagagaggaaaaaaaaaaatatatgctccaccatttatatttagagagagaacactagtcttgcctgtcaaaaagtccaacatttcataggtagtaggggccacatattacattcagttgctataggtccagcaactgaacctgccattacctgggcaaggaaagatccctttgctctaggaaagcttggcccaaattgattttcttctttttccccctgtaggactgactgttggctaattttgtcaagcacagctgtggtgggaagagttagggccagtgtcttgaaaatcaatcaagtagtgaatgtgatctctttgcagagctatagatagaaacagctggaaaactaaaggaaaaatacaagtgttttcggggcatacattttttttctgggtgtgcatctgttgaaatgctcaagacttaattatttgccttttgaaatcactgtaaatgcccccatccggttcctcttcttcccaggtgtgccaaggaattaatcttggtttcactacaattaaaattcactcctttccaatcatgtcattgaaagtgcctttaacgaaagaaatggtcactgaatgggaattctcttaagaaaccctgagattaaaaaaagactatttggataacttataggaaagcctagaacctcccagtagagtggggatttttttcttcttccctttctcttttggacaatagttaaattagcagtattagttatgagtttggttgcagtgttcttatcttgtgggctgatttccaaaaaccacatgctgctgaatttaccagggatcctcatacctcacaatgcaaaccacttactaccaggcctttttctgtgtccactggagagcttgagctcacactcaaagatcagaggacctacagagagggctctttgggtttgaaggaccatggcttactttcctgcctttgacccatcacacccaatttctcctctttcctctcccgctgcc

SEQ ID NO: 20391 - DNA, 417 bp, Homo Sapiens
gcacgaggccaaaatggcgtcagttgtaccagtgaaggacaagaaacttctggaggtcaaactgggggagctgccaagctggatcttgatgcgggacttcagtcctagtggcattttcggagcgtttcaaagaggttactaccggtactacaacaagtacatcaatgtgaagaaggggagcatctcggggattaccatggtgctggcatgctacgtgctctttagctactccttttcctacaagcatctcaagcacgagcggctccgcaaataccactgaagaggacacactctgcacccccccaccccacgaccttggcccgagcccctccgtgaggaacacaatctcaatcgttgctgaatcctttcatatcctaataggaattaacctccaaataaaacatgactggtacgtgt

SEQ ID NO: 20392 - DNA, 1095 bp, Homo Sapiens
  misc_feature (777)..(858): n is a, c, g, or t
taccagtgccgggcgctccccacccctcccccggctcccccggtgtccgccatggccaaagcctacgaccacctcttcaagttgctgctgatcggggactcgggggtgggcaagacttgtctgatcattcgctttgcagaggacaacttcaacaacacttacatctccaccatcggaattgatttcaagatccgcactgtggatatagaggggaagaagatcaaactacaagtctgggacacggctggccaagagcggttcaagacaataactactgcctactaccgtggagccatgggcattatcctagtatacgacatcacggatgagaaatctttcgagaatattcagaactggatgaaaagcatcaaggagaatgcctcggctggggtggagcgcctcttgctggggaacaaatgtgacatggaggccaagaggaaggtgcagaaggagcaggccgataagttggctcgagagcatggaatccgatttttcgaaactagtgctaaatccagtatgaatgtggatgaggcttttagttccctggcccgggacatcttgctcaagtcaggaggccggagatcaggaaacggcaacaagcctcccagtactgacctgaaaacttgtgacaagaagaacaccaacaagtgctccctgggctgaggaccctttcttgcctccccaccccggaagctgaacctgagggagacaacggcagagggagtgagcaggggagaaatagcagaggggcttggagggtcacataggtagatggtnnnnnnnnnnnnnnnnnnnnnnnnnnnnnnnnnnnnnnnnnnnnnnnnnnnnnnnnnnnnnnnnnnnnnnnnnnnnnnnnnntgaattgaggaagtgaaagaaggccaggaggtaggaagagagggagtaggaaaggaaggagagatgcctcaggcttcagaccttacttgggttttcagggcaaacataaatgtaaatacactgatttattctgttactagatcaggtttagggccctgcaaagggctagctcggcactacactagggaattggctccggttcgtccctggtcagggtctttcttggtattaaaggcc

SEQ ID NO: 20393 - DNA, 495 bp, Homo Sapiens
gcacgaggcccctcccgtcctctttccgccatctttccgcgccgccacaatggtgcgcatgaatgtcctggcagatgctctcaagagtatcaacaatgccgaaaagagaggcaaacgccaggtgcttattaggccgtgctccaaagtcatcgtccggtttctcactgtgatgatgaagcatggttacattggcgaatttgaaatcattgatgaccacagagctgggaaaattgttgtgaacctcacaggcaggctaaacaagtgtggggtgatcagccccagatttgacgtgcaactcaaagacctggaaaaatggcagaataatctgcttccatcccgccagtttggtttcattgtactgacaacctcagctggcatcatggaccatgaagaagcaagacgaaaacacacaggagggaaaatcctgggattctttttctagggatgtaatacatatatttacaaataaaatgcctcatggactctggtgcttcc

SEQ ID NO: 20394 - DNA, 1291 bp, Homo Sapiens
gcacgaggggagagctatgctggcatctacatccccaccctggccgtgctggtcatgcaggatcccagcatgaaccttcaggggctggctgtgggcaatggactctcctcctatgagcagaatgacaactccctggtctactttgcctactaccatggccttctggggaacaggctttggtcttctctccagacccactgctgctctcaaaacaagtgtaacttctatgacaacaaagacctggaatgcgtgaccaatcttcaggaagtggcccgcatcgtgggcaactctggcctcaacatctacaatctctatgccccgtgtgctggaggggtgcccagccattttaggtatgagaaggacactgttgtggtccaggatttgggcaacatcttcactcgcctgccactcaagcggatgtggcatcaggcactgctgcgctcaggggataaagtgcgcatggaccccccctgcaccaacacaacagctgcttccacctacctcaacaacccgtacgtgcggaaggccctcaacatcccggagcagctgccacaatgggacatgtgcaactttctggtaaacttacagtaccgccgtctctaccgaagcatgaactcccagtatctgaagctgcttagctcacagaaataccagatcctattatataatggagatgtagacatggcctgcaatttcatgggggatgagtggtttgtggattccctcaaccagaagatggaggtgcagcgccggccctggttagtgaagtacggggacagcggggagcagattgccggcttcgtgaaggagttctcccacatcgcctttctcacgatcaagggcgccggccacatggttcccaccgacaagcccctcgctgccttcaccatgttctcccgcttcctgaacaagcagccatactgatgaccacagcaaccagctccacggcctgatgcagcccctcccagcctctcccgctaggagagtcctcttctaagcaaagtgcccctgcaggccgggttctgccgccaggactgcccccttcccagagccctgtacatcccagactgggcccagggtctcccatagacagcctgggggcaagttagcactttattcccgcagcagttcctgaatggggtggcctggccccttctctgcttaaagaatgccctttatgatgcactgattccatcccaggaacccaacagagctcaggacagcccacagggaggtggtggacggactgtaattgatagattgattatggaattaaattgggtacagcttc

SEQ ID NO: 20395 - DNA, 750 bp, Homo Sapiens
gcacgaggcattgccccgcttctgggagtggggaaagaacatcgtctgcgtggggaggaactacgcggaccacgtcagggagatgcgcagcgcggtgttgagcgagcccgtgctgttcctgaagccgtccacggcctacgcgcccgagggctcgcccatcctcatgcccgcgtacactcgcaacctgcaccacgagctggagctgggcgtggtgatgggcaagcgctgccgcgcagtccccgaggctgcggccatggactacgtgggcggctatgccctgtgcctggatatgaccgcccgggacgtgcaggacgagtgcaagaagaaggggctgccctggactctggcgaagagcttcacggcgtcctgcccggtcagcgcgttcgtgcccaaggagaagatccctgaccctcacaagctgaagctctggctcaaggtcaacggcgaactgagacaggagggtgagacatcctccatgattttttccatcccctacatcatcagctatgtttctaagatcataaccttggaagaaggagatattatcttgactgggacgccaaagggagttggaccggttaaagaaaacgatgagatcgaggctggcatacacgggctggtcagtatgacatttaaagtggaaaagccagaatattgagttatttcttaacaagtttcgagagagaagggagcaagacaagagcaagcaacggctattaaatgtcacaatcctttaattagaaaccattt

SEQ ID NO: 20396 - DNA, 878 bp, Homo Sapiens
gcacgaggccccggctgattgatggcagagaggctgtgactttcctccgcaaaatcaaggcagcggtagaggatcccagagtcctcctcctggatctttaggaggaacccacacaccctacaagttgatcatgcaggaactgaaaaccagtcttctccctgtcccctcatgggtcccgggttagcctggtgacaggcagacacatgctgttggcctcaagcaaggaagcagagcactgtgtaaccagcagtcacaggtcttttcttggcgttcctgccaggctctccctctctgcacctgtctcatagcctcgaatatcttaattccttaggcttaagagagagagccttaatggatgctcattcatattcctgcctttcttccatcagctctctgcaaagatgattttgcttttccctagtgctggtatactatagagaaacccctggggatcatgtgattaagttcctatcttttgaaagtttgttctgcagagacttctaggaggatgctgtgcctcccaagctcagagcagcctctgtcctggctgtgcacattctcccttgattccacttgtgtggagggattgaacacaggcaaagaggtgctgctttgcttcttcaatggcaccttcattctccgttgtcattgacttcaagatgcctcttctacctcttccaggaagcacaggccaggggatctgggtgtgtgagtgggaggagagggcagagtcccctgaggtcatgctttgtattcttcatagaaagagagcccagcctgccctcacgctctccatcataggctgacacccagaagactcgtcttggcaccatctcacacagctggggctgtagcacccctttccaacccttttgctg

SEQ ID NO: 20397 - DNA, 934 bp, Homo Sapiens
gcacgagggtcaaagccaacaagttagaccacgtggtgaccatcatcaaggggaaggtggaggaggtggagctcccagtggagaaggtggacatcatcatcagcgagtggatgggctactgcctcttctacgagtccatgctcaacaccgtgctctatgcccgggacaagtggctggcgcccgatggcctcatcttcccagaccgggccacgctgtatgtgacggccatcgaggaccggcagtacaaagactacaagatccactggtgggagaacgtgtatggcttcgacatgtcttgcatcaaagatgtggccattaaggagcccctagtggatgtcgtggaccccaaacagctgggcaccaacgcctgcctcataaaggaggtggacatctataccgtcaaggtggaagacctgaccttcacctccccgttctgcctgcaagtgaagcggaatgactacgtgcacgccctggtggcctacttcaacatcgagttcacacgctgccacaagaggaccggcttctccaccagccccgagtccccgtacacgcactggaagcagacggtgttctacatggaggactacctgaccgtgaagacgggcgaggagatcttcggcaccatcggcatgcggcccaacgccaagaacaaccgggacctggacttcaccatcgacctggacttcaagggccagctgtgcgagctgtcctgctccaccgactaccggatgcgctgaggcccggctctcccgccctgcacgagcccaggggctgagcgttcctaggcggtttcggggctcccccttcctctccctccctcccgcagagggggttttaggggcctgggctggggggatggggaggccatcgtgactggtgttttcctactattgtttttatatgggtgcatttacccaattaatcctccagctgg

SEQ ID NO: 20398 - DNA, 883 bp, Homo Sapiens
gcacgaggatttatttcctgtggaactgaatccctcctccctccactccttgggagcccaggtggtccttggccaccattcaggctttccaagaagccaaccaccttggagattttttttcttgaatttcgctgttttcttctgctttctttagataaaaagcagctcaagagaccttatcttagggatgagaaaaacatgcatattaattccatctgagtgattgtcagtgtaaggccttttaaaacaaaagcaagttctttgttaggaattggtcaaaattcatctctttctttaagcccatcaactcccaggacggtttgagttactcagttacctaagcttgctattcatccaaatcattttctagagtcactgtataagggtctatgagtagctgtgtatgaataaatattacctgtctacctcaaaatacacatactgctgaagcattctgtacaaccgtgtgttatcacagtgcagttttaagtgtaacgttagaacttaggcattttcctgtgtggcggaataagaaaggattaaacagttacaagcctccaaattcaaataaaattaaatcacagttcagatgaaactgaatatcattgtaataatctcataatatacatttgtaactttgtagctatctttgaaatcacttgactttgcaatggtgctaagctgatagatttaaatacacagacgggcgagtggcgcccgtgtcgatgtcttcagccagtggtgaccctgcttttgtaaccgcgttaacctgacaaacctcagcagcagaagtctctatttttctaggagttcatcgtgcagacagtcttcactacaggactcggcctggggcctctgcctctcgtctgaccttgcagcctta

SEQ ID NO: 20399 - DNA, 1178 bp, Homo Sapiens
  misc_feature (148)..(166): n is a, c, g, or t
  misc_feature (894)..(905): n is a, c, g, or t
gcacgagggtttgagtagcagcagtgctataggtgggaaatacagtttagctgctgaatttctatacctctctgatttacagattgctaattaaatggctattattagtttggattaattagacttaagaaaacaactaactgagggnnnnnnnnnnnnnnnnnnngagggttttctttgcatgagaattgtatgtaaccagtgatatgattattcctgaatgtacagacagaagtaagcctggacattgttaaatagtccctgctttaagggactacgataatgtgtactatgacaaacgtgctttattcttctaacgcagtaagaattaggtggaattttttccttcaaccaagtgcaggaaagccctgtgtgtcttggtttagttatggtttcatttctagccatacaattgatgaattgtgtacaacttttgttagtaccaaaataatctgttatatgaacagacttctaaaataacgtctgtatattttatatatagatacatatatgaaagaaggcttttattgaacagcttatcttccacttgcaggtttatggaaacagcagtatttgaaaataaataaaaagtgggagaattccttgctgttagaagaatgtggccattattttgattttttgaatgagatatataatcaaagtactgctgaactgtgagtgcagtattctaaacatttcagctaggaataccactgatttagaaacaaaactgtttgtctctggtttctgaatttaaaatgttgggattacctgtttaaatctgtcttgggggatgtagagattaagtctgtacatgtgcgtgcacatatattcatgcaccctctgattttggttttcttgtttctgagttcttagaaagtacccacatactcnnnnnnnnnnnngtagaagtagctgtcatagagtgaagaaaaggataagactttaaacagttgattctttttgtgttttctacaaactattttttgaaatttaaatcacaaactcattttctggtttttagaaagtagatgatgatttcagaggagtaaggcatgccaagcagcatgctcagtggggttttaggctgtcacatgcagctgagaaaaggtatgttcaagtcataagtaggtaactttcagttgaagattaaagcaagatgccattttccccgacag

SEQ ID NO: 20400 - DNA, 1332 bp, Homo Sapiens
gcacgaggcctttccaagggagggttgtgtgatcgccatcttagggaaaagatgttctcgtccgtggcgcacctggcgcgggcgaaccccttcaacacgccacatctgcagctggtgcacgatggtctcggggacctccgcagcagctccccagggcccacgggccagccccgccgccctcgcaacctggcagccgccgccgtggaagagtacagttgtgaatttggctccgcgaagtattatgcactgtgtggctttggtggggtcttaagttgtggtctgacacacactgctgtggttcccctggatttagtgaaatgccgtatgcaggtggacccccaaaagtacaagggcatatttaacggattctcagttacacttaaagaggatggtgttcgtggtttggctaaaggatgggctccgactttccttggctactccatgcagggactctgcaagtttggcttttatgaagtctttaaagtcttgtatagcaatatgcttggagaggagaatacttatctctggcgcacatcactatatttggctgcctctgccagtgctgaattctttgctgacattgccctggctcctatggaagctgctaaggttcgaattcaaacccagccaggttatgccaacactttgagggatgcagctcccaaaatgtataaggaagaaggcctaaaagcattctacaagggggttgctcctctctggatgagacagataccatacaccatgatgaagttcgcctgctttgaacgtactgttgaagcactgtacaagtttgtggttcctaagccccgcagtgaatgttcaaagccagagcagctggttgtaacatttgtagcaggttacatagctggagtcttttgtgcaattgtttctcaccctgctgattctgtggtatctgtgttgaataaagaaaaaggtagcagtgcttctctggtcctcaagagacttggatttaaaggtgtatggaagggactgtttgcccgtatcatcatgattggtaccctgactgcactacagtggtttatctatgactccgtgaaggtctacttcagacttcctcgccctcctccacccgagatgccagagtctctgaagaagaagcttgggttaactcagtagttagatcaaagcaaatgtggactgaatctgcttgttgatcagtgttgaagaaagtgcaaaaggaacttttatatatttgacagtgtaggaaattgtctattcctgatataattactgtagtactcttgcttaaggcaagagtttcagatttactgttgaaataaacccaactcttcatgaaaaaaaacctcgtgc

SEQ ID NO: 20401 - DNA, 452 bp, Homo Sapiens
  misc_feature (23)..(31): n is a, c, g, or t
tgacagagtgagactctgtctcnnnnnnnnnttaaataaattattataacctttcagaaatgctgtgtgcattttcatgttcttttttttagcattactgtcactctccctaatgaaatgtacttcagagaagcagtattttgttaaataaatacataacctcattctgaataatgtccctcattttgactataactgtgcttggtttcaaaagcaaaattaaacaaaaatctcagtcccctccgaagtgaactttgtgttaccctgcgtcagaaatgccaagttgtgtttacttttcattcagattttgtgaatatgaacatgctgttataggatctacagatgaatatttaactcaatagaaaaattattttagaacacattgtattggtattacaaccagattatattcttgacgttgacttcattaaaattatctacaatttcctaat

SEQ ID NO: 20402 - DNA, 904 bp, Homo Sapiens
gcacgaggagaagaaataggttctttatcaaaaactgaaactattctgccaccagaatctgagaatccaaaggaaaatgataatgattcaggcactggttccactgctgatactagcagtattgacttgaatttatccatctctagctttctaagtaaaactaaagacagtggatcgatatctttacaagaaacaagaagacaaaagaaaacattgaagaaaacacgcaaatttattgttgatggtgtagaagtgagtgtaacaacatcaaagatagttacagatagtgattccaaaactgaagaattgcggtttcttagacgtcaggaacttcgggaattaagatttcttcagaaagaagagcaaagagcccaacaacagctcaatagcaaactacagcaacaacgagaacaaattttccggcgctttgagcaggaaatgatgagtaaaaagcgacaatatgaccaggaaattgagaatctagaaaaacagcagaaacagactatcgaacgcctggaacaagagcacacaaatcgcttgcgagatgaagccaaacgcatcaaaggagaacaagagaaagagttgtccaaatttcagaatatgctgaagaaccgaaagaaggaggttataaatgaagtggagaaagcacccaaagagctgagaaaagagctcatgaaacgcaggaaagaggagcttgcacaaagccagcatgctcaggaacaagagtttgttcagaaacaacagcaagaattagatggctctctgaaaaagatcatcccagcagcagaaggcagagttagctaatattgagagagagtgcctgaataacagcaacagctcatgagagctcgagaagctgcaatttgggagctcgaaaacgacacttacaagaaaacaccagctg

SEQ ID NO: 20403 - DNA, 699 bp, Homo Sapiens
gcacgaggaaaacaatacttcctggggttttggtgtgcagagggctttgttggaagtgtgactcaatcttgcctgccttctgggagctctagaattgttcccaacccagtccatggcttctagccaccactacagggctgtttcatgtacttctctctctgactctgtcttgtccgactctcttgagaatttctcaacgattgctcatgcctgtcagtatcagtgcttccatcgttccatctttgattcacttctctttcctttctatttactcccaaaatggagtcattcatcctgatgtcctcaattgctgctgatatgctggtgattcccaaatacatagctccaacccccaacttcccccagactttagatctgtattggtattacctactggacatctctatggacagttccgtatagactcaactcatctgcccaaccaagtatgttcctcctgaattcctctcctggttacttcatcacaatctacataggctcaccagctagaaacatttatgagcttacattccttcttcccatatcttatcagcatatcatatccatttcactccaacactctgtcttgaatttggccctccctctcccctctctactttaattcattggagcatgggatttggagttaggtggttttgggtttgaattccagctctactatttttggttgtgtgatag

SEQ ID NO: 20404 - DNA, 879 bp, Homo Sapiens
gcacgaggctgggcctggggctgctgcctgcccactcctggcactgcctctgtgccctggaccgctgctcacgcatggcacccctgctcagccgctcctatttggccgtctgggctctgtcgagcctgcttgtcttcctgctcatggtggctgtgtacacccgcattttcttctacgtgcggcggcgagtgcagcgcatggcagagcatgtcagctgccacccccgctaccgagagaccacgctcagcctggtcaagactgttgtcatcatcctgggggcgttcgtggtctgctggacaccaggccaggtggtactgctcctggatggtttaggctgtgagtcctgcaatgtcctggctgtagaaaagtacttcctactgttggccgaggccaactcactggtcaatgctgctgtgtactcttgccgagatgctgagatgcgccgcaccttccgccgccttctctgctgcgcgtgcctccgccagtccacccgcgagtctgtccactatacatcctctgcccagggaggtgccagcactcgcatcatgcttcccgagaacggccacccactgatggactccaccctttagctaccttgaacttcagcggtacgcggcaagcaacaaatccacagcccctgatgacttgtgggtgctcctggctcaacccaaccaacaggactgactgactggcaggacaaggtctggcatggcacagcaccactgccaggcctccccaggcacaccactctgcccagggaatgggggctttgggtcatctcccacctgcctgggggagtcagatggggtgcaggaatctgggctcttcagccatctcaggtttagggggtttgtaacaaacattattctgttttcactg

SEQ ID NO: 20405 - DNA, 1590 bp, Homo Sapiens
gcacgagggaaacatctgaggtggttaaaagctctccctcgtgtcacccccttttatgcagtcaaatgtaatgatagcaaagccatcgtgaagacccttgctgctaccgggacaggatttgactgtgctagcaagactgaaatacagttggtgcagagtctgggggtgcctccagagaggattatctatgcaaatccttgtaaacaagtatctcaaattaagtatgctgctaataatggagtccagatgatgacttttgatagtgaagttgagttgatgaaagttgccagagcacatcccaaagcaaagttggttttgcggattgccactgatgattccaaagcagtctgtcgtctcagtgtgaaattcggtgccacgctcagaaccagcaggctccttttggaacgggcgaaagagctaaatatcgatgttgttggtgtcagcttccatgtaggaagcggctgtaccgatcctgagaccttcgtgcaggcaatctctgatgcccgctgtgtttttgacatgggggctgaggttggtttcagcatgtatctgcttgatattggcggtggctttcctggatctgaggatgtgaaacttaaatttgaagagatcaccggcgtaatcaacccagcgttggacaaatactttccgtcagactctggagtgagaatcatagctgagcccggcagatactatgttgcatcagctttcacgcttgcagttaatatcattgccaagaaaattgtattaaaggaacagacgggctctgatgacgaagatgagtcgagtgagcagacctttatgtattatgtgaatgatggcgtctatggatcatttaattgcatactctatgaccacgcacatgtaaagccccttctgcaaaagagacctaaaccagatgagaagtattattcatccagcatatggggaccaacatgtgatggcctcgatcggattgttgagcgctgtgacctgcctgaaatgcatgtgggtgattggatgctctttgaaaacatgggcgcttacactgttgctgctgcctctacgttcaatggcttccagaggccgacgatctactatgtgatgtcagggcctgcgtggcaactcatgcagcaattccagaaccccgacttcccacccgaagtagaggaacaggatgccagcaccctgcctgtgtcttgtgcctgggagagtgggatgaaacgccacagagcagcctgtgcttcggctagtattaatgtgtagatagcactctggtagctgttaactgcaagtttagcttgaattaagggatttggggggaccatgtaacttaattactgctagttttgaaatgtctttgtaagagtagggtcgccatgatgcagccatatggaagactaggatatgggtcacacttatctgtgttcctatggaaactatttgaatatttgttttatatggatttttattcactcttcagacacgctactcaagagtgcccctcagctgctgaacaagcatttgtagcttgtacaatggcagaatgggccaaaagcttagtgttgtgacctgtttttaaaataaagtatcttgaaataaacctcgtgc

SEQ ID NO: 20406 - DNA, 703 bp, Homo Sapiens
  misc_feature (631)..(644): n is a, c, g, or t
aaaaatatagtgctttaccatttacaaatctttcacatacattctcatttgaccctcacaacaaccctgggagggaggcatcacggacattctactcattaaacagatgaaaacagtaaatctcagagtagttcactgataatgcccaaggctctacagttagtgagtgatttgtattaatatcagtctttggcctaaaaattcagcacccctcttccccttatacttgtcccacctacttcacagggataatgaagataaaatgaattcaaggctagaaaaatactttgagggagaaaagcactatataattatacctacaaactatgattttccccaatatatggctcattcctcttctcatctcagcttgtgtgtgaacccagagttgtatattgcctctgtcctgtgctcagtaagcaaataaggcaggcagggggtacagtgtgatcctgtttaaagttacataaattacaatcagggtaactgctattattaggcaaattgaaaaacagcacagaaaggccagtgtgcaactaggacccactaaagctcagaggaaagcaatgcaagattatcagacaggcatgattgcatagaaggaaaatgtggtgtcagagttcaaactggnnnnnnnnnnnnnngttatctaaggcaaagtggtggcaaagaagttatttgttccatgtcaccggacgcgtgg

SEQ ID NO: 20407 - DNA, 931 bp, Homo Sapiens
gataataaaaatttaatagcaatatcataaaataaacacacatattaaaaaatcaagtatttagtttcggatattagaaataatatacataataaattcaacatactgatagtgctgcaagataagattttatttttcaaattacatattatgccaaccagcctgctttggactcagaggttcaaaaactttgcttttattacgaagaacatctggactgtagacacctctaacgaaaccaggttatacttggcatattgtgattgaagctgtgtgatcaacatcttaatgacctaactaaatcctctcataacagaaagaagttcaacaggcaaacatttccctccctaggatcctagttaccaaaactgtcacagtgtcaaaataaaaataattatttcctcctttttaacatcttattgtccttgaagcttatgtatggaggaagttaaaaaccaaaagagcaactttaagctatatgctaagtcagtgttaaatccacagactaatttttcgatatagtattcctggttctggtccttaaagagaaataaaggcattaaaccaactttttatatgtcaagaaatataattttgctattctttcataatcaaatctttcaatgatttctaagactgtttctacagcctgtgtgctagttcaggagacacactgattgtaaaaggacttgagaatataaactttaaggctaaaaatttcatcttcaaaatgtatagatgtaaacagagcccttgacaaggtgatttaatgtagaactgctggccagaatgaaaacaagtactagacagaaaaaagatcatgcttaaagactccattgaaaaaccacagacaggtccttcatgacatggtaatttccttcaacctaaagacatttgctgaaactcaaagttaaccctattgcatagtaaa

SEQ ID NO: 20408 - DNA, 903 bp, Homo Sapiens
gcacgaggccccagcctatgcagggatgaggtgatcacatgggtggacaccatcgtgaaagatgaccaggaggctgtgctatgtttctacaaaaccgccaaggactgcgtcatgatgttcacctatgtggagctccccagtgggaagtccaacctgaccgtcctcagggagccagagtgtggaaacacccccaacgccatgaccatcctcctggctgtggtcggtagcatcctccttgttgggcttgcactcctggctatctggaagctgcttgtcaccatccacgaccggagggagtttgcaaagtttcagagcgagcgatccagggcccgctatgaaatggcttcaaatccattatacagaaagcctatctccacgcacactgtggacttcaccttcaacaagttcaacaaatcctacaatggcactgtggactgatgtttccttctccgaggggctggagcggggatctgatgaaaaggtcagactgaaacgccttgcacggctgctcggcttgatcacagctccctaggtaggcaccacagagaagaccttctagtgagcctgggccaggagcccacagtgcctgtacaggaaggtgcctggccatgtcacctggctgctaggccagagccatgccaggctgcgtccctccgagcttgggataaagcaaggggaccttggcgctctcagctttccctgccacatccagcttgttgtcccaatgaaatactgagatgctgggctgtctctcccttccaggaatgctgggcccccagcctggccagacaagaagactgtcaggaagggtcggagtctgtaaaaccagcatacagtttggcttttttcacattgatcatttttatatgaaataaaaagatcctgcatttatggtgtaaaaaa

SEQ ID NO: 20409 - DNA, 1079 bp, Homo Sapiens
cacccacgcgtccgaacaatcctagactgagacgcagtcaggcgcacgcccgcaagaggcggcgaggtgacaagtttggagtgcgcccccttcagtactgcgcgttctaagacttttggcggagactttcttggcaaaacccattccccaaagctacgcttcccctgctgagatagcccctacccccacctccacaggctgggacagccccgtccccaccatcctcctcccaagccaattaaatgatcacagcacgcgtgacagttaccggctggagagccggaggtgggaccgggagcaggggaccgtagaaccgggccgcgctcctcccctcctagagttcgtggaggcgcagcagagggccgtccctcttccggatgtcggactaagcgaacagcgcccccactgccggccggtagcagccggaagtgccagaccggaggtgcgtcattcaccggcgacgccgatacggttcctccaccgaggcccatgcgaagctttccactatggcttccagcactgtcccggtgagcgctgctggctcggctaatgaaactcccgaaataccggacaacgtgggagattggcttcggggcgtctaccgctttgccactgataggaatgacttccggaggaacttgatactaaatttgggactctttgctgcgggagtttggctggccaggaacttgagtgacattgacctcatggcacctcagccaggggtgtagccaagtagacaaatggaatcctgtgctgaacccgaatcttccaaaaaacagcctacaatctgtgaccaccacaagatgtgccctgatggcagctgaagtttgattcagatgggcacttttcttccccttccctgcctagtttccttttgttccttgagtccacgcagaattccattctctggtcagcagacaggcttaagctaaagtattgcctctattctgtaaagttctgtacatagttcccaagcttctgcagggggtgatttttgctcttgtcctgagaaataacagtgctgttttaaaaaacatttgaaataaatcctcgtgccgaattcctgcagcccgggg

SEQ ID NO: 20410 - DNA, 555 bp, Homo Sapiens
gcacgaggggagctttacgacttcccgtcctgcgggaagtggcgggcacgatcgcaaggtagcgcagaagcttctcaatggccagcgccagctgcagccccggcggcgcactcgcctcacctgagcctgggaggaaaattcttccaaggatgatctcccactcagagctgaggaagcttttctactcagcagatgctgtgtgttttgatgttgacagcacggtcatcagtgaagaaggaatcggatgctttcattggatttggaggaaatgtgatcaggcaacaagtcaaggataacgccaaatggatgcttgctctttgaactcagccatcatgctgtgaggaagcccagatcacaaggagaggccacattttgatgttccagtcaacagtcccagcacaggtttcagatgacagccaacatcagttgccagacatgagactgaagaaggctttgtgaagactccagccccagccactacaacagcatgagagaccccaagtgaaaatcacctgcctgaacccatcaactcccagaaccatgaaaataaaaaac

SEQ ID NO: 20411 - DNA, 1504 bp, Homo Sapiens
gcacgaggggatcttattgtctacgatgtgacgatccgtggagaaagtagcagatgggcagattttcatttggggagaatgagggagaaaagaacgggcattccgagccaagagcactgcatgagcaaggagttgggaggttttcgtaacaccccagggcctgtaaggtttggtgtttccctttcaagatgccactttcagactttattctggctctgaaggacaatccctactttggggctggatttgggctggtgggtgtgggcacagccctggccctggcccggaagggtgtccaactgggcctggtggcattccggcgccattacatgatcacactggaagtccctgctcgagacaggagctatgcctggttgcttagctggctcacccgccacagtacccgtactcagcacctcagtgtcgagacttcgtaccttcagcatgagagtggccgcatttccactaagtttgaatttgtccccagccctggaaaccattttatctggtatcgggggaaatggattcgggtagaacgaagtcgagagatgcagatgatagacttgcagacggggactccttgggaatctgtcaccttcacggccctgggcactgaccgaaaggttttcttcaacatcctggaggaagctcgagagctagccttgcagcaggaggaagggaagaccgtgatgtacacagctgtgggctctgaatggcgtccctttggctatccacgccgccggcgaccactgaattctgtggttctacaacagggtctggctgaccgaattgtcagagacgtccaggaattcatcgataaccccaagtggtacactgacagaggcattccttacagacgtggctacctgctttatgggccccctggttgcggaaagagcagttttatcacagccctggctggggaactggagcacagcatctgcctgctgagcctcacggactccagcctctctgatgaccgactcaaccacctgctgagcgtggccccgcagcagagcctggtactcctggaggatgtggatgctgcttttctcagtcgagacttggctgtggagaacccagtaaagtaccaaggcctaggtcgcctcaccttcagtggactgctcaatgccttggatggtgtggcttccaccgaggcccgcatcgtgttcatgaccaccaaccacgttgacaggctggaccctgccctgatacgcccggggcgagtggacctgaaggagtacgtgggctactgctcacactggcagctgacccagatgttccagaggttctatccagggcaggcaccttccttagctgagaactttgcagaacatgtccttcgagctacaaaccagatcagtcctgcccaggtgcagggctacttcatgctgtataaaaatgaccctgtaggggcaattcacaatgctgagtctctgaggaggtgatcaggctgggctcagctcagctctcctcctctagctcaataaacatctgccacact

SEQ ID NO: 20412 - DNA, 1927 bp, Homo Sapiens
gcacgagggctgaccgggactgctgctctcacggtccagtctcaggaggacaatctgcgcagcctggttttggatacaaaggaccttacaatagaaaaagtagtgatcaatggacaagaagtcaaatatgctcttggagaaagacaaagttacaagggatcgccaatggaaatctctcttcctatcgctttgagcaaaaatcaagaaattgttatagaaatttcttttgagacctctccaaaatcttctgctctccagtggctcactcctgaacagacttctgggaaggaacacccatatctctttagtcagtgccaggccatccactgcagagcaatccttccttgtcaggacactccttctgtgaaattaacctatactgcagaggtgtctgtccctaaagaactggtggcacttatgagtgctattcgtgatggagaaacacctgacccagaagacccaagcaggaaaatatacaaattcatccaaaaagttccaataccctgctacctgattgctttagttgttggagctttagaaagcaggcaaattggcccaagaactttggtgtggtctgagaaagagcaggtggaaaagtctgcttatgagttttctgagactgaatctatgcttaaaatagcagaagatctgggaggaccgtatgtatggggacagtatgacctattggtcctgccaccatccttcccttatggtggcatggagaatccttgccttacttttgtaactcctactctactggcaggcgacaagtcactctccaatgtcattgcacatgaaatatctcatagctggacagggaatctagtgaccaacaaaacttgggatcacttttggttaaatgagggacatactgtgtacttggaacgccacatttgcggacgattgtttggtgaaaagttcagacattttaatgctctgggaggatggggagaactacagaattcggtaaagacatttggggagacacatcctttcaccaaacttgtggttgatctgacagatatagaccctgatgtagcttattcttcagttccctatgagaagggctttgctttacttttttaccttgaacaactgcttggaggaccagagattttcctaggattcttaaaagcttatgttgagaagttttcctataagagcataactactgatgactggaaggatttcctgtattcctattttaaagataaggttgatgttctcaatcaagttgattggaatgcctggctctactctcctggactgcctcccataaagcccaattatgatatgactctgacaaatgcttgtattgccttaagtcaaagatggattactgccaaagaagatgatttaaattcattcaatgccacagacctgaaggatctctcttctcatcaattgaatgagtttttagcacagacgctccagagggcacctcttccattggggcacataaagcgaatgcaagaggtgtacaacttcaatgccattaacaattctgaaatacgattcagatggctgcggctctgcattcaatccaagtgggaggacgcaattcctttggcgctaaagatggcaactgaacaaggaagaatgaagtttacccggcccttattcaaggatcttgctgcctttgacaaatcccatgatcaagctgtccgaacctaccaagagcacaaagcaagcatgcatcccgtgactgcaatgctggtggggaaagacttaaaagtggattaaagacctgcgtattgatgattttagagatttctcttttttaaatggaattcgtaaagaaatataaaacttcagctcacaattaaaactgtccttttagttttggctttttattgttttgttggtgattttactgaaataaagttgagctacttcttcttatagtggcatattctttgtaaatttt

SEQ ID NO: 20413 - DNA, 1180 bp, Homo Sapiens
gcacgagggcacggagaagccctggggtcagtgtcgtgcacggatggcggcagtgttgaacccaggaggctgaacccggcccaccacggaagatgagtgcatggcaaccgcctgccttcacgtcgctccacttggtaaccccaaggtctgggctgttctaggtattgcttcacgtgccccagcaagcccttaacaagagggcctggttccctgaagaaccaatcccaggaaggggccttgatccctccgccttgctgagagtgaaccctcgtctctcctcaccctccatttcatttctgggaattggggcttagtttcgaacctttggcaaggctgttcttactaatgcccaagcccctttacccctctccctataggttacacaggggagaccagggcctcggcagaagactgctgccacacttccgaatcattctgcttgccaaataggtcatcttcaccagttgactgacccaagtttaggaccattggtatcgtgtgtttaaaaaacacatataaaaaaactcttgtgaatattcttgttatgctagagaggaaggtacttctccctctacggctctgcgctggggcctatggtagtaaagttgtttactgtcctttttctgcttcccctggaaatgacaggcattactctcccattggcctcccttccctttatagaaagaccaagcaggccccactggccaagaggtacggtatttggcagtctgagttctcagtaatttggaaagttaaggagttggttcctgtgtcacctttcagttagtgtgggaaaggaagacttctgttttcctgagatcagtgcagtctcaggcctttggcagggctcatggatcagagctgagactggagggagaggcatttcgggtagcctaggagggcgactggcggcagcagaaccgaggaaggcaaggttgtttccctcaggctgtgtcctgtgttcaggtgcgacacacaatcctcatgggaacaggatcacccatgcgctgcccttgatgatcaaggttggggcttaagtggataagggaggcaagttctgggtttccttgccttttcagagcatgaggtcaggctctgtatccctctttttcctagctgatattctaactagaagcatttgtcaattcctttgcttcccaactgacacacacgttcattt

SEQ ID NO: 20414 - DNA, 880 bp, Homo Sapiens
ttcggcacgaggctctcctcttgcacatacccgcctgtggatgctgcgcctctccgaacgcaacatgaaggtgctccttgccgccgccctcatcgcggggtccgtcttcttcctgctgctgccgggaccttctgcggccgatgagaagaagaaggggcccaaagtcaccgtcaaggtgtattttgacctacgaattggagatgaagatgtaggccgggtgatctttggtctcttcggaaagactgttccaaaaacagtggataattttgtggccttagctacaggagagaaaggatttggctacaaaaacagcaaattccatcgtgtaatcaaggacttcatgatccagggcggagacttcaccaggggagatggcacaggaggaaagagcatctacggtgagcgcttccccgatgagaacttcaaactgaagcactacgggcctggctgggtgagcatggccaacgcaggcaaagacaccaacggctcccagttcttcatcacgacagtcaagacagcctggctagatggcaagcatgtggtgtttggcaaagttctagagggcatggaggtggtgcggaaggtggagagcaccaagacagacagccgggataaacccctgaaggatgtgatcatcgcagactgcggcaagatcgaggtggagaagccctttgccatcgccaaggagtagggcacagggacatctttctttgagtgaccgtctgtgcaggccctgtagtccgccacagggctctgagctgcactggccccggtgctggcatctggtggagcggacccactcccctcacattccacaggcccatggactcacttttgtaacaaactcctaccaacactgaccaataaaaaaaaatgtggg

SEQ ID NO: 20415 - DNA, 907 bp, Homo Sapiens
gcacgaggtggaaagccgcatgagaattgagagcctttcatcccagctttctaatctacagaaagagtctagagcatgtttggaaaggattcaagaattagaggacttgcttgctaaagaaaaagacaactctcgtcgcatgctgacagacaaagagagagagatggcggaaataagggatcaaatgcagcaacagctgaatgactatgaacagcttcttgatgtaaagttagccctggacatggaaatcagtgcttacaggaaactcttagaaggcgaagaagagaggttgaagctgtctccaagcccttcttcccgtgtgacagtatcccgagcatcctcaagtcgtagtgtacgtacaactagaggaaagcggaagagggttgatgtggaagaatcagaggcgagtagtagtgttagcatctctcattccgcctcagccactggaaatgtttgcatcgaagaaattgatgttgatgggaaatttatccgcttgaagaacacttctgaacaggatcaaccaatgggaggctgggagatgatcagaaaaattggagacacatcagtcagttataaatatacctcaagatatgtgctgaaggcaggccagactgttacaatttgggctgcaaacgctggtgtcacagccagccccccaactgacctcatctggaagaaccagaactcgtggggcactggcgaagatgtgaaggttatattgaaaaattctcagggagaggaggttgctcaaagaagtacagtctttaaaacaaccatacctgaagaagaggaggaggaggaagaagcagctggagtggttgttgaggaagaacttttccaccagcagggaaccccaagagcatccaatagaagctgtgcattatgtaaaattttcaactgtcttctc

SEQ ID NO: 20416 - DNA, 1527 bp, Homo Sapiens
gcaccaggggacaagaagctctctctcagacaaccatctcatggggcccattccaggacacttctgagtacatcatttcatgtcatcctgttggcactgatgaagaacccttacagttcagggttcctggaacttctaccagtgccactctgacaggcctcaccagaggtgccacctacaacatcatagtggaggcactgaaagaccagcagaggcataaggttcgggaagaggttgttaccgtgggcaactctgtcaacgaaggcttgaaccaacctacggatgactcgtgctttgacccctacacagtttcccattatgccgttggagatgagtgggaacgaatgtctgaatcaggctttaaactgttgtgccagtgcttaggctttggaagtggtcatttcagatgtgattcatctagatggtgccatgacaatggtgtgaactacaagattggagagaagtgggaccgtcagggagaaaatggccagatgatgagctgcacatgtcttgggaacggaaaaggagaattcaagtgtgaccctcatgaggcaacgtgttatgatgatgggaagacataccacgtaggagaacagtggcagaaggaatatctcggtgccatttgctcctgcacatgctttggaggccagcggggctggcgctgtgacaactgccgcagacctgggggtgaacccagtcccgaaggcactactggccagtcctacaaccagtattctcagagataccatcagagaacaaacactaatgttaattgcccaattgagtgcttcatgcctttagatgtacaggctgacagagaagattcccgagagtaaatcatctttccaatccagaggaacaagcatgtctctctgccaagatccatctaaactggagtgatgttagcagacccagcttagagttcttctttctttcttaagccctttgctctggaggaagttctccagcttcagctcaactcacagcttctccaagcatcaccctgggagtttcctgagggttttctcataaatgagggctgcacattgcctgttctgcttcgaagtattcaataccgctcagtattttaaatgaagtgattctaagatttggtttgggatcaataggaaagcatatgcagccaaccaagatgcaaatgttttgaaatgatatgaccaaaattttaagtaggaaagtcacccaaacacttctgctttcacttaagtgtctggcccgcaatactgtaggaacaagcatgatcttgttactgtgatattttaaatatccacagtactcactttttccaaatgatcctagtaattgcctagaaatatctttctcttacctgttatttatcaatttttcccagtatttttatacggaaaaaattgtattgaaaacacttagtatgcagttgataagaggaatttggtataattatggtgggtgattattttttatactgtatgtgccaaagctttactactgtggaaagacaactgttttaataaaagatttacattccac

SEQ ID NO: 20417 - DNA, 889 bp, Homo Sapiens
ggctgcaggaattcggcacgaggcaatgacactgaccactactttctgcgctatgctgtgctgccgcgggaggtggtctgcaccgaaaacctcaccccctggaagaagctcttgccctgtagttccaaggcaggcctctctgtgctgctgaaggcagatcgcttgttccacaccagctaccactcccaggcagtgcatatccgccctgtttgcagaaatgcacgctgtactagcatctcctgggagctgaggcagaccctgtcagttgtatttgatgccttcatcacggggcagggaaagaaagactggtccctcttccggatgttctcccgaaccctcacggagccctgccccctggcttcagagagccgagtctatgtggacatcaccacctacaaccaggacaacgagacattagaggtgcacccacccccgaccactacatatcaggacgtcatcctaggcactcggaagacctatgccatctatgacttgcttgacaccgccatgatcaacaactctcgaaacctcaacatccagctcaagtggaagagacccccagagaatgaggcccccccagtgcccttcctgcatgcccagcggtacgtgagtggctatgggctgcagaagggggagctgagcacactgctgtacaacacccacccataccgggccttcccggtgctgctgctggacaccgtaccctggtatctgcggctgtatgtgcacaccctcaccatcacctccaagggcaaggagaacaaaccaagttacatccactaccagcctgcccaggaccggctgcaaccccacctcctggagatgctgattcagctgccggccaactcagtcaccaggtttccatccagtttgagcgggcgctgctgaa

SEQ ID NO: 20418 - DNA, 1074 bp, Homo Sapiens
  misc_feature (377)..(409): n is a, c, g, or t
cctacatgtgactatgtccaagttaagcccccaacacgagaggaaagctgctgactcccagctatagccatgggcacttggccccctgcttttcctgctcagcagagcccctcccttcagagattacgggtacttgcactggggaggtggctgctggctggcccaagcagagagctgaggcatccaagaaatgttccattggggggtgggggtgccaggtgaggtggagcattccttgtattctggcagcactgaagagccactgaagggggtaggggcagtgtaggtcctggggcagcccctttattcctttatgccccttctccctcatagcctatttctaaagtcgccttttctgtcagataaacctcaaaacnnnnnnnnnnnnnnnnnnnnnnnnnnnnnnnnnaagaggtggattgaagaatatttgaattgactttatattatgcataaatatttatattttatctaaataactgcgctgtaacaaactttgtgttagacagttgaaactgttagagttgggggctctgctttttccccctggcaattttcccctggtataagatgtgctagattaatttcattgtgaggtggatgggggagtgaaattgtgaggtggatgggggagtgaaatctccatggttcctgctttgtgttcctctcccagctccatctctttccctagggaccaggcactcatatggcggggtggggtcctagcctcagtttgaagaagtgggggctggagcggggttgggggtggtagggatagggcatgatcaaaggggccatttcttgcttttctttcctcatcttcactgcccccttgagctaggtggattttctcttcatgacaagagtatttggtagggaaagcaggtttaaaaataaaaagacaacccaccccctgcccttttgcttccctcccatcagtctggttgacaggaaagaaaccacaccatctacaccaaccagtttctgtgttccttttacagcaaaagggacttttttatataaccaaatgtggtgtttttagtgactttttgataatgtacagttttttgtgaa

SEQ ID NO: 20419 - DNA, 522 bp, Homo Sapiens
gcacgaggcagaagccagatcagcaaatggaggaacctcggaggtgaccagaaagatctccatcggttgcccaaggctgtaagtagtgatggttttagcgatgaataacgtaattggctatgaagtactgtggcagagctgctgttttctgaaggtgagaagccatttttagctcagagcaacccttaagagaacttttggcagattttgttggcattattgaaatatatatagaaaagttgctgattgcaatggttatgggaatggaatttaatgacatttgtaatttattacactcattggtttttattgattatagtattgtctgactttttattttctactatggttcctttagcagaaaagtaacttttgtgcatatattgaagtggtttttcagctatgaattctttagggtagaaatttatttagcaaatgtgaattcttttgagaaagtatgaagttttgcagaaattgactgtgaaatgtcagagaaaaataaaagtcacttacttgaaacct

SEQ ID NO: 20420 - DNA, 1551 bp, Homo Sapiens
gcacgaggcgccgctgctgctgccgccagcctagagccgcccgccgaagcagagccggcgccggggtcctcatccccaccggtcccgaggggcggctgctgcccgtcgccacgaggcccaggggcccgagtgccgagccctttgctccctcggccgcgcggggacagggctgctgagcagcctccgcctctcccggctgtgggggccccactgagtatgtcggaggagagcgacatggacaaagccatcaaggaaacttccattttagaagaatacagtatcaattggactcagaagctgggagctggaattagtggtccagttagagtctgtgtaaagaaatctactcaagaacggtttgcgctgaaaattcttcttgatcgtccaaaagctagaaatgaggtacgtctgcacatgatgtgtgccacacacccaaacatagttcagattattgaagtgtttgctaacagtgtccagtttccccatgagtccagccctagatagctttggctctgcggcactgtcacttgttaaacattgcgcacagagacctcaagcctgaaaatctgctttttaaggataactctttggatgccccagtgaagttgtgtgactttggatttgccaagattgaccaaggtgacttgatgacacccccagttcaccccttattatgtagcaccccaggtactggaggcgcaaagaaggcatcagaaggagaaatctggcatcatacctacctcaccgacgccctacacttacaacaagagctgtgacttgtggtccctaggggtgattatctatgtgatgctgtgcggataccctcctttttactccaaacaccacagccggactatcccaaaggatatgcgaagaaagatcatgacaggcagttttgagttcccagaggaagagtggagtcagatctcagagatggccaaagatgttgtgaggaagctcctgaaggtcaaaccggaggagagactcaccatcgagggagtgctggaccacccctggctcaattccaccgaggccctggataatgtgctgccttctgctcagctgatgatggacaaggcagtggttgcaggaatccagcaggctcacgcggaacagttggccaacatgagaatccaggatctgaaagtcagcctcaaacccctgcactcagtgaacaaccccattctgcggaagaggaagttacttggcaccaagccaaaggacagtgtctatatccacgaccatgagaatggagccgaggattccaatgttgccttggaaaaactccgagatgtgattgctcagtgtattctcccccaggctggtaaaggagagaatgaagatgagaaactgaatgaagtaatgcaggaggcttggaagtataaccgggaatgcaaactcctaagagatactctgcagagcttcagctggaatggttcgtggattcacagataaagtagatcgactaaaactggcagaattgtgaagcaggtgatagagagcaaaccacgtcccacgattccaatatgacagcttcgactttgttttttt

SEQ ID NO: 20421 - DNA, 1008 bp, Homo Sapiens
  misc_feature (570)..(621): n is a, c, g, or t
tggacctggagtgcagtgtgcccatcagtaaactctgcaaacaaattgcacaggtggattttctttccacatttgcctgatttgttctcagcaatccagctggagtgtcttatcaatccagatgaactgagggacatctgttggtctatgtataacttttaaaattggtatagtatctacagagtgtataatttaaactaaccacaaagctttacatcttcattttgactgttccatagcagaataaagcacttgaaaggaaacaagactccctttcacacatggattattataagtttcaatcctggtatctgtgcttgatttttatcagttttgtgtagatttttatgtttcatattttaaatttaaatcccacattgtaaagtttgtacaatttgtcctgaagctttgtgtttggctgcacctgcataagctgctacaaatagaataaagaatttcatagcctgtatctatcatttagatgcatggaaaaaaatgggctttgcacacaatgggtttggagctgactgggaacaatggaaaaaattacattagctgtggttgtaaagnnnnnnnnnnnnnnnnnnnnnnnnnnnnnnnnnnnnnnnnnnnnnnnnnnnnaccatcttgtgaaaggtttctgaaactcgataataaaaagcggttggtgtaaattattcttttgtgtcacatttttagaaggaaaaacataaaagaatgtatccttagtactggttcttaaacagcccataaaaacccattggcctgaagcttatatctcaggcctatgctcatcttatagtcttggaagacaaaaggctggtagagacagtcttcagtggcttcagtgatgctctgtagaggccagggtgtcttgagtgctgtaactcccaagcactgggctagcctgacttctgtatctccctaccccacccccttaaaaaaataaggtaacagcaaatctatagtaaaccatgtctgcatagaacgtgttcaaatctcctgttt

SEQ ID NO: 20422 - DNA, 1296 bp, Homo Sapiens
cccgggctgcaggaattcggcacgaggagactattctaggctaagtctgcccacatgtaattaccggctaattcaagcgaggaaaaatgtaagtcatttagaccaaagccaagcagtttctttgcgtgggttactcaagggcttgtggttacttgtatctcctctatgtgaacttgactttgaaagacagagctctagtgtgccagcctgctaagtcctgtaagaatagggaagggcggaggggggtgggcagtgactaggggacgagaagcatggggaaaatatttgcactctaaacatacagagatagaggtggggcttgtggtacttaacacttgtagccatcaactgactgagaccttgggctaaataatcaattgtgctgatattacatctcgttatggaatgttcctaaatatgccaggtagacaccagcccaagtaccctcctccagaagtctgtgactaccttgtcactactttaggcccattccacaaagcccatctctggtttgagaattcattttgatctgtatctacaccacccaaagttaggcctcctataatgtccaaaacattcctttcagcctttttatttcttactgtactgtctcttactgtactgtctatctgcagtaattgaggacccataaaatttagataactacatgtctttgctcttagaattgtcactcagcataatgagcatttaacatacaaaggcaatgtactgttttgtgttgatctatgtaaaagaatacaattcttttttacataattagtgaaattttattttttattaggaaacactaaatagtgtaatatttcttttgcttttaaaaaaattcctggtagcaaatcaagataaataattgcttcattttcttgagcaatactgaagcaggatgaagtaagaggaatgcattcatttaaacatgctttgctttatgaattttgtctcttttttggtctctttttcttatattcaagttacaaatgtacaagtatccttactaagagtgctccttttgtattttacatatatacagtatgaaaatacattggaacactaggaaagtttttaaataacagttctaatttatcagaaaattgtgttttgggattgagttctttgtctcagcccagaatcccacgtcctgggcctggttttctaatgctgtcatctcagttcgatattttactttagaatctggaatctcctacttaatatatgaccatgactttgaaaggcaaaagaggatcaggataaataaaaccaaacttaatcttcatcttt

SEQ ID NO: 20423 - DNA, 463 bp, Homo Sapiens
ccacgcgtccgaggcgacgaacctaccgagcctggtgataactggttgtccaagaaagaatcttacgccaactttaaatttgcccaagcaaccctctaaatccccttgtaaatttccgtgttgttccaaagaggaacagctctttggacactactaaaaaaccttgttcagagagtaaaaaatttaacacccatagtagtgtaaaagcagccaccaattaagaaagcgttcgagctcaacacccactacctaaaaaatcccaaacatataactgaactcctcacacccaattggaccaatctatcaccctatagaagaactaatgttagaataagtaacgtgaaaacattctcctccgcataaccctgcggctcatgatcacactgacttgacaattaacagcccagtatcaaccatccacccgcaacacgtgggtgtttgactgggcgtcagtgaaactcca

SEQ ID NO: 20424 - DNA, 1575 bp, Homo Sapiens
gcacgaggatcaagtgcttggactccatgtgctgtttcccggaaggagaagcagcgtgtgcatctgttggaagaatgctggaacgagttataggaagatgtagtccaacccacatcagcagatcatggagtgcatcggatcctttctataccaacgacaggagcatcttgactctctccacaatggactcatctacttgttaaaggggcagtagtactttgtgggagccagttcacctcctttcctaaaattcagtgtgatcaccctgttaatggccacactagctctgaaattaatttccaaaatctttgtagtagttcatacccactcagagttataatggcaaacaaacagaaagcattagtacaagcccctcccaacacccttaatttgaatctgaacatgttaaaatttgagaataaagagacatttttcatctctttgtctggtttgtcccttgtgcttatgggactcctaatggcatttcagtctgttgctgaggccattatattttaatataaatgtagaaaaaagagagaaatcttagtaaagagtattttttagtattagcttgattattgactcttctatttaaatctgcttctgtaaattatgctgaaagtttgccttgagaactctatttttttattagagttatatttaaagcttttcatgggaaaagttaatgtgaatactgaggaattttggtccctcagtgacctgtgttgttaattcattaatgcattctgagttcacagagcaaattaggagaatcatttccaaccattatttactgcagtatggggagtaaatttataccaattcctctaactgtactgtaacacagcctgtaaagttagccatataaatgcaagggtatatcatatatacaaatcaggaatcaggtccgttcaccgaacttcaaattgatgtttactaatatttttgtgacagagtataaagaccctatagtgggtaaattagatactattagcatattattaatttaatgtctttatcattggatcttttgcatgctttaatctggttaacatatttaaatttgctttttttctctttacctgaaggctctgtgtatagtatttcatgacatcgttgtacagtttaactatatcaataaaaagtttggacagtatttaaatattgcaaatatgtttaattatacaaatcagaatagtatgggtaattaaatgaatacaaaaagaagagcctctttctgcagccgacttagacatgctcttccctttctataagctagattttagaataaagggtttcagttaataatcttattttcaggttatgtcatctaacttatagcaaactaccacaatacagtgagttctgccagtgtcccagtacaaggcatatttcaggtgtggctgtggaatgtaaaaatgctcaacttgtatcaggtaatgttagcaataaattaaatgctaagaatgattaatcgggtacatgttactgtaattaactcattgcacttcaaacctaacttccatcctgaatttatcaagtagttcagtattgtcatttgttttgtttatgaaa

SEQ ID NO: 20425 - DNA, 1346 bp, Homo Sapiens
  misc_feature (291)..(416): n is a, c, g, or t
gcacgaggcaaagatccaccttacaaagtagaagaatctgggtatgctggtttcattttgccaattgaagtttattttaaaaacaagagatatcataatttctaaaacctgctgaaaagtcaggaagaacctaggaaagtccgctttgattatgacttattcctgcatcttgaaggccatccaccagtgaatcacctccgctgtgaaaagctaactttcaacaaccccacagaggactttaggagaaagttgctgaaggcaggaggggaccctaataggagtattcatacnnnnnnnnnnnnnnnnnnnnnnnnnnnnnnnnnnnnnnnnnnnnnnnnnnnnnnnnnnnnnnnnnnnnnnnnnnnnnnnnnnnnnnnnnnnnnnnnnnnnnnnnnnnnnnnnnnnnnnnnnnnnnntagtaccagtttttcaaagcctcacaaattaatgaaggagcacaaggaaaaaccttctaaagactccagagaacataaaagtgccttcaaagaaccttccagggatcacaacaaatcttccaaagaatcctctaagaaacccaaagaaaataaaccactgaaagaagagaaaatagttcctaagatggccttcaaggaacctaaacccatgtcaaaagagccaaaaccagatagtaacttactcaccatcaccagtggacaagataagaaggctcctagtaaaaggccgcccatttcagattctgaagaactctcagccaaaaaaaggaaaaagagtagctcagaggctttatttaaaagtttttctagcgcaccaccactgatactcacttgttctgctgacaaaaaacagataaaagataaatctcatgtcaagatgggaaaggtcaaaattgaaagtgagacatcagagaagaagaaatcaacgttaccgccatttgatgatattgtggatcccaatgattcagatgtggaggagaatatatcctctaaatctgattctgaacaacccagtcctgccagctccagctccagctccagctccagcttcacaccatcccagaccaggcaacaaggtcctttgaggtctataatgaaagatctgcattctgatgacaatgaggaggaatcagatgaagtggaggataacgacaatgactctgaaatggagaggcctgtaaatagaggaggcagccgaagtcgcagagttagcttaagtgatggcagcgatagtgaaagcagttctgcttcttcacccctacatcacgaacctccaccacccttactaaaaaccaacaacaaccagattcttgaagtgaaaagtccaataaagcaaagcaaatcagataagcaaataaaggatggtgaatg

SEQ ID NO: 20426 - DNA, 870 bp, Homo Sapiens
gcacgagggctggacggggccctggagaacgcccagaacctgggctaccagggagccaagtttgcctgggagagtgcagactccggcctagaggtttgccctgaggacatttacggagtccaggaggtccacgtcaacggggccgtggtgttggccttcgagctgtactaccataccacccaggacctgcagctatttcgagaggctggtggctgggacgtggtcagggctgtggccgagttttggtgcagtcgtgttgagtggagccccagggaggaaaagtaccacctgaggggagtcatgtcccccgacgagtaccattcaggggtcaacaactctgtgtacaccaacgtcctggtccagaacagcctgcgctttgctgctgccctggcccaggacctgggtcttcccatccccagccagtggctggcggtggctgacaagatcaaggtaccctttgacgtggagcagaacttccacccggagttcgatgggtatgagcctggagaggtggtgaagcaggcagacgtcgtgctcctgggatacccagtccccttctccctgagtcctgatgttcgcaggaaaaatctggagatttacgaggctgtgacgtccccccagggccccgccatgacctggagcatgtttgctgtgggctggatggagctgaaggacgcagtgcgggcccggggcctcctggacaggagctttgccaacatggctgaacccttcaaggtgtggacggagaatgcagacgggtcagcgctgtgaacttcctgacaggcatggggggcttcctgcaggcggtggtcttcgggtgcacgggggttcagggtcacccgagcgggtgtgacctttgaccctgtgtgt

SEQ ID NO: 20427 - DNA, 747 bp, Homo Sapiens
gcacgagggtttccagtcaatggttataagaacactaggaggaattctagctccaatatattttggggctctgattgataaaacatgtatgaagtggtccaccaacagctgtggagcacaaggagcttgtaggatatataattccgtattttttggaagggtctacttgggcttatctatagctttaagattcccagcacttgttttatatattgttttcatttttgctatgaagaaaaaatttcaaggaaaagataccaaggcatcggacaatgaaagaaaagtaatggatgaagcaaacttagaattcttaaataatggtgaacattttgtaccttctgctggaacagatagtaaaacatgtaatttggacatgcaagacaatgctgctgccaactaacattgcattgattcattaagatgttatttttgaggtgttcctggtctttcactgacaattccaacattctttacttacagtggaccaatggataagtctatgcatctataataaactataaaaaatgggagtacccatggttaggatatagctatgcctttatggttaagattagaatatatgatccataaaaatttaaagtgagaggcatggttagtgtgtgatacaataaaaagtaattgtttggtagttgtaactgctaataaaaccagtgactagaatataagggaggtaaaaaggacagatagattaatagccctaaataaagagaaaagcctgatgccttt

SEQ ID NO: 20428 - DNA, 1643 bp, Homo Sapiens
ccacgcgtccgggtggcggggacgcagcggctccctcccggaaagcgagcgtatctcccgagccgttgccactgacagccgcgggcgctcccatctgagtaagagccagcccgtccgcggcctctccagccccgggttcgcgctctcgactctcctgcctgcccagctgcgcggcggagcggagcgaggcgcggcctgcgagtccccggcagcccccgacccctccctcggcgctgcgtgtaggccgcgccctcaggcccagtccgcggtgccccggcgggtgatgccaaatacagccatgaagaaaaaggtgctgctgatggggaagagcgggtcggggaagaccagcatgaggtcgataatcttcgccaattacattgctcgcgacacccggcgcctgggggccaccattgacgtggaacactcccacgtccgattcctagggaacctggtgctgaacctgtgggactgtggcggtcaggacaccttcatggaaaattacttcaccagccagcgagacaatatcttccgtaacgtggaagttttgatttacgtgtttgacgtggagagccgcgaactggaaaaggacatgcattattaccagtcgtgtctggaggccatcctccagaactctcctgacgccaaaatcttctgcctggtgcacaaaatggatctggttcaggaggatcagcgtgacctgatttttaaagagcgagaggaagacctgaggcgtctgtctcgcccgctggagtgtgcttgttttcgaacgtccatctgggatgagacgctctacaaagcctggtccagcatcgtctaccagctgattcccaacgttcagcagcgggagatgaaccccggaattttgcccaatcattgacgccgatgaagttctgctgttcgaaagagctacattcttggttatttcccactaccagtgcaaagagcagcgcgacgtccaccggtttgagaagatcagcaacatcatcaaacagttcaagctgagctgcagtaaattggccgcttccttccagagcatggaagttaggaattccaacttcgctgctttcatcgacatcttcacctcaaatacgtacgtgatggtggtcatgtcagatccgtcgatcccttctgcggccactctgatcaacattcgcaatgcccggaaacactttgagaagctggagagagtggatggccccaagcacagtctccttatgcgttgaatattgccaaatgctctttctgaaaatgctgaattgccttttttgtttgcatcctttatttttaatattcataatgtcgtgtgcttaaaagtgggctttgaagtgtgtgctgcttactcctttcatctttctccccgcttccccagtctttaaacattggacgctatttactcagctacccagtagagcttgaagctgacctttctgagaagttggtatggtgtaacactaaagtaggtggttcgtgtgtgttctcattacctggttatgatagatatgcacatcaaagcctttaccagtatcttcctgtattccgtatcagattgcaaagacggaatgttactattttatcagcaaggtattaaaatgcatttataaattcttcttggcttcattcatgaataaacgtgttagcaattt

SEQ ID NO: 20429 - DNA, 922 bp, Homo Sapiens
gagagaaactaaaattaaaatttagttttcatcccaagatgtcttttctgcctttcttttgccttatttacaagcatggataaaaatcttaaaggtttaaataaaaatgatcaatataatggtgaatcttttgagaaatctcttaactgcattggtattttttctctgtgaaagatgactatgataatctggtacaaatggttttatgtcaccaattttgctgcaagaatgggaactgcttttaaatctgtaaatagctcttaacatttgttgtatgcactcttttcttactatggctgtcaacacttgtgtagggtttaatttctaaattgttggcatgttctttttctcaggctattcagaagtaacaacatttttcatttcagacatgcaatcacctattaatgatgaaatattttaccactttgggaatatttaattagtttagtcatggagaatacttcccacattttaagatttttcaaatatcactgtcatttctattttagcattttatcaaattattgcttttttattttataataaggcttaagacagattatagacctccttaagagatgagtttcttcttctaaaaatgcatgttgatagaggactatttaggctaatcggaggaatcattaagaaagaaagttttaacactgtttatccctatctgctttccttgcactttttctgtgaaaaatattttctgtttgcaaaatcttccctgagttctgaacccagcaccatcagtaccaaagtcttatgcatatgtatttattatgctcctgaaataggcctcttcttgatgagacccaaactattacaaaaatatcagtattcatattttactcacaattcatacccgtgcttacttagttggcattttagtgctttgaatttctatcttaaagcacag

SEQ ID NO: 20430 - DNA, 1589 bp, Homo Sapiens
gcacgaggcactacgatgaactgcttgctgcagaggccagagctattaagaatggcaaaggattgcatagcaagaaggaagtgcctatccaccgtgttgcagatatatctggggatacccaaaaagcaaagcagttcctgccttttcttcagcgggcaggtcgttctgaagctgtggtggaatacgtcttcagtggttctcgtctcaaactctatttgccaaaggaaacttgccttatcaccttcttgcttgcaggcattgaatgccccagaggagcccgaaacctcccaggcttggtgcaggaaggagagcccttcagcgaggaagctacacttttcaccaaggaactggtgctgcagcgagaggtggaggtggaggtggagagcatggacaaggccggcaactttatcggctggctgcacatcgacggtgccaacctgtccgtcctgctggtggagcacgcgctctccaaggtccacttcaccgccgaacgcagctcctactacaagtccctgctgtctgccgaggaggccgcaaagcagaagaaagagaaggtctgggcccactatgaggagcagcccgtggaggaggtgatgccagtgctggaggagaaggagcgatctgctagctacaagcccgtgtttgtgaccgagatcactgatgacctgcacttctacgtgcaggatgtggagaccggcacccagttggagaagctgatggagaacatgcgcaatgacattgccagtcacccccctgtagagggctcctatgccccccgcaggggagagttctgcattgccaaatttgtagatggagaatggtaccgtgcccgagtagagaaagtcgagtctcctgccaaaatacatgtcttctacattgactacggcaacagagaggtcctgccatccacccgcctgggtaccctatcacctgccttcagcactcgggtgctgccagctcaagccacggagtatgccttcgccttcatccaggtgccccaagatgatgatgcccgcacggacgccgtggacagcgtagttcgggatacccagaacactcagtgcctgctcaacgtggaacacctgagtgccggctgcccccatgtcaccctgcagtttgcagattccaagggcgatgtggggctgggcttggtgaaggaagggctggtcatggtggaggtgcgcaaggagaaacagttccagaaagtgatcacagaatacctgaatgcccaagagtcagccaagagcgccaggctgaacctgtggcgctatggagactttcgagctgatgatgcagacgaatttggctacagccgctaaggaggggatcgggtttggcccccagccccgctcacgccagtccctcttcctctgccgggagggtgttttcaactccaaaccccagagaggggttgtagattgggtccagctttgcttcagtgtgtggaaatgtctcgtggggtggcatcggggctgcggggtggggaccccaaggctttctggggcagacccttgtcctctgggatgatgggcactgctatccacagtctctgccagttggttttatttggaggtttgtgggcttttttt

SEQ ID NO: 20431 - DNA, 894 bp, Homo Sapiens
gcacgaggggcgcggcgacgaccgccgggagcgtgtgcagcggcggcggcggaagtggccggcgagcccggtccccgccggcaccatgcttcccttgtcactgctgaagacggctcagaatccccccatgttggtggagctgaaaaatggggagacgtacaatggacacctggtgagctgcgacaactggatgaacattaacctgcgagaagtcatctgcacgtccagggacggggacaagttctggcggatgcccgagtgctacatccgcggcagcaccatcaagtacctgcgcatccccgacgagatcatcgacatggtcaaggaggaggtggtggccaagggccgcggccgcggaggcctgcagcagcagaagcagcagaaaggccgcggcatgggcggcgctggccgaggtgtgtttggtggccggggccgaggtgggatcccgggcacaggcagaggccagccagagaagaagcctggcagacaggcgggcaaacagtgagcgcccacccagaccggctgctgcgccccctcctgccagggtggcgattccgctccacagtctcggacggatctgctcagaaaggaagaggcaggcgccagggggaaccctcttcgtgttttgtgactctcccttttaggtgaagcccctttttcttgctaaaaccggcaattctcccggttagaaatgttactttggtgttttttggttttgtgaaacggcccgtcccaaactggctggattcctagaagagtctgtgttgaaggcatctttcaagctctcgctctggttctcagggcagcattttccaggcgggtttgttttgcatttcttggagcctcttcgagcagcaaccagacgggagatttttattttaagctgttcatgct

SEQ ID NO: 20432 - DNA, 917 bp, Homo Sapiens
  misc_feature (148)..(238): n is a, c, g, or t
gcacgaggagactacaggtgcagaaaacaaagctaaaaagcttacattgcctctatttggtgccatgaaaggaggaagcaaattcaaattaaaaactggaacagtagggaagttaccccccaagcgtccagaactccctccaactctnnnnnnnnnnnnnnnnnnnnnnnnnnnnnnnnnnnnnnnnnnnnnnnnnnnnnnnnnnnnnnnnnnnnnnnnnnnnnnnnnnnnnnnnnnnctggaggatggaagcctcagtaggccacagccagagatagagccagaagcagcagtgcaggaaatgaggcctcccacagatctcacacattttaaagaaacccaaacccatgaaaacatgtctcaacttagcgaggaagaacagaataaagattatcaagactgtagcaaaaccacttcattgtgcgcaggaccctcagcatcaaagaatgaatatgagaaaagcagaggtgaattgaagaaaaagaaaacacctggtccaggcaaacttccaccaacactttcttccaaatatcctgaagatgacccagactactgtgtgtgggtcccacctgaaggtcaaagtggagatggcagaacccatcttaatgacaagtatggctattgattgcttcagaatcccaaaagaaaaccttgtggaccatgtgacatggaatatttgggataatgtatcaaattgaatggccagagaagtttagatgattatttgtaagatctggtgactggcttttcgttctgtgttcttggcttcctaaatttatctgcccatatgattctcatgcatttgatatttatgtttaaaagtgtttatatatgtatgtaaaagggaaccatatgttttgagaatttgtaaagtgagagacatgatcctattaaaataagaaggcaaaaatgttcct

SEQ ID NO: 20433 - DNA, 1187 bp, Homo Sapiens
  misc_feature (1024)..(1050): n is a, c, g, or t
tgggaacctttctgctatccatattgatcgcctggactgtgcagtatttccagtctgtctcagcaagcgatccccctccaagaccatcccaggcctccccagacactgccacgtccactgcaagtccagctgtgactccagctgcagatgcctctgaccaagaccagcccacagtaactaataacccggagccacgtgggtgaactgtgcactccagttctctccagatgagagagaatcttttcaacagctggtattgggaagctggggccagggcatgatcctgataaacaccttaaatgtcttgtcaactggatgcaaattttgcaattggtgtcattttttttaaagtcaaattacaaggaagtacccagatcaggcagtggtaataccaaaggtcatcaaacacatacaaggaacatcttgatcatagggcatgtggggaagtttactgggccatcacagacttttgttctagtgattgtatgtattaggagtcatagcatgccctacggcagatctggattcttatacactaagatgtgtcttaagaatcacagtgcgtgcttcatccctttattgaagaacagaaaattatgactactctacaaggtggataatattttggtacctgtgcttgccacagccctgttcctcaaagctgaattgatagatttctctttgacttccaagacctagcagttataaggcaccttgaaataaattgtttgtgcctggaaatgcagggagggcaatagctttgtaaattggtttacatttttctccttgaatttttctagggtcctagtgcttccgaatcatttaatggcattgtcggatatcttttacatttcaattgcaatccatgaaattacatttagaagattcttagtacttaactgtagtcttctccatgaattacacgttagaatagactggcagcaactgaatatgcagcaagtaagcctctagcttatagtttcatccctacccctcatgcctgcgtgagtctgtacagggatannnnnnnnnnnnnnnnnnnnnnnnnnntagagaggaagaggaagagcagaatgtctgtatactacatgctgctaaggtagtgaataaatcagtaatgcaatattgtgggtccaaactactctttgcactactttatttacagtagtaaataaaattatttttat

SEQ ID NO: 20434 - DNA, 318 bp, Homo Sapiens
  misc_feature (162)..(219): n is a, c, g, or t
gcacgaggagaaagtgagagcaggggcaccttttctacgtaagacacaaaactcaagctgtaacagaaaggtcaatggacttgacccaactgagaaggaaaaacttctgtatggaggaaaagacagtaaacatgacagactgatagaaagtattggcagacnnnnnnnnnnnnnnnnnnnnnnnnnnnnnnnnnnnnnnnnnnnnnnnnnnnnnnnnnntgcttgagcccaggagtttaaggttgtagtgcgctagacggcgcctgtgaatagccactgcactttagtctggggaacatatgagacccctgccatctc

SEQ ID NO: 20435 - DNA, 1279 bp, Homo Sapiens
ctgatagagtatggccacttctgggggaaaaacatgtaattaagtaaatgtatacattggttttcacgttttacttttgttttcccactaccaataattttcctctggaagaattttatagttttttctatttcattttaatgagtaacaatatgttaaatgcataattaagacaaagcaatgaaattctgactttattcaaagtactgaagattattgcttctagggcatttttaaacagcaccattgtattgttgaatgtttatgtaactgatggcttttctataatgtaatttttgaatgttcaggtgttacatttccaaagtttaacttttaaaaaaccatcttctgatcccttttattgtctgggccatacaatctatattacataggtgccaacatttaattcttttaaatggaacatttgcagttttccatattggtacctgctttttctggagaggtttgagatcttgttaacaaatcagactttacactatatacagatgtgacagataaattgaaccacttgtttgtgaaaatgagttcctgtcatcttcctcattcactcagccctcaccccagcagccttttccggtcattgtagctgacatggagcagtgacagtattcatttgagaacagggatgcaagtcacagacatcataaaatcagggtctccctgctgaagcattcactagttggcaactatgaatttattccatgtcattctgtttacttagcacttgcactacccttgttggttgagtgtatgctttatttgtttctagtttgaaatcccacatctgatagctgagagtaggcaaatacaacatttacctaatgtcattcactaacatggaagagttgtgaaaattctagagtgctgtaaatccttggcatacactatgacaaacaacttcattactctcccaccaggagctgctctcctgcacttagaaataatgtcacaagtagttttctaatgtacaatgcagacaaatgtactgctctctgaatacttgaagaaatggtattatacatacatagaaacttattagttataccttttcacaatcttattacgatgttgccgttaaaagggaaaaaagacacaggcaatgaatggtgggatagtaagaggacttagagtgtatgaatgagttgattttacttttttggaatttgattaagttgacagtaggcactgattggatgattaaacataagttaatctccactgtgataaaaacttaaataataaacatgatttaaaatag

SEQ ID NO: 20436 - DNA, 841 bp, Homo Sapiens
ggtttctaatttctttttattagtctgatatgaaaaacaaatatccctacaaatgaaagaaatattgaagaaacaaattgaagggcttaccttattttaattaaaaagaagtcggggctaccaggggtttcagacgtgctcgatggacacgtgatttgtaaacagccaagattctgggggacgggggggtgcctcggtggggttgacatttgagttacagggacttaataatggccagcctttcacatcccatgggaaaccgcccccccgggccttggagaatgggggtccaagtgcctatccccctttggatgtaaaattcatcgttagtaaacatcatccgcccagcaacaagcaaagcacatcgcaagattaaaacaaagaatccgccgtgaacagaaggcctccatctctgctctcaggcaggtgtccttcagggaggagcctcaggcagctgttctaaccctgctgccaacgcctgggctgtttctgccgacaatcttctatttctctaaaagagtacgctgaacagctggctctgcgttggcattccggtggctctccatgtccacctccccttgttctgcattttctttgaagcatagcttctttttctggtaagcaatgaagctagagatggctccagccacggcgaccacgacagcccccacaatcccggggatcacgcctggggcgtcggcctcttccccttctttcctgtggctgcctccaccatcactgcctccttttccttctccacctgaaacgccatccgcaaggtcagcatctgaaaagctaccggaggaactagggtggttggggtttggatttggcctcgtgc

SEQ ID NO: 20437 - DNA, 903 bp, Homo Sapiens
gcacgagggtgacccagattgaacctttctgcttggagactgacagaagaggtgctctgaaggcacagacttggaagcaccagctggaagaagaactgagacagcagaaagaagcagcttgtttcaaggctcgtccaaacaccgtcatctctcaggagccctttgttcccaagaaagagaagaaatcagttgctgagggcctttctggttctctagttcaggaaccttttcagctggctactgagaagagagccaaagagcggcaggagctggagaagagaatggctgaggtagaagcccagaaagcccagcagttggaggaggccagactacaggaggaagagcagaaaaaagaggagctggccaggctacggagagaactggtgcataaggcaaatccaatacgcaagtaccagggtctggagataaagtcaagtgaccagcctctgactgtgcctgtatctcccaaattctccactcgattccactgctaaactcagctgtgagctgcggataccgcccggcaatgggacctgctcttaacctcaaacctaggaccgtcttgctttgtcattgggcatggagagaacccatttctccagacttttacctacccgtgcctgagaaagcatacttgacaactgtggactccagttttgttgagaattgttttcttacattactaaggctaataatgagatgtaactcatgaatgtctcgattagactccatgtagttacttcctttaaaccatcagccggccttttatatgggtcttcactctgactagaatttagtctctgtgtcagcacagtgtaatctctattgctattgcccctttacgactctcaccctctccccactttttttaaaattttaaccagaaaataaagatagttaaat

SEQ ID NO: 20438 - DNA, 1186 bp, Homo Sapiens
gcacgaggggttggaggcgcaggttggagcgtggcgaacaggggctctgggcctggcgctgctgctgctgctcggcctcggactaggcctggaggccgccgcgagcccgctttccaccccgacctctgcccaggccgcaggccccagctcaggctcgtgcccacccaccaagttccagtgccgcaccagtggcttatgcgtgcccctcacctggcgctgcgacagggacttggactgcagcgatggcagcgatgaggaggagtgcaggattgagccatgtacccagaaagggcaatgcccaccgccccctggcctcccctgcccctgcaccggcgtcagtgactgctctgggggaactgacaagaaactgcgcaactgcagccgcctggcctgcctagcaggcgagctccgttgcacgctgagcgatgactgcattccactcacgtggcgctgcgacggccacccagactgtcccgactccagcgacgagctcggctgtggaaccaatgagatcctcccggaaggggatgccacaaccatggggccccctgtgaccctggagagtgtcacctctctcaggaatgccacaaccatggggccccctgtgaccctggagagtgtcccctctgtcgggaatgccacatcctcctctgccggagaccagtctggaagcccaactgcctatggggttattgcagctgctgcggtgctcagtgcaagcctggtcaccgccaccctcctccttttgtcctggctccgagcccaggagcgcctccgcccactggggttactggtggccatgaaggagtccctgctgctgtcagaacagaagacctcgctgccctgaggacaagcacttgccaccaccgtcactcagccctgggcgtagccggacaggaggagagcagtgatgcggatgggtacccgggcacaccagccctcagagacctgagctcttctggccacgtggaacctcgaacccgagctcctgcagaagtggccctggagattgagggtctctggacactccctatggagatccggggagctaggatggggaacctgcccacagccagaaactgaggggctggccccaggcagctcccagggggtagaacggccctgtgcttaagacactcctgctgccccgtctgagggtggcgattaaagttgcttcacatccctc

SEQ ID NO: 20439 - DNA, 871 bp, Homo Sapiens
gcacgaggtctcccatggctagggaaaatggcacagttgggtcctatttcagatgctaaagaaaacccttatggcgaggatgacaataagagtccattccccctgcagcccaaaaacaaacgcagttatgcccagaatgtgactgtctggatcaaacccagcggcctgcagacagatgtacagaagattttaagaaatgcaaggaaactacctgaaaaaacacagacattctataaggagctgaaccgtttgcgaaaggccgctctagcctttggtttcctggacctgctgaaaggggtggctgacatgctggaaagggaatgcacactgctgcctgagacagcccaccctgatgctgcattccagctgacccatgctgcccagcagctcaagctggccagtaccggcacctctgagtatgccgcttatgaccagaacatcacacctttgcacacggacttctctgggagcagcactgaaagaatttgaaactgacttttggagctttccttcttttttcatttcaactgaaaatgctttaggtaaaaacctttccagtatgttcacctctagaatagccacccaaagaccttcctgaggctgcctcagaagcaccacttgctgttttgaatgactctactagtatgagaaggatgtgaaggtggttggctggttgggctttaacttcctgggattcataatttttaagcttggaagatagctgctgttcccatgatgggcacatttcctgagaagcttgaatgactgatgagcatagagcacccctgccttcctcagaaacctgaccggcaggggctctctggcttcctgaaagcttcactcttcctcgtttatatctcacctgtaaggg

SEQ ID NO: 20440 - DNA, 258 bp, Homo Sapiens
gcacgaggttaaaatttaactttttatgagatttcagtttttgaaatacacaactcttacagcacaaacacagtatttacatttcaagttctttgtacaaaagatgtatgccattttggaagaatattgttgagatcatgatctaaaatacctgtcagagttactcatggaatctgctcttcacaaatccattgtattatgacataaaatatggctagacgccaaggtttaaccatacataaaaatactaattctcgg

SEQ ID NO: 20441 - DNA, 848 bp, Homo Sapiens
gcacgagggcacggcccgcgggcggcgttcgctggagctggtggaccgggcggctgaccgaggggcggacgcgcggcggggcagaccgctggggactgcgggcggcgctgtgtccgtcgccatgacagatcagacctattgtgaccgcctggtgcaggacacgcctttcctgacaggccatgggcgcttgagtgagcagcaggtggacaggatcatcctccagctgaaccgttactacccacagatccttaccaacaaggaggcggaaaagttccggaaccccaaggcatccttgcgtgtgcggctctgtgacctcctgagccacctgcagcggagcggtgagcgggactgccaggagttctaccgagccctgtatatccatgcccagcccctgcacagccgcctgcccagccgccacgctctgcagaactcagattgcacagagctagactcgggcagccagagcggcgagctgagtaacaggggacccatgagcttcctggctggcctgggccttgctgtgggactggccctgctcctgtactgctatccgccagaccccaagggcctgccagggacccggcgcgtcctcggtttctcgcctgtcatcatcgacagacatgtcagccgctacctgctggccttcctggcagatgacctaggggggctctgacagaccctggacccagggcctcacctgccactcaaccaaagagtcctcgagcccggcccgccaaggggactgctgcttctttttctaaatgcatatttttcattatttataatttgtgtaaaaaacacaccttcaccttacaaggtgctgacatattaaatgttcaagttctctc

SEQ ID NO: 20442 - DNA, 996 bp, Homo Sapiens
gcacgaggccccagtccaaggagcagtcgtgtctgacctacattgggcttttctcagaactttgaacgatcccatgcaaagaattcccaccctgaggtgggttacatacctgcccaatggccaaaggaaccgccttgtgagaccaaattgctgacctgggtcagtgcatgtgctttatggtgtggtgcatctttggagatcatcgccatattttacttttgagagtctttaaagaggaaggggagtggagggaaccctgagctaggcttcaggaggcccgcgtcctacgcaggctctgccacaggggttagaccccaggtccgacgcttgaccttcctgggcctcaagtgccctcccctatcaaatgaagggatggacagcatgacctctgggtgtctctccaactcaccagttctaaaaagggtatcagattctattgtgacttcatagtgagaatttatgatagattattttttagctattttttccatgtgtgaaccttgagtgatactaatcatgtaaagtaagagttctcttatgtattattttcggaagaggggtgtggtgactcctttatattcgtactgcactttgtttttccaaggaaatcagtgtcttttacgttgttatgatgaatcccacatggggccggtgatggtatgctgcagttcagccgttgaacacataggaatgtctgtggggtgactctactgtgctttatcttttaacattaagtgcctttggttcagaggggcagtcataagctctgtttccccctctccccaaagccttcagcgaacgtgaaatgtgcgctaaacggggaaacctgtttaattctagatatagggaaaaaggaacgaggaccttgaatgagctatattcagggtatccggtatttgtaatagggaataggaaaccttgttggctgtggaatatccgatgcttttgaatcatgcactgtgttgaataaacgtatctgctaaatcaggaaaaaaa

SEQ ID NO: 20443 - DNA, 923 bp, Homo Sapiens
  misc_feature (702)..(735): n is a, c, g, or t
gcacgaggcagaaggggactgacagtgggcaacactcacatcccactggctgctgttctgaaaccatctgattggctttctgaggtttggctgggtggggactgctcatttggccactctgcagattggacttgcccgcgttcctgaagcgctctcgagctgttctgtaaatacctggtgctaacatcccatgccgctccctcctcacgatgcacccaccgccctgagggcccgtcctaggaatggatgtggggatggtcgctttgtaatgtgctggttctccttttttttctttcccctctatggcccttaagactttcattttgttcagaaccatgctgggctagctaaagggtggggagagggaagatgggccccaccacgctctcaagagaacgcacctgcaataaaacagtcttgtcggccagctgcccaggggacggcagctacagcagcctctgcgtcctggtccgccagcacctcccgcttctccgtggtgacttggcgccgcttcctcacatctgtgctccgtgccctcttccctgcctcttccctcgcccacctgcctgcccccatactcccccagcggagagcatgatccgtgcccttgcttctgactttcgcctctgggacaagtaagtcaatgtgggcagttcagtcgtctgggttttttccccttttctgttcatttcatctggctcnnnnnnnnnnnnnnnnnnnnnnnnnnnnnnnnnntgcttcccctcactgcccaggtcgatcaagtggctttttctgggacctgctcagctttgagaatctcttctcatccaccctctggcactcagcctctgagggaaggagggatggggcatagtgggagactcagtctagagctgagggtaagggcaggtagggcgtggaggctgtggaacatttcgaat

SEQ ID NO: 20444 - DNA, 125 bp, Homo Sapiens
gcacgaggcctagatatatagctctgattttaggccttttgtgcataccattacaatatggtggggtaagacattctacagtagcctgtgctgaactgatctcttaaataaacttgcttctggtt

SEQ ID NO: 20445 - DNA, 630 bp, Homo Sapiens
cgaggccatccttttgttacaagagactgttgtgtgcgaaaagagtgtgagatcaaactgtgagtgcggcccactttgacgaaaagaaggagatcaacaaacggaagcagctgatcctggaggggaaggatcctgacctggaggccaagcgcaaggctgagctggccaatatcaagcagaagaaccggcgcttcaaggagaaggtggaggagacgctgaagcgacagaaggctggcagggctggccacaaggggcgtccacccaggacaccgtctgggtcccactcaggcccagtcccctcccagggcctggtctgagccccacacggccatctgcccagtccttgactcgtccatggagctgagggtcggaggaaccttccttgggggcagcagcccttcccgggggcctacccagtgccccacagcagaacccgtgggcgctcgtgttgtgcgggccctgctcctctgccccgaaaccactggctggccccttccctgagccctggccaagattcaggctgcaggggaagaaagaacatgaccgggaggttgtgaccccaacccaaggtcaccccccaggggtgccgcatacaggaggtgcttaataaacgggtcttttgacttcctc

SEQ ID NO: 20446 - DNA, 807 bp, Homo Sapiens
cctctcacagtttatcttaagtaggaagaaggaagccaacaagggcagccactttctaaaaattttgacgtgctgagaaaatagttcctgtccagatgctcagcaaacacctgtagcacagcttccttcactgactgtgaagaaggtacggtgttgcagctacacactgccaccaacatagtttgcattaccttgttcaaacttgaaatcaatttaagaatactggttcatttcttttctctttttcctttttccactggtttctggtgatagctcctgccattttttaatggcatcaaaaaaggcctttcgggtgattgcatagtgtcctttgagctcgtgcagggcccacatgatgtcctgactactgagcactttgaagtcggccatgaggaggtcagcagcttggatgaagcagtgctggtcaagaggagtcaatttagaatagtcaaaaaagtcttattttaggcaactttgtctcatcttggctggccagcagactgctactgggatttataatgattctgtcttctctctttggataatctgggttttccagaagaaaattacaaagtcttgtccccgatggcagtgaaagttgttcaagtgaattacctcttcattgttgtttccctcttccattttcaaatgcagacatgcacatacgggactgctaatatctaaacatggtgaccatctgtttcaaaagagtcgccactcaactcgccggctagccaggcgggttcggcgaccttcgctaccacgccgcttactcctccaaagctgcagctacgagctccgtggcag

SEQ ID NO: 20447 - DNA, 822 bp, Homo Sapiens
gcacgaggctttcgccgtgctgccccgccatggcagtggccaccatggggcctggcacatctctctgagcaagcccagcgagaaggagcagcaccttctcatgacactggtgggcgagcagggggtggtgcccactcaagatgtcctttccatgctgggtgacatccgcaggagcctggaggagattggcatccagaactattccacaaccagcagctgccaggcgcgggccagccaggtgcgcagcgactacggcacgctcttcgtggtgctggtggtcattggggccatctgcatcatcatcattgcgcttggcctgctctacaactgctggcagcgccggctgcccaagctcaagcacgtgtcgcacggcgaggagctgcgcttcgtggagaacggctgccacgacaaccccacgctggacgtggccagcgacagccagtcggagatgcaggagaagcaccccagcctgaacggcggcggggccctcaacggcccggggagctggggggcgctcatggggggcaagcgggaccccgaggactcggacgtgttcgaggaggacacgcacctgtgagcgcagccgaggcgcaggccgagtgggccgccaggaccaagcgaggtggaccccgaaacggacggcccggagcccgcaccagccccgcgcctacccgggccgcccccgcggcctggccctcggcgcgggctccttcccgcttccccgacttcacacggcggcttcggaccaactccctcactcccgccccgaggggcagcctcaaagccccgctttggccccgctttcccgcccctgaaccccgg

SEQ ID NO: 20448 - DNA, 829 bp, Homo Sapiens
gcacgagggggaggagctatactcaggggtggcagcagacctcatgggacgagactttaccatctttcgcagcctagggcaacgtccaagtctccgaacagagccacacgactcccgctggctcaatgagcccaagtttgtcaaggtattttggatcccggagagcgagaacccagacgacgacaaaatctacttcttctttcgtgagacggcggtagaggcggcgccggcactgggacgcctgtccgtgtcccgcgttggccagatctgccggaacgacgtgggcggccagcgcagcctggtcaacaagtggacgacgttcctgaaggcgcggctggtgtgctcggtgcccggcgtcgagggcgacacccacttcgatcagctccaggatgtgtttctgttgtcctcgcgggaccaccggaccccgctgctctatgccgtcttctccacgtccagcatcttccagggctctgcggtgtgcgtgtacagcatgaacgacgtgcgccgggccttcttgggaccctttgcacacaaggaggggcccatgcaccagtgggtgtcataccagggtcgcgtcccctacccgcggccaggcatgtgccccagcaagacctttggcaccttcagttccaccaaggacttcccagacgatgtcatccagtttgcgcggaaccaccccctcatgtacaactctgtcctgcccactggggggcgccctcttttcctacaagttggagccaattacaccttcactcaaattgccgcggaccgggttgcaccgctgacggacactatgacgtcctcttcattggcacagacgttggcacgg

SEQ ID NO: 20449 - DNA, 1132 bp, Homo Sapiens
tccgagcggcggcggcgcggagagacgcagcggaggttttcctggtttcggaccccagcggccggatggtgaaatcctccctgcagcggatcctcaatagccactgcttcgccagagagaaggaaggggataaacccagcgccaccatccacgccagccgcaccatgccgctcctaagcctgcacagccgcggcggcagcagcagtgagagttccagggtctccctccactgctgtagtaacccgggtccggggcctcggtggtgctcctgatgcccctcacccacccctgaagatcccaggtgggcgagggaatagtcagagggatcacaatctttcagctaacttattctactccgatgatcggctgaatgtaacagaggaactaacgtccaacgacaagacgaggattctcaacgtccagtccaggctcacagacgccaaacgcattaactggcgaacagtgctgagtggcggcagcctctacatcgagatcccgggcggcgcgctgcccgaggggagcaaggacagctttgcagttctcctggagttcgctgaggagcagctgcgagccgaccatgtcttcatttgcttccacaagaaccgcgaggacagagccgccttgctccgaaccttcagctttttgggctttgagattgtgagaccggggcatccccttgtccccaagagacccgacgcttgcttcatggcctacacgttcgagagagagtcttcgggagaggaggaggagtagggccgcctcggggctgggcatccggcccctggggccaccccttgtcagccgggtgggtaggaaccgtagactcgctcatctcgcctgggtttgtccgcatgttgtaatcgtgcaaataaacgctcactccgaattagcggtgtatttcttgaagtttaatattgtgtttgtgatactgaagtatttgctttaattctaaataaaaatttatattttacttttttattgctggtttaagatgattcagattatccttgtactttgaggagaagtttcttatttggagtcttttggaaacagtcttagtcttttaacttggaaagatgaggtattaatcccctccattgctctccaaaagccaataaagtgattacacccg

SEQ ID NO: 20450 - DNA, 1350 bp, Homo Sapiens
  misc_feature (887)..(896): n is a, c, g, or t
gcacgagggtggctggtctggagacaacgtacacaggaggtaatggcttctctacttcatataacagccagcggtggttaaacctctatctctctgcttgcaaatttttggatttggctctcgcattgccctctgaaaaccttcctcagtttcagatgtaccgatgggcctttattccagaagcctcagatgattcaggtttggaagtcagaaggcagggtatacatcaacgagaatttaaaccttacgtggtacgactagcaaaacttcttcggaaaagagcaaagaaaaatccagaggaagacaactcagggagaacattgggttgggagccagggcacttgctgctcaccatctgcaccgtgcgcagtatggagcagctcctgccgttcttcaatgtgctcagtcaagtcttcaacagcaaagtcacaagccgatgtggaggacactcagggagtcctatcctctactcaaatgccttccctaataaggacatgaaactggagaaccacaaaccatgttccagcaaagccaggcaaaaaatagaagagatggtagaaaaagattttctggaagggatgataaaaacttgagcaccattgctggttccatttagcttacatgtaaatgtaattatttaaaacacacacactgctctgcgttgtatagtttttccttttttgtatgtaacagaacacatttcagattgtatttaatttaaatatttgtatataagagcaaatgtctgaatgtggcctgaatcaagtttaaatattgttggctcatactgattatggtgcctaagagagctatatatatacacatgtaaagtccattgtttttattgtcctgagttgtcttaaacctgcaaaatatacactacccannnnnnnnnnccattggtttcaaacttggttcaattaagattggttggggatttttctcttttccttattaaccatgttctggtatcaaaatggtgttccttctccatcaaaggctgggaaacgtattataattagtttttctcccacataccttcaccaagaacagtgaagaataactgaaggctggaccatgcatccttaaaagtattgcatgagcatctccacctcagtatggaagagggatggacaaccccctattcatacctctgagttcctgatggcattagtcatataggtaagtcatctaataatctttcttaagactctgcaatggaaaaactggttgtataaagtcttctctgccctctccatttgtatcagcaatggggaatgctgcaaaacatcatctttgctcatgtgatgggtgatggcaagatatcacaaggagttggtaataagattt

SEQ ID NO: 20451 - DNA, 698 bp, Homo Sapiens
gcacgagggtggcatgaagctgtagggactcatcttgcatggcaccaccggccagacactgcccaaggaccagtatttgtcactaccaaactcagcccttcttggaatacagcctttcaagcagaggacagaagggtccttctccttatgtgggaaatgggcctagtagatgcagaattcaaagatgtcggttgggagaaactagctctgatcctaacaggccacgttaaactgcccatctggagaatcgcctgcaggtggggccctttccttcccgccagagtggggctgagtgggcgctgagccaggccgggggcctatggcagtgatgctgtgttggtttcctagggatgctctaacgaattaccacaaacctggtggattgaaacagcagaacttgattcccttacagttctggaggctggaaatctgggatggaggtgttggcagggctgtggtccctttgaaggctctggggaagaatccttccttggctctttttagcttgtggcggcagtgggcagtccgtggcattccccagcttattgctgcatcactccagtctctgtctcttctgttctctcctcttttaacaacagtcattggatttagggcccaccctaatcctgtgtgatcttatcttgatccttattaattaaacctgcaaatactctagttccaaataaagtcacattctc

SEQ ID NO: 20452 - DNA, 1088 bp, Homo Sapiens
  misc_feature (127)..(135): n is a, c, g, or t
gcacgagggcaggacggaatatagaggagcactattatggatgaaggacgtgtctcaggagcttgatccagacctctacaagcaaatggagaagttcaggaaggtacaaacacaagtgcgccttgcnnnnnnnnnctttgacaaattgaagatggatgtttgtcaaaaagtggatcttcttggagcgagcagatgcaatctcttgtctcacatgctagcaacataccagaccactctgcttcatttttgggagaaaacttctcacactatggcagccatccatgagagtttcaaaggttatcaaccatatgaatttactactttaaagagcttacaagaccctatgaaaaaattagttgagaaagaagagaagaagaaaatcaaccagcaggaaagtacagatgcagccgtgcaggagccgagccaattaatttcattagaggaagaaaaccagcgcaaggaatcctctagttttaagactgaagatggaaaaagtattttatctgccttagacaaaggctctacacatactgcatgctcaggacccatagatgaactattagacatgaaatctgaggaaggtgcttgcctgggaccagtggcagggaccccggaacctgaaggtgctgacaaagatgacctgctgctgttgagtgagatcttcaatgcttcctccttggaagagggcgagttcagcaaagagtgggccgctgtgtttggagacggccaagtgaaggagccagtgcccactatggccctgggagagccagaccccaaggcccagacaggctcaggtttccttccttcgcagcttttagaccaaaatatgaaagacttacaggcctcgctacaagaacctgctaaggctgcctcagacctgactgcctggttcagcctcttcgctgacctcgacccactctcaaatcctgatgctgttgggaaaaccgataaagaacacgaattgctcaatgcatgaatctgtacccttcgggagggcactcacatgccgcccccagcagctcccctgggggctagcagaagtataagtgatcagtatgctgttttataattatgtgccattttataaa

SEQ ID NO: 20453 - DNA, 1434 bp, Homo Sapiens
gcacgagggaggcttttggagctgctaaaatgccggattacctcggtgccgatcagcggaagaccaaagaggatgagaaggacgacaagcccatccgagctctggatgagggggatattgccttgttgaaaacttatggtcagagcacttactctaggcagatcaagcaagttgaagatgacattcagcaacttctcaagaaaattaatgagctcactggtattaaagaatctgacactggcctggccccaccagcactctgggatttggctgcagataagcagacactccagagtgaacagcctttacaggttgccaggtgtacaaagataatcaatgctgattcggaggacccaaaatacattatcaacgtaaagcagtttgccaagtttgtggtggaccttagtgatcaggtggcacctactgacattgaagaagggatgagagtgggcgtggatagaaataaatatcaaattcacattccattgcctcctaagattgacccaacagttaccatgatgcaggtggaagagaaacctgatgtcacatacagtgatgttggtggctgtaaggaacagattgagaaactgcgagaagtagttgaaaccccattacttcatccagagaggtttgtgaaccttggcattgagcctcccaagggcgtgctgctctttggtccacccggtacaggcaagacactctgtgcgcgggcagttgctaatcggactgatgcgtgcttcattcgagttattggatctgagcttgtacagaaatacgtcggtgagggggctcgaatggttcgtgaactctttgaaatggccagaacaaaaaaagcctgccttatcttctttgatgaaattgatgctattggaggggctcgttttgatgatggtgctggaggtgacaatgaagtgcaaagaacaatgttggaactgatcaatcagcttgatggttttgatcctcgaggcaatattaaagtgctgatggccactaacagacctgatactttggatccagcactgatgaggccagggagattggatagaaaaattgaatttagcttgcccgatctagagggtcggacccacatatttaagattcacgctcgttcaatgagtgttgaaagagatatcagatttgaactgttagcacgactgtgtccaaatagcactggtgctgagattagaagcgtctgcacagaggctggtatgtttgccatcagagcacggcgaaaaattgctaccgagaaggatttcttggaagctgtaaataaggtcattaaagtcttatgccaaattcagtgctactcctcgttaacttgacatacaactgaacccctgagggctttcaagtgaaaactttaattggaatccctaccctatatagacttgttaataaccaatttcataaacaaataattggctccaatttggt

SEQ ID NO: 20454 - DNA, 871 bp, Homo Sapiens
  misc_feature (85)..(147): n is a, c, g, or t
gcacgaggctctcacttccttctcgagcccggagccgctgccgccgcccccagctcccccgcctcggggagggcaccagggtctnnnnnnnnnnnnnnnnnnnnnnnnnnnnnnnnnnnnnnnnnnnnnnnnnnnnnnnnnnnnnnntgggatcaagtgatgctcccacctcaccctcccgagtacctgggactacaggtcactgcagccagaggggtccagaagagagaggaggcactgcctccactacagcaactgcacccacgatgcagagcatcaagtgcgtggtggtgggtgatggggctgtgggcaagacgtgcctgctcatctgctacacaactaacgctttccccaaagagtacatccccaccgtgttcgacaattacagcgcgcagagcgcagttgacgggcgcacagtgaacctgaacctgtgggacactgcgggccaggaggagtatgaccgcctccgtacactctcctaccctcagaccaacgttttcgtcatctgtttctccattgccagtccgccgtcctatgagaacgtgcggcacaagtggcatccagaggtgtgccaccactgccctgatgtgcccatcctgctggtgggcaccaagaaggacctgagagcccagcctgacaccctacggcgcctcaaggagcagggccaggcgcccatcacaccgcagcagggccaggcactggccaagcagatccacgctgtgcgctacctcgaatgctcagccctgcaacaggatggtgtcaaggaagtgttcgccgaggctgtccgggctgtgctcaaccccacgccgatcaagcgtgggcggtcctgcatccttcttgtgaccctggcacttggcttggaggctgcccc

SEQ ID NO: 20455 - DNA, 499 bp, Homo Sapiens
gcacgagggcgagggcgcgaccgcgggtactctgctgccggcttctcggagcggcgctgggcgaccagagcagggtcgagatgtcctacatcccgggccagccggtcaccgccgtggtgcaaagagttgaaattcacaagctgcgtcaaggtgagaacttaatcctgggtttcagcattggaggtggaatcgaccaggacccttcccagaatcccttcttacggatttagacgaggttcgaggctcacctatcagggcagctctcaggattgtcattttcctctttgcctgtgggtttaacttttgtatttttttaatcacaagtttgatacaaaatgtttttatcgtactctttggagatgcccattctacttttgaatttagcttttactaattcgcatctggaagctcagcaagtgcacaagccttactttggttaccgtggaaaccactgccacccctccccgatgtggtgcgctcaataaaaatgctggaattc

SEQ ID NO: 20456 - DNA, 1012 bp, Homo Sapiens
tcgcttccgacatcacctgctcctttcccgccaacggcaagttcactgcagaccagaaggccgtctatgaggcagtgctgcggagctcccgtgccgtcatgggtgccatgaagccaggtgtctggtggcctgacatgcaccgcctggctgaccgcatccacctggaggagctggcccacatggtccaggctcacctgggggccgtgtttatgcctcacgggcttggccacttcctgggcattgacgtgcacgacgtgggaggctacccagagggcgtggagcgcatcgacgagcccggcctgcggagcctgcgcactgcacggcacctgcagccaggcatggtgctcaccgtggagccgggcatctacttcatcgaccacctcctggatgaggccctggcggacccggcccgcgcctccttccttaaccgcgaggtcctgcagcgctttcgcggttttggcggggtccgcatcgaggaggacgtcgtggtgactgacagcggcatagagctgctgacctgcgtgccccgcactgtggaagagattgaagcatgcatggcaggctgtgacaaggcctttacccccttctctggccccaagtagagccagccagaaatcccagcgcacctgggggcctggccttgcaacctcttttcgtgatgggcagcctgctggtcagcactccagtagcgagagacggcacccagaatcagatcccagcttcggcatttgatcagaccaaacagtgctgtttcccggggaggaaacacttttttaattacccttttgcaggctcccacctttaatctgttttataccttgcttattaaatgagcgacttaaaatgattgaaaataatgctgttctttagtagcaactaaaatgtgtcttgctgtcatttatattccttttcccaggaaagaagcatttctgatactttctgtcaaaaatcaatatgcagaatggcatttgcaataaaaggtttcctaaaatggtccaaaaaaacctcgtgc

SEQ ID NO: 20457 - DNA, 1446 bp, Homo Sapiens
gcacgagggccccttggaaaaggccgcaagttgcttactccgagtagctgtgctagctctgtcagactgtaggatcatgtctgcaacttttagaaatagtgctttatattgcagcagtcttttatatttgacttttttttaatagcattaaaattgcagatcagctcactctgaaactttaagggtaccagatattttctatactgcaggatttctgatgacattgaaagactttaaacagccttagtaaattatctttctaatgctctgtgaggccaaacatttatgttcagattgaaatttaaattaatatcattcaaaaggaaacaaaaaatgttgagttttaaaaatcaggattgacttttttctccaaaaccatacatttatgggcaaattgtgttctttatcacttccgagcaaatactcagatttaaaattactttaaagtcctggtacttaacaggctaacgtagataaacaccttaataatctcagttaatactgtatttcaaaacacatttaactgttttctaatgctttgcattatcagttacaacctagagagattttgagcctcatatttctttgatacttgaaatagagggagctagaacacttaatgtttaatctgttaaacctgctgcaagagccataactttgaggcattttctaaatgaactgtggggatccaggatttgtaatttcttgatctaaactttatgctgcataaatcacttatcggaaatgcacatttcatagtgtgaagcactcatttctaaaccttattatctaaggtaatatatgcacctttcagaaatttgtgttcgagtaagtaaagcatattagaataattgtgggttgacagatttttaaaatagaatttagagtatttggggttttgtttgtttacaaataatcagactataatatttaaacatgcaaaataactgacaataatgttgcacttgtttactaaagatataagttgttccatgggtgtacacgtagacagacacacatacacccaaattattgcattaagaatcctggagcagaccatagctgaagctgttattttcagtcaggaagactacctgtcatgaaggtataaaataatttagaagtgaatgtttttctgtaccatctatgtgcaattatactctaaattccactacactacattaaagtaaatggacattccagaatatagatgtgattatagtcttaaactaattattattaaaccaatgattgctgaaaatcagtgatgcatttgttatagagtataactcatcgtttacagtatgttttagttggcagtatcatacctagatggtgaataacatattcccagtaaatttatatagcagtgaagaattacatgccttctggtggacattttataagtgcattttatatcacaataaaaattttttctcctcgtgc

SEQ ID NO: 20458 - DNA, 937 bp, Homo Sapiens
atcccccgggctgcgacctgctttttttacatttccgtgttttgttttaggtttgatgaggcggcactctctattcagaaagaaaaaaatatttataaggaaattgagaattatccaacttgttataagaaaacaattgctcaagtcttagttcatctacacagaaatgactatgtagctgcagaaagatgtgtccgggagagctatagcatccctgggttcaatggcagtgaagactgtgctgccctggaacagcttcttgaaggttatgaccagcaagaccaagatcaggtgtcagatgtctgcaactcaccgcttttcaagtacatggacaatgattatgctaagctgggcctgagtttggtggttccaggagggggaatcaagaagaaatcacctgcaacaccacaggccaagcctgatggtgtcactgccacggctgctgatgaagaggaagatgaatactcaggaggactatgctagtattttgcttgctgaaaagaaaagggaaacaaaggtaaaatcctgacatgccatttcaaggacttgggaatagattagggatatccgtacttcattacagtcatgattttggatcctaataaagactagtttttagttaccatcttccccaaatcactcattgtatccattacctgtgaagcatatcttttttctttccataagagcttttctaagacaccagccaggaattaacagaaaaatgtactgtcatgtttttaatacattgattaaaaaatttgcaagccaaattatacataaattatgttctaaaacaaaggggtaataagcataggtattcttctcttggacacttgtaagttactgttagtggaattgttttttacctttcctttataattggctgctaaaggtggatgtttactgataaatccttttaaaatttttttgtttt

SEQ ID NO: 20459 - DNA, 1076 bp, Homo Sapiens
  misc_feature (338)..(389): n is a, c, g, or t
  misc_feature (950)..(960): n is a, c, g, or t
gcacgagggttgtctcagatgttctaattctctttgtatgcttggaaacagcatagatatgttgctgtggttttcagaattttctcttttaatcacaagaagccttttaaaaaatgacttacacatattctcaatgtacagtaaaacagacagaagtgagcttatctgtttgatgctgtggcagggtcccagtcactgggcatatcctccttctccttaaccagcttctcagcagcccctgagtcacctgcacaaggtgcttgggaactgctggttatgagcattcctggttttcttcagccaaataacaggtaatcactgtcaattggatttggtcnnnnnnnnnnnnnnnnnnnnnnnnnnnnnnnnnnnnnnnnnnnnnnnnnnnnttaaaatttaaaaacatttaattcatgatcatgttcatcagtagatgctattattcataagaactgtgattccagcaaactagggtaattggtgcctttttacagttttgaataaaagcatttacaatttctaaattatcagttttcacagtttcagcactcaacctcatcatacgctgatttaatattgttttacattaaaatagtccttttccctgttgtgccaccattcatttaagtgctgtttgttcttaaaatgcatttaaagaaaaattacccatattgactttcacacctcatataatcagatctattacaaatatatatcggagtgacggtgcccaggatagatgtaatatttcttacagatgctggcacagaggaaataatataccagctaatctagtcacctaaccttgtggttagaattgcaattttaagaccagaaaaatttgaagtctgatcagagatttacaactgttcattatagtggtgccttaggcaatctttccaaagtaaattcagggccccattgctacttatgccatatttggacatacnnnnnnnnnnncttcaattttgtaaacttcctggaaagctgtcctcactaaatatccccctattctctatataagtggttactagtcatgggaatgactcctaaagtacgcctaaatttgatggaac

SEQ ID NO: 20460 - DNA, 1312 bp, Homo Sapiens
gcacgagggatgaactaagtggacttctcaaaccaacagtggcctctcagaaccagaaccttcctgttgccaaactcccacctagcaagttagtatctgatgacttggattcatctttagccaaccttgtgggcaatcttggcatcggaaatggaaccactaagaatgatgtaaattggagtcaaccaggtgaaaagaagttaactgggggatctaactggcaaccaaaggttgcaccaacaaccgcttggaatgctgcaacaatgatacagtttatgtaacttgatggaagaaaatggaattactccaaaaagacaagtgctcaagcagcaaaatccttacttccagcaaaatccaaactgctgtctcttaaatctcttaaactctcttcttccattagaatgctacaagtaactcagtgaaggcccatgaaggaaattgggactagtttataggagaacgtatcaatacagtttataaagccaagaattgctatgatttaagactaagatctgtctttttggtgactaacccttcaattctttcaactcctgttaatacccataatcagtaacctatcaagaaaagcccttatttggaaagtgtgaaatttgtatttggaaaagctgcctggagagaagaactgtgtcctttactgtatttcaacaggactcttttgggggatcaaaattaaaattcctaattatgcattatctttcttttctccagtcctcacaaatacagaaacaataactgaaattaacttttctttttttaaaaaaaattatattcagtttgcagtagacattccttaagtatttgtatttatttatgattatcaattttacataacattaatattgtatcagacctccttatgaaaatgagtatggatgtgcacagtatgtttgatttttatccacaagaatgaatctgattcagaatgcttttctcagctgacatacagagcactaaatattttaaggcaagtccataggtctgaatctcttaagaattctcggcctctgtgggatttaggggaagcattataaatgcattaatccttatagtcaattctgtgcctaggattttgccagggaacagttcactgactagggaaaagcactacattttaaattcagcattagtgcattgggaaggatctttactgctttgtgcttgggcatgtcattattttccatttgacattagggcctttccaaaatgaatgtgaggaattgctttcacttcagactttccttcttttcctaaactctagaaggggttacaagggggagggaagggggcaaag

SEQ ID NO: 20461 - DNA, 940 bp, Homo Sapiens
gcacgaggcttgggacccacattagagttttatgctctggtggcagcagaattccagagaactgacttgggagcttggctttgtgatgataattttccagatgatgaatctcgtcacgttgatcttggaggtggattgaaacctcctggatattatgtgcagaggtcatgtggactgttcacagcaccatttccacaggatagtgatgagcttgaaaggatcacgaaactgtttcatttccttggaattttcttggccaaatgcattcaagacaatagacttgtggacttacctatttctaaacctttttttaaacttatgtgtatgggtgacattaaaagcaatatgagtaaactgatttatgagtcacgaggtgatagagacttacactgtactgaaagtcagtctgaagcttctacagaagaaggtcatgattcactctcggtaggaagctttgaagaggattcaaaatcagaatttattcttgatccccctaaaccaaaacccccagcttggtttaatggaattttgacttgggaagactttgaattagtaaacccacacagagccagatttttaaaagaaattaaagaccttgctatcaagaggcgccaaattttaagcaacaaaggtctttctgaagatgagaagaacacaaaattacaggaactagtgctgaagaatccatcaggttctgggcctccacttagcatagaggatttaggtttaaatttccagttttgcccttcctcaagaatatatggttttacagctgtggatctcaagcccaagtggtgaagatgagatgataacaatggaataatgcagaagaatatgtggaatttgatgtttgacttttgtatgcatacgggtatcagaaacaaatggaagcctttaagatgggtttaataaagtttttccatggagaaattaaggttcc

SEQ ID NO: 20462 - DNA, 632 bp, Homo Sapiens
  misc_feature (515)..(524): n is a, c, g, or t
aaatggccccgggctgcaggaattcggcacgaggctttgagacacacagtatcattaatttccgaattgtatttcagtgttattttttgtttgtgaccactaagcttctgtcttaatacaaagctgttaccttctacagaatttaagtctgaagatgtaaagagagaacaggccttgtgtaacagaagatactcttttttatgctccttactgtgatcacagaaaaattaaaaatccaagtgctctctagatttgttgataaacattttatgcttgcatttaaacttgaaatgtatgagcagaatgagacaatcagttaaatcagaaatgagaagtattataatgtaaaggccttgttttgctgtagcaataaaatgaccaagtgcaatgacttgatttaataaaatcatattttaaaagttgctgctatgaatatttttggctataaaattttaccctgacttgctttcaataactgttacgtaatgcagttgatgttgtaacctaacattccnnnnnnnnnnttgagagggggaatctcaaaatagtatatacttcactaacttgtttacaggtgctgtatttaaaagcatgcttctctctcaaaaagaaaaattaaaggattttattgc

SEQ ID NO: 20463 - DNA, 830 bp, Homo Sapiens
gcacgaggttccagggcggcggtgggtgtccgcttctctctgctcttcgactgcaccgcactcgcgcgtgaccctgactccccctagtcagctcagcggtgctgccatggcgtggcggcggcgcgaagccagcgtcggggctcgcggcgtgttggctctggcgttgctcgccctggccctgtgcgtgcccggggcccggggccgggctctcgagtggttctcggccgtggtaaacatcgagtacgtggacccgcagaccaacctgacggtgtggagcgtctcggagagtggccgcttcggcgacagctcgcccaaggagggcgcgcatggcctggtgggcgtcccgtgggcgcccggcggagacctcgagggctgcgcgcccgacacgcgcttcttcgtgcccgagcccggcggccgaggggccgcgccctgggtcgccctggtggctcgtgggggctgcaccttcaaggacaaggtgctggtggcggcgcggaggaacgcctcggccgtcgtcctctacaatgaggagcgctacgggaacatcaccttgcccatgtctcacgcgggaacaggaaatatagtggtcattatgattagctatccaaaaggaagagaaattttggagctggtgcaaaaaggaattccagtaacgatgaccataggggttggcacccggcatgtacaggagttcatcatcggtcagtctgtggtgtttgtggccattgccttcatcaccatgatgattatctcgttagcctggctatatttactatataccgcgtttcctatatactggctctcagaatggaagtcaaaccataaaaaagaaa

SEQ ID NO: 20464 - DNA, 1373 bp, Homo Sapiens
catgtggtcggtttctttattgaaaccacagacggtagcgcaggtccctgctgtccacatgccccttgtagggacaggaggcccttcccgagtccaagtccaaatgccgggtccgggccgagcccacggccccgagtacaagtccgggttccgggtccgggccaagcccatggccccgagtccaagtccggatgccaggtccgggccgagcccacggccctactggctactactgggaggggctgcttttgctttttggtgaccaaatcttggacaagcggaacttggacttcttcctctggaggcccagcttctcaatcatgtcccgcagcatctgatcctcctcttgttcccggagccggtcctcgtccagcgagtccacaatgtcactgcggtcgttcacggggctcacgtactgctccagcagctcctgctcccgccgccgctcctgcagtgacttcaaagcctcgggcttggccatgagccggcgcagctcgccctcaatgtccagctgctgctcctccaaacgctgggccttggacttgtacatcagctctgactcctgtctcagcagaagctgcttctcgtgaatgagccagaaccagtcccccatgaggctatcctcagcgtcatctccctcggccgcccgcagtcgcttctccagctccacgccgcggagctccagggcgtccagccgcctctcgatgtcctgcagctgcctctgtatctcctccggggagaggtagtcggggtgcagctgggaacggaggggcggtgaggatgccggagggctgggcccctgcccggctccccaccactactcaccctgactggggaggtcaccgtctcgccaggcagagcagggacattggccggggacaagggtctccctggtttgccctgaaggtgaggtttcttctcctcctccttccagctctgcactcgggcttcctggccagggggctccggccgaagccagttgtcacaaacgtcgaggctggcagggacggccagtctcctgcggcggggtggggagggggacctggctgggaggctgggtcctgggctggctgggcgtggggtcctgtcaggcctcacgggggtcagggtgatgtggacactcccagcaaagctgcctgagaccttcctgggggcctcccccgccctcggctctgccagggcccgtggttccttgggcttcagagtcctctcagctgggcttctcctgtccacgggcttcagattcgctctccatcctgccggcccgtcctcctggccttcctggaggctggtgctcatgtcctgcgttaaggtggtgcttttaccctttgccatcggggcctctggcttcggcctggagccagccctcgtgc

SEQ ID NO: 20465 - DNA, 848 bp, Homo Sapiens
gcacgaggcttctctcctcctgctggagtgccagtccctgagctcagacccccgtccccggaactgggccacaccacgtgccctcttggcccagccttcctcccagagaggcagcctgacttacctggatggacttgggacaaaggttcctcaggaccttggacaccaccacctgctgagcttcccgtcccagccatgcagtggggcccctggggtgccctcggcagcttcagtccagcctgcatctgcccctcggccttccgacgtgggcggtgggccccagccccacagaccagcccagcattcaggctcccctggctccagccctaaggtgctctcccagccgtccgacctggatctccaagacgtagaggaagtggagatcggcagagacaccttctggcccgactccgagcccaagccggagcaggctccacgctctcctggctctcaggcccctgacgagggggcgggcggggcgctgcgcagcctcctgaggagccttccccgcagggcccggtgcagcgccggcttcgggcctgaatccagcgcggagcggccggcgggccagccgcctggggccgtcccttgcgcccagccgcggggcgcctggcgcgtgacgctcgtgcagcaagcagcggccgggcccgagggtgcgcccgagcgggctgccgagctgggagtcaacttcggtcggagccggcagggcagcgcgcgggggaccaagccgcacaggtgcgaggtctgcggcaagagtttcaagtataactcgctgctcctgaacaccagcgcatccacacgggcgagaagccctacgcctgccacgagtgcggcaagcgcttccgcgg

SEQ ID NO: 20466 - DNA, 931 bp, Homo Sapiens
gcacgaggcagaggacagttatgggatggatgggaaggttaatcagccccgtctcactgcagacatcaactggcaaggcctagaggagctacacagtgtgaatgaaaacatctatgagtacagacaaaactacagacttagtctggtggactggactaattacttgaaggatttagatagagtatttgcactgctgaagagtcactatgagcaaaataaaacaaataagactcaaactgctcaaagtgacgggttcttggttgtctctgctgagcacgctgtgtcaatggagatggcctctgctgactcagatgaagacccaaggcataaggttgggaaaacacctcatttgaccttgccagctgaccttcaaaccctgcatttgaaccgaccaacattaagtccagagagtaaacttgaatggaataacgacattccagaagttaatcatttgaattctgaacactggagaaaaaccgaaaaatggacggggcatgaagagactaatcatctggaaaccgatttcagtggcgatggcatgacagagctagagctcgggcccagccccaggctgcagcccattcgcaggcacccgaaagaacttccccagtatggtggtcctggaaaggacatttttgaagatcaactatatcttcctgtgcattccgatggaatttcagttcatcagatgttcaccatggccaccgcagaacaccgaagtaattccagcatagcggggaagatgttgaccaaggtggagaagaatcacgaaaaggagaagtcacagcacctagaaggcagcgcctcctcttcactctcctctgattagatgaaactgttaccttaccctaaacacagtatttctttttaacttttttatttgtaaactaataaaggtaatcacagccaccaacattccagctaccctggg

SEQ ID NO: 20467 - DNA, 763 bp, Homo Sapiens
gcacgaggcttctgcaagatcctggggccattatcctactccaagatcaagcatttgcgtttggatggcaatcgcatctcagaaaccagtcttccaccggatatgtatgaatgtctacgtgttgctaacgaagtcactcttaattaatatctgtatcctggaacaatattttatggttatgtttttctgtgtgtcagttttcatagtatccatattttattactgtttattacttccatgaattttaaaatctgagggaaatgttttgtaaacatttattttttttaaagaaaagatgaaaggcaggcctatttcatcacaagaacacacacatatacacgaatagacatcaaactcaatgctttatttgtaaatttagtgtttttttatttctactgtcaaatgatgtgcaaaaccttttactggttgcatggaaatcagccaagttttataatccttaaatcttaatgttcctcaaagcttggattaaatacatatggatgttactctcttgcaccaaattatcttgatacattcaaatttgtctggttaaaaaataggtggtagatattgaggccaagaatattgcaaaatacatgaagcttcatgcacttaaagaagtatttttagaataagaatttgcatacttacctagtgaaacttttctagaattatttttcactctaagtcatgtatgtttctctttgattatttgcatgttatgtttaataagctactagcaaaataaaacatagcaaatggc

SEQ ID NO: 20468 - DNA, 848 bp, Homo Sapiens
cgcggtggcggccgctctagaacccatattagaaatcccccgggctgcaggaattcggcacgagggctgagcagcggcctggtgcgctcgcttagcgggcgacggaatcagacggacgtggacgcccccggagtggaagccgaagcaggagttgttgttgctgaggggctgccgcagccgccgcgagcctccggacagacgccagagcgaggagggcgctacgcggaccctcgagatgcccctcctccaactcgtgctgaaacccgagaggagcgcatggagaggaaaagacgggaaaagattgagcggcgacagcaagaagtggagacagagcttaaaatgtgggaccctcacaatgatcccaatgctcagggggatgccttcaagactctcttcgtggcgagagtgaattatgacacaacagaatccaagctccggagagagtttgaggtgtacggacctatcaaaagaatacacatggtctacagtaagcggtcaggaaagccccgtggctatgccttcatcgagtacgaacacgagcgagacatgcactccgcttacaaacacgcagatggcaagaagattgatggcaggagggtccttgtggacgtggagaggggccgaaccgtgaagggctggaggccccggcggctaggaggaggcctcggtggtaccagaagaggaggggctgatgtgaacatccggcattcagccgcgatgacacctcccgctacgatgagaggccggcccctccccgcttccgcacagggaccgggaccgggaccgtgagcgggagcgcatagagcggagcccgggagcgagacaaggagcgagaacggcgacgctcc

SEQ ID NO: 20469 - DNA, 1339 bp, Homo Sapiens
ccagatgataattacatatttaatacgtgttgcttttaacagcaatttttaaagtaaacacatcatagaccttataacttattaaagattttatagtgcttacaaagttgattctaaaaaatataccttatttgttctaaatgaataacattatctggaagatataataataaattatagtagtatgttttccaccacgatagttaaaattgtgtacacatattcaatatgaaatcctcttaggattttcacaccttcagcctgaaaacataaaagcagattaaagtttggcatacaagatctcagtctgatagtaattgctttaaaactcaaagtgtaaaaatatctacttgacattctaggaaagcatggccacatgcacagacacattctctcactcactccaacacacacgtgtgcacacatactcacaccccagagtactcaaaagatcttgcccttgtggatcagacaactgccaccaatttcaaaaactaatggaaaaaattagctaagaatatgtttaaaccatacttaagaggtgctggttgccattaagatctttaacatgcagagaatgccatctcaatacactcttaaacagacttgaactattcactaatggatacacgaatacataagaaattatgtattcatccacccccaagactgcatgtaagatgaaaaacctaggcattccaccaacgagtcatatgactgaacccagctaaagctacagtggtttgcttcacagaacccaatagaagacagaacccaacagatttagaaacctcattgtgatctgtttggagtttcctatatgctccatgtgcaaaagcaatgagattctgtattgcagatgacagctaatatcactttgcacttttgtgacactgcaagaggtcactgtatttccaaaacatgtatttattctaattaaatcctctaatgttccttacttttaattatatatactgttccaaatttagaaccaaaacaatttaatgctgataacctcttctgctcatcacatatacttccagtaaaacctgtcaaaacagaaaattactctttgggctgtctccagtaacgcaggtttgaaaccagaagttcattttcaccctgtatcaaaacactccaaactctatgaaacaacattaaattagaaactaaccacaaattagggcactcataactcatactgctgtgattagaaaaataaaaaggcacaacagtaagctaaagagaaaataccagctccccatatgctttttgtttgtttgtttttggctttcctcttattttatttcactaagtctacaaattgttcacctcgtgc

SEQ ID NO: 20470 - DNA, 1583 bp, Homo Sapiens
gcacgagggccatccccgcggtgctgacatcccggttgttcttctgtgccgggggtcttcctgctgtcatgaaggacgtaccgggcttcctacagcagagccagagctccgggcccgggcagcccgctgtgtggcaccgtctggaggagctctacacgaagaagttgtggcatcagctgacacttcaggtgcttgattttgtgcaggatccgtgctttgcccaaggagatggtctcattaagctttatgaaaactttatcagtgaatttgaacacagggtgaatcctctgtccctcgtggaaatcattcttcacgtagttagacagatgactgatcctaatgtggctcttacttttctggaaaagactcgtgagaaggtgaaaagtagtgatgaggcagtgatcctgtgtaaaacagcaattggagctctaaaattaaacatcggggacctacaggttacaaaggaaacaattgaagatgttgaagaaatgctcaacaaccttcctggtgtgacatcggttcacagtcgtttctatgatctctccagtaaatactatcaaacaatcggaaaccacgcgtcctactacaaagatgctctgcggtttttgggctgtgttgacatcaaggatctaccagtgtctgagcagcaggagagagccttcacgctggggctagcaggacttctcggcgagggagtttttaactttggagaactcctcatgcaccctgtgctggagtccctgaggaatactgaccggcagtggctgattgacaccctctatgccttcaacagtggcaacgtagagcggttccagactctgaagactgcctggggccagcagcctgatttagcagctaatgaagcccagcttctgaggaaaattcagttgttgtgcctcatggagatgactttcacacgacctgccaatcacagacaactcacttttgaagaaattgccaaaagtgctaaaatcacagtgaatgaggtggagcttctggtgatgaaggccctttcggtggggctggtgaaaggcagtatagacgaggtggacaaacgagtccacatgacctgggtgcagccccgagtgttggatttgcaacagatcaagggaatgaaggaccgcctggagttctggtgcacggatgtgaagagcatggagatgctggtggagcaccaggcccatgacatcctcacctagggccccctggttccccgtcgtgtctcctttgactcacctgagagaggcgtttgcagccaatgaagctggctgctcagacggtcgacattgaatttgggtgggggttgggatcctgtctgaagtacagactgttcttgctctaaaaacaggactgtccctgatgggagccaggccacagggaggaggcttctttgtgggtctctcctgcagagggtgggggtctcagggtcttaggtgatacgggagagaaagaacgtgccaggcaggaggccccctgaagtctgtgtactccgaggtggatctccatccccatccacctgtacggacatcttttccgttgcggtttgagaatgttcctataataaacccctctgctttgttctt

SEQ ID NO: 20471 - DNA, 1383 bp, Homo Sapiens
cgtccgcatgatcatggtcaaatgttggatgattgactctgaatgtcggccaagattccgggagttggtgtctgaattctcccgcatggccagggacccccagcgctttgtggtcatccagaatgaggacttgggcccagccagtcccttggacagcaccttctaccgctcactgctggaggacgatgacatgggggacctggtggatgctgaggagtatctggtaccccagcagggcttcttctgtccagaccctgccccgggcgctgggggcatggtccaccacaggcaccgcagctcatctaccaggagtggcggtggggacctgacactagggctggagccctctgaagaggaggcccccaggtctccactggcaccctccgaaggggctggctccgatgtatttgatggtgacctgggaatgggggcagccaaggggctgcaaagcctccccacacatgaccccagccctctacagcggtacagtgaggaccccacagtacccctgccctctgagactgatggctacgttgcccccctgacctgcagcccccagcctgaatatgtgaaccagccagatgttcggccccagcccccttcgccccgagagggccctctgcctgctgcccgacctgctggtgccactctggaaagggccaagactctctccccagggaagaatggggtcgtcaaagacgtttttgcctttgggggtgccgtggagaaccccgagtacttgacaccccagggaggagctgcccctcagccccaccctcctcctgccttcagcccagccttcgacaacctctattactgggaccaggacccaccagagcggggggctccacccagcaccttcaaagggacacctacggcagagaacccagagtacctgggtctggacgtgccagtgtgaaccagaaggccaagtccgcagaagccctgatgtgtcctcagggagcagggaaggcctgacttctgctggcatcaagaggtgggagggccctccgaccacttccaggggaacctgccatgccaggaacctgtcctaaggaaccttccttcctgcttgagttcccagatggctggaaggggtccagcctcgttggaagaggaacagcactggggagtctttgtggattctgaggccctgcccaatgagactctagggtccagtggatgccacagcccagcttggccctttccttccagatcctgggtactgaaagccttagggaagctggcctgagaggggaagcggccctaagggagtgtctaagaacaaaagcgacccattcagagactgtccctgaaacctagtactgccccccatgaggaaggaacagcaatggtgtcagtatccaggctttgtacagagtg

SEQ ID NO: 20472 - DNA, 843 bp, Homo Sapiens
  misc_feature (38)..(57): n is a, c, g, or t
atcccccgggctgcaggaattcggcacgaggctccagnnnnnnnnnnnnnnnnnnnnggccaagcgtgcactggtttactgatcaaacctcacgtgacaggccaggaaactcctccaggcctgtggcagctgaacacagttccttggtggagaggtttactggaacatggtgtaggcagggcttatgaggaggccagccttggaggtgtcccacatgggtcttctgaaaaaaagttataccacccctccccacaaaaagaaccccacaatcaaattaagagacccactgtggcccatgatggggagagaaaagttctgcagcaattgtgggatgaaagttgttcttcccggtgaccaagcctgggcacttggggcctcagctggcctaccagtgaaggcctgagggtggtgtcttctcatctttattgctttccagggagaagggaggaatccgaacatcaaagtgggagccatcaggtctttcaaagcggaacgtgccccacatgtgcccactggaagcctgcagcgagacgtggctgctatactggaacgcaggctgctccttggataacactggttccctgcccactacccctcggcctcgcactgtctccaaggtgccagagagactgaatatcctccagtgccgctcccggagctgtaccacatcactgtcaaggttctccaaacggatacagtagcgccaccagtacacgtgggaattctgggcttccctcatgcccatgtagaaagggatgacagtgacacgtatgttctcagttgtttcccgatgaacatcggaaactccagccaggggtgattcttctcttgccggggggggcc

SEQ ID NO: 20473 - DNA, 895 bp, Homo Sapiens
gcacgagggtagcttaatttaacatagaagtagtaagattacaggaattggaaaataatcttgagttctatgtctttcgaattaatggagtgaaacttagcatctaccaaagcctgaggttttattgctaaaatattgtataacttgaaacatttctgtctgacttttcaggccttgaagacagtaccatgggaagtgttgcagacacagtggcaagggttcttcggggatgtctggaaaacatgccggaagctgattgcattcccaaagagcagctgagcacatcatttcagtgggtcaccaaatgggttgattactctaacaaatatggctttgggtaccagctctcagaccacaccgtcggtgtccttttcaacaatggtgctcacatgagcctccttccagacaaaaaaacagttcactattacgcagagcttggccaatgctcagttttcccagcaacagatgctcctgagcaatttattagtcaagtgacggtgctgaaatacttttctcattacatggaggagaacctcatggatggtggagatctgcctagtgttactgatattcgaagacctcggctctacctccttcagtggctaaaatctgataaggccctaatgatgctctttaatgatggcacctttcaggtgaatttctaccatgatcatacaaaaatcatcatctgtagccaaaatgaagaataccttctcacctacatcaatgaggataggatatctacaactttcaggctgacaactctgctgatgtctggctgttcatcagaattaaaaatcgaatggaatatgccctgaacatgctcttacaaagatgtactgaaagacttttcgaatggaccctatgggactcctcctttccactgtgagatcta

SEQ ID NO: 20474 - DNA, 1137 bp, Homo Sapiens
gcacgaggatttcaagccattcggaaccttacttcatacctactcagttctcagtccaacaggaggagaaaactttacctttcagatatataaggctgacatgacatgtagaggctttcgagaatatcatgaaaggcttcagacctttttgatgtggtttattgaaactgctagctttattgacgtggatgatgaaagatggcactactttctagtatttgagaagtataataaggatggagctacgctctttgcgaccgtaggctacatgacagtctataattactatgtgtacccagacaaaacccggccacgtgtaagtcagatgctgattttgactccatttcaaggtcaaggccatggtgctcaacttcttgaaacagttcatagatactacactgaatttcctacagttcttgatattacagcggaagatccatccaaaagctatgtgaaattacgagactttgtgcttgtgaagctttgtcaagatttgccctgtttttcccgggaaaaattaatgcaaggattcaatgaagatatggcgatagaggcacaacagaagttcaaaataaataagcaacacgctagaagggtttatgaaattcttcgactactggtaactgacatgagtgatgccgaacaatacagaagctacagactggatattaaaagaagactaattagcccatataagaaaaagcagagagatcttgctaagatgagaaaatgtctcagaccagaagaactgacaaaccagatgaaccaaatagaaataagcatgcaacatgaacagctggaagagagttttcaggaactagtggaagattaccggcgtgttattgaacgacttgctcaagagtaaagattatactgctctgtacaggaagcttgcaaattttctgtacaatgtgctgtgaaaaatctgatgactttaattttaaaatcttgtgacattttgcttatactaaaagttatctatctttagttgaatattttcttttggagagattgtatattttaaaatactgtttagagtttatgagcatatattgcatttaaagaaagataaagcttctgaaatactactgcaattgcttcccttcttaaacagtataataaatgcttagttgtgat

SEQ ID NO: 20475 - DNA, 2114 bp, Homo Sapiens
gcacgagggccaccctgttcggggaccgagtggggtcaatcttctggtgctgcctctccaggtctcttccaggccggtcatagacgtactccctctgaggccgaccgatggttagaagaggtgtctaagagcgtccgggctcagcagccccaggcctcagctgctcctctgcagccagttctccagcctcctccacccactgccatctcccagccagcatcacctttccaagggaatgcattcctcacctctcagcctgtgccagtgggtgtggtcccagccctgcaaccagcctttgtccctgcccagtcctatcctgtggccaatggaatgccctatccagcccctaatgtgcctgtggtgggcatcactccctcccatagggtggcaaacgtatttggcactgcaggccaccctcaggctgcccatccccatcagtcacccagcctggtcaggcagcagacattccctcactacgaggcaagcagtgctaccaccagtcccttctttaagcctcctgctcagcacctcaacggttctgcagctttcaatggtgtagatgatggcaggttggcctcagcagacaggcatacagaggttcctacaggcacctgcccagtggatccttttgaagcccagtgggctgcattagaaaataagtccaagcagcgtactaatccctcccctaccaaccctttctccagtgacttacagaagacgtttgaaattgaactttaagcaatcattatggctatgtatcttgtccataccagacagggagcagggggtagcggtcaaaggagcaaaacagactttgtctcctgattagtactcttttcactaatcccaaaggtcccaaggaacaagtccaggcccagagtactgtgaggggtgattttgaaagacatgggaaaaagcattcctagagaaaagctgccttgcaattaggctaaagaagtcaaggaaatgttgctttctgtactccctcttcccttacccccttacaaatctctggcaacagagaggcaaagtatctgaacaagaatctatattccaagcacatttactgaaatgtaaaacacaacaggaagcaaagcaatctccctttgtttttcaggccattcacctgcctcctgtcagtagtggcctgtattagagatcaagaagagtggtttgtgctcaggctggggaacagagaggcacgctatgctgccagaattcccaggagggcatatcagcaactgcccagcagagctatattttgggggagaagttgagcttccattttgagtaacagaataaatattatatatatcaaaagccaaaatctttatttttatgcatttagaatattttaaatagttctcagatattaagaagttgtatgagttgtaagtaatcttgccaaaggtaaaggggctagttgtaagaaattgtacataagattgatttatcattgatgcctactgaaataaaaagaggaaaggctggaagctgcagacaggatccctagcttgttttctgtcagtcattcattgtaagtagcacattgcaacaacaatcatgcttatgaccaatacagtcactaggttgtagttttttttaaataaaggaaaagcagtattgtcctggttttaaacctatgatggaattctaatgtcattattttaatggaatcaatcgaaatatgctctatagagaatatatcttttatatattgctgcagtttccttatgttaatcctttaacactaaggtaacatgacataatcataccatagaagggaacacaggttaccatattggtttgtaatatgggtcttggtgggttttgttttatcctttaaattttgttcccatgagttttgtggggatggggattctggttttattagctttgtgtgtgtcctcttcccccaaacccccttttggtgagaacatccccttgacagttgcagcctcttgacctcggataacaataagagagctcatctcatttttacttttgaacgttggccttacaatcaaatgtaagttatatatatttgtactgatgaaaatttataatctgctttaacaaaaataaatgttcatggtagaagcttttgccaaaaa

SEQ ID NO: 20476 - DNA, 2505 bp, Homo Sapiens
gcacgaggaaacatttaattgtcaaataatttcaaatttaatgtcctgctttcacattgaagggcagagcctacaaaacattgtatatttcaaaagacaaaaagaagcagcagcagtatcttgttctctaattcatagacaagttgagtgtgtttgtggtactttgggtttttaaacactttgggatactaatccctagacattgccttcactccacctttagtccttctgagcactctctcgggagttggaacattgttatccttgtaagaaatactaagcttatgttgatttttaagtaattatatcttctcttcttgctggtgggtggggcagtttggtttagtgttatactttggtctaagtatttgagttaaactgcttttttgctaatgagtgggctggttgttagcaggtttgtttttcctgctgttgattgttactagtggcattaacttttagaatttgggctggtgagattaattttttttaatatcccagctagagatatggcctttaactgacctaaagaggtgtgttgtgatttaattttttcccgttcctttttcttcagtaaacccaacaatagtctaaccttaaaaattgagttgatgtccttataggtcactacccctaaataaacctgaagcaggtgttttctcttggacatactaaaaaatacctaaaaggaagcttagatgggctgtgacacaaaaaattcaattactgtcatctaatgccagctgttaaaagtgtggccactgagcatttgattttataggaaaaaatagtatttttgagaataacatagctgtgctattgcacatctgttggaggacatcccagatttgcttatactcagtgcctgtgatattgagtttaaggatttgaggcaggggtaattattaaacatattgcttctattcttggaaaaatagaagtgtaaaatgttaataatacaaatgtcactgtgacctcctccactgagaggactggtttatgccagatcattttccggcacacacggagtggctttgacagattgataactttgtaagatgggagacatctgaaatattcatgttttccttttgtagtcccatctccactatttagaaatgttctcagactttaaaataatgcacagggcttgagctttctgtcatttgactttaaaaggaagtttcattcatatttatcctcttatgtaaaattgcggtataaagtctcatttccaaatatgttaaatgacaaaattattttataaaatgtttatgcacactttataaccttaagtttttatttgagaatgtgaaagtacaaagtgcagtagacttcaacaatcttgagtgccaagaataatacagaaaaagaagacagttgatgaatgagtttatagggttctaatcttaagatggtaaaaatgtagaaagaccttgctggttttttgggggtattcgtttcttaaacaatccaaatctaagcttagaagaaaagtttagcgttaagcacctttatcttcaggaataagcttcagcttgctcttggcaagagaagagtgcttgagttacagaaggcataagtagtttgaagaatgcagcagcctttttgtaaacttcccagatatcaaaatagactttgatatataaatggttttctgagatgacactgcctctatttctataaccatttcacctggactatctaatcagtcctatgaatgtatccctaaatgtggttattgaaaaccttaatagctgcctcatgacaagtacatgttatttaaggaggaaaaaatattaaattttgaattgagtgtgtaggctccctatcattatatatagagtttctttttccacggtagtcagtgacttaacctgaattgtaaatgtttgtaaagggttaattgtcctacatcaaacttagttaaataattccatccacttatggaggaggaggagaatgtggaagaggtaaaaagctgggcacaagttcatatgcctatgagtcagtaaagactgaagtaatgtcctatgttgagctggttattttgatatatgataataattatctttgaagtagaacaattctgttaactggaaaatcacaggatatatccatcatatttttcaggacagatagtttttactgtggggcaaataggttaaaattacactatgttagttgcatttaggttttaaagcaaagaatctgtagagaaatctatgcaatatatagtttgtccagattagctttcatttggggaatgaagttctgaaatatctaaagcagtttactcatcaattgaaaagtcctccaaaaagagaactattgggaaaccatggtgtggtggtggaaaagaaaagctccctcagttttttggagggaataacttaaaaaaatacttaaatggctaagtttacttggtgcagttaagaattaaacttgtcaattttaacattgctgttacatctgaaataaacttatgtgatgttctggtaaact

SEQ ID NO: 20477 - DNA, 1520 bp, Homo Sapiens
gcacgaggccgctgtgcccccaacccagtttggaagccgaggcaccatcactgatgctcccggctttgaccccctgcgagatgccgaggtcctgcggaaggccatgaaaggcttcgggacggatgagcaggccatcattgactgcctggggagttgctccaacaagcagcggcagcagatcctactttccttcaagacggcttacggcaaggatttgatcaaagatctgaaatctgaactgtcaggaaactttgagaagacaatcttggctctgatgaagaccccagtcctctttgacatttatgagataaaggaagccatcaagggggttggcactgatgaagcctgcctgattgagatcctcgcttcccgcagcaatgagcacatccgagaattaaacagagcctacaaagcagaattcaaaaagaccctggaagaggccattcgaagcgacacatcagggcacttccagcggctcctcatctctctctctcagggaaaccgtgatgaaagcacaaacgtggacatgtcactcgcccagagagatgcccaggagctgtatgcggccggggagaaccgcctgggaacagacgagtccaagttcaatgcggttctgtgctcccggagccgggcccacctggtagcagttttcaatgagtaccagagaatgacaggccgggacattgagaagagcatctgccgggagatgtccggggacctggaggagggcatgctggccgtggtgaaatgtctcaagaataccccagccttctttgcggagaggctcaacaaggccatgaggggggcaggaacaaaggaccggaccctgattcgcatcatggtgtctcgcagcgagaccgacctcctggacatcagatcagagtataagcggatgtacggcaagtcgctgtaccacgacatctcgggagatacttcaggggattaccggaagattctgctgaagatctgtggtggcaatgactgaacagtgactggtggctcacttctgcccacctgccggcaacaccagtgccaggaaaaggccaaaagaatgtctgtttctaacaaatccacaaatagccccgagattcaccgtcctagagcttaggcctgtcttccacccctcctgacccgtatagtgtgccacaggacctgggtcggtctagaactctctcaggatgccttttctaccccatccctcacagcctcttgctgctaaaatagatgtttcatttttctgactcatgcaatcattcccctttgcctgtggctaagacttggcttcatttcgtcatgtaattgtatatttttatttggaggcatattttcttttcttacagtcattgccagacagaggcatacaagtctgtttgctgcatacacatttctggtgagggcgactgggtgggtgaagcaccgtgtcctcgctgaggagagaaagggaggcgtgcctgatagggtagcctgtgcatctggtgagtgtgtcacgagctttgttactgccaaactcactccttttt

SEQ ID NO: 20478 - DNA, 835 bp, Homo Sapiens
  misc_feature (764)..(786): n is a, c, g, or t
gcacgagggctgtgtgagctggccctgcccctcctcattacagtatgaagggagccgtgacacgcagcattttcctgccgttctctcagggactctcagggcagctcctgccactccgccagggccagcatgccagtccaggcagagcaggtggctggctgtctggccgtctcgccccgcccctccacaggaccctggaccagggcggtgcagggcgcagccccgaggaggcaggtggaggagctgcgggttttcacagggccgcgtcgccacggctcctctgatcctttagggttggcgagcatctctggaaatagcttttgcagaggagtggtgggaggaatagagggggacagtctgtcacctccctccccgccactttgtgtagatcctacctggagggaatggctttaggcacttttgtgccagagcttgtgagggtgacagaagagggtccaggctggaaacctgaactttctgggtgggagaaccaggtggtgcctgccgaggtctgggcgtgtttgggccggtgctggagcctgtccagctggcccgggccctggcctggttctcaagtgtttcctagacagagaggcacctgggtcagtattagtctatttatcagaggtgtaaataatctatgtatagtttttctccttttagattattttgtatttgtttaaaagaagttttgtcaaaatacaaaaatataaagaaatgactgaaagttgttgacaggctttttaagaaataattattctaannnnnnnnnnnnnnnnnnnnnnnccttgtaaactagcgccaaggaactgcagcaaataaactccaactctgc

SEQ ID NO: 20479 - DNA, 831 bp, Homo Sapiens
ctccactcccgcccttggccgaagcatagattgtaacccctccactcccctctgagattggccttcggtgaggaattcagggctttccccatatcttctctcccccacctttatcgaggggtgctgctttttctccctcctcctcaagttcctttttgcaccgtcaccacccaacaccttccatgacacttccttgctttggccagaagccatcaggtaaggttggaaagagcctctgacctcccttgtttagttttggaaccatactcactcactctccaccagcctgggaaatgaatattgggtcctcagccctgccaccctctgctgtcatcagctgatgcattgtttttagctcaggttttgataaggtgaaaagaatagtcaccagggttactcagacctgccagctctcggagtccttggtggttgaacttggagaaagaccgcatgaagatacttgtaagcacacatgatccctctgaattgttttactttcctgtaactgcttttgcttttaaaaattgaagaagttttaaacagggctttcatttggtcatccttgcaatccattggggtctagtttggaatctgacaactggaacaaaaagaaccttgaatccggtgcatgccttggttttggtgctgctgctgcttcccaagatcctcagcagggattaagaaggaacccggtgtgcacagcagatccccgaaattggtgggcttgacctcctggcaaattgctgcgtctttccacttgctgttcaggaccactaaatgctgaaatgtggatgcataccgaaataaaagcaattcattgtgtactaaagg

SEQ ID NO: 20480 - DNA, 946 bp, Homo Sapiens
gcacgaggcatttcttagcgtgctcagattttatatatcaccttatcaattttttccaaaacatgatttaaagcaacatctgtcctagtataattgttgcattttaaataacaatttattgaaaaatgttaagttttaccagcctaaaaaaagtaacaaaccaattaagtgtactttgggggcagggaggagtccttgatttgaataatcaggagttttgttggtccagtttcgccttctgagcagttcttctgtatcccgggaaaagtacgctcggccccaaactggtatttgtcagacgatacatgtaaaagtttgtccttgaacgtggaacaagacttgtgtaaagtctgagacgggaactagtgatcactagctcaagaactgcaaatgagacaggaagctgttcactgtgaaacagtctcttgcttgtcgtgtatttttcgagtacttctgaagtgtgaagtaaaaaaatctggctaatttatttgtacaaatacactttgataattttttatattttcataaacttttacagatgtaaaattaaagaacttcacttgttctttggagtctgttattccattgtacgtcactacagatttttcactttatagcacagattttttaagttaagaaaacattgagaatgtatcagtttgagatgtttggtgttgaaagccaagtgtccataggttaaattacattaaagtaggtgtcacgttccaacatctagtacgatgagaaggttttgtttgtttaacatataaagcaaatttttctaatttaaatacacaaatgtaaaaatcaagtgtgtttctttagtttacttgatagagattcctgtacattgtattttatattgcggaggcttatatcactgtacatgagaacatggaacgacctaggttttgttactcgcagtagaataaacagctacaggaag

SEQ ID NO: 20481 - DNA, 1002 bp, Homo Sapiens
gcacgagggccatcaaggtgctggagaacatcgaactgaacaagaagagtatgtattcccgtgtgccagagtgccaggtcaccacatactattatgttgggtttgcatatttgatgatgcgtcgttaccaggatgccatccgggtcttcgccaacatcctcctctacatccagaggaccaagagcatgttccagaggaccacgtacaagtatgagatgattaacaagcagaatgagcagatgcatgcgctgctggccattgccctcacgatgtaccccatgcgtatcgatgagagcattcacctccagctgcgggagaaatatggggacaagatgttgcgcatgcagaaaggtgacccacaagtctatgaagaacttttcagttactcctgccccaagttcctgtcgcctgtagtgcccaactatgataatgtgcaccccaactaccacaaagagcccttcctgcagcagctgaaggtgttttctgatgaagtacagcagcaggcccagctttcaaccatccgcagcttcctgaagctctacaccaccatgcctgtggccaagctggctggcttcctggacctcacagagcaggagttccggatccagcttcttgtcttcaaacacaagatgaagaacctcgtgtggaccagcggtatctcagccctggatggtgaatttcagtcagcctcagaggttgacttctacattgataaggacatgatccacatcgcggacaccaaggtcgccaggcgttatggggatttcttcatccgtcagatccacaaatttgaggagcttaatcgaaccctgaagaagatgggacagagaccttgatgatattcacacacattcaggaacctgttttgatgtattataggcaggaagtgtttttgctaccgtgaaacctttacctagatcagccatcagcctgtcaactcagttaacaagttaaggaccgaagtgtttcaagtggatctcagtaaaggatctttggagccag

SEQ ID NO: 20482 - DNA, 1087 bp, Homo Sapiens
gcacgaggtgaaagctaagtcttagaatatgtagttgctgaacatcttatttggaataaaacagaaataaatagttgttctataatgttcttattaaggcatgattgggatcagtacctggtgccatccgatcatcccaaaggcaacttcgttccccaaggatgggtccttcccccgctccccagcaacgacatctgggcaactgctgttaagctgcattagtaaagatgctccaggagtgtggtccagccagcgctctttccagctgtaaatattagcgatggtgccatcttttgctgtagactaaactgcaacttctaaattccatgtggcattcccctaccctgaagttatgctttccttctgtgctctgtgctggccagaggtgcctcttgaatcagattaatgtggtttttcaggaaaggacttaggtgaactgaggtttttaccacaggcagtgaatgaccttggttcaccaaatttgcctctgttttgaggggcttggtccagagtgacttgttaatttactctaacttccttgtgtgttgatgggtaagtacactcaaacactgaatacaggtgtgtgatgggtagatttcacagcccttctactaatagtgagtgtgaaggcaagcttgatgcaaaacctcctgacctttcctacctgaagagccctttgacttctaggaagaaaggtcaaaaatgttatcttcagttgtgttaatcccagttttagtgcagcttaggaggctgctagttaggaagatggcagtggctgtaggctgggttgccagaaaagatggtggcctagtcttattattcagatggagaacttagaaaacctgaagagtacccaaattggattgtattttaatggacaatggctgtattttttccatgttagaaggatcctaatgaaagcacctgttatttttaagtttctaagggtctagttgttcagaatccccaaggatatttccctaacctcactcagtcacattgtaggagccagtgtagctatggaattatcttaggaactcaagcttctaaaactatccatgtagtcaaatctaggggaaaaagcaaa

SEQ ID NO: 20483 - DNA, 862 bp, Homo Sapiens
  misc_feature (488)..(496): n is a, c, g, or t
gcacgaggccgctgcgttacccggaaccgccgggccgaacagcatgacgtccgctttggagaactacatcaaccgaactgttgccgttattacatcagatgggagaatgattgtgggaacactgaaaggttttgaccagaccattaatttgattttggatgaaagccatgaacgagtattcagctcttcacagggggtagaacaagtggtactaggattatacattgtaagaggtgacaacgttgcagtcattggagaaatcgatgaagaaacagattctgcgcttgatttggggaatattcgagcagaacctttaaattctgtagcacactgaggaaaaactacatacttggacatctgtaaatctttgtacagaaactgattattctgaggatgatatatggagtttttatgagtgtgtcactggattttgactccttattgattcattgtaatatgtaaattaaaatatttctacattttattgnnnnnnnnncctttttttttgcctaaatataagtttggtagcttggtttcttttttttattaaatagtgtgaaaatataatgggcattttgaaaacttttagaaaaaagtagtactttttgatactttagtatttatggaaactagtggaaaagagaaattagtgtgctatataaatcaggcattcaagtaacagtaatacaggatatatgtgttttctttctctgatgtttagggaaaatcacagggagggtaaatctttgctggagttatctgaatcattggcatttatccgatttccactggtggaagtttgctagtgcttctaaaattgctccctaacactgagaggtgtggggtaggtaaaaatagtgtt

SEQ ID NO: 20484 - DNA, 1152 bp, Homo Sapiens
  misc_feature (768)..(786): n is a, c, g, or t
  misc_feature (895)..(909): n is a, c, g, or t
gttttccttgcttgttttttttcaaacggagaaacatcctgttttgcaaattggaccccaggctggaacttagcatctgaagttgccgcttgtgggctctgggggaaagtgtagccccggagaggtaactgaggacatgagcaaccagtgccagggagggtgggatttgccagatgccaaaatcaggggacgggtggtggtgtctgtcagacacacacaggtcgccagtgacttcacacacacctcatgtgagaaccatgccttttttagtgtgtcctatttcatacctgtacacacttcctcgttttgtaatgagatttacttacacccaaacagatcctgaaagaaagcttcaagttttctcagatgatggatatgttttcactgtattcaataactgacggatgtaaggtgcacgtttcctgatgtgacgcactgtattccagctggtgatcaagtctgggaacagccgtaacaggtcaaccttgtggagccatcgcgagttagagggtgaaagatggcagaaaaaaaagtcttgtgtgtgagtgtgttttttgagtttgcatcaatcttaatgtctcttcataatacttttataatacattaagcctcttgtctacatatttggagagaatatgactttactagcagagaaatacaatatatcttgtctactggactgtaaaatatatgtatgaaataaaattagttccatttggtcttctagtatattaaagtgctatctgacgttgttatcctgtttttgcnnnnnnnnnnnnnnnnnnngttaactactgaccattgtttctaataagcagagagatctattttagtagtaaactgaaggtttagttgtgagcttcagattttgtgaactccagatgttgtgcggtgnnnnnnnnnnnnnnnaagacaacaactaaaaaaatgcaaggaatatgtacactggaactgtagtggtagctttcagtattgtaaagagattgttctatacggacctttttgctgtttatcctgtatgtaaaaaagtcctttccagatcctatgtgaaaagaaaagtgaagcaactgaatcttcagcatgttctcatcggcggagccttcttgtgtaatgtaaactgtgccatgttattaaaaaatgtgaactaaaaaa

SEQ ID NO: 20485 - DNA, 1163 bp, Homo Sapiens
ccggagggagccagcggcggcggcagcagctacagcgaaatggcggagaccgtggctgacacccggcggctgatcaccaagccgcagaacctgaatgacgcctacggaccccccagcaacttcctcgagatcgatgtgagcaacccgcaaacggtgggggtcggccggggccgcttcaccacttacgaaatcagggtcaagacaaatcttcctattttcaagctgaaagaatctactgttagaagaagatacagtgactttgaatggctgcgaagtgaattagaaagagagagcaaggtcgtagttcccccgctccctgggaaagcgtttttgcgtcagcttccttttagaggagatgatggaatatttgatgacaattttattgaggaaagaaaacaagggctggagcagtttataaacaaggtcgctggtcatcctctggcacagaacgaacgttgtcttcacatgtttttacaagatgaaataatagataaaagctatactccatctaaaataagacatgcctgaaatttggcaagaaggggcaaaaacgtgactattaatgattgataagcaccagtgaagaagttctaacttttagcatgctgcacagaaactggtataacatgccttcagtatactaacactcatatgctcagttttgttttgttttggcagttgacaagaagttaatttgctttagtaaaaatccctcattccagcctttctatataaatagctctttcttgctgttttaatgtggtgcacactatagcctcacaaacctgttattccagtgtaatctgcagtgtcgtaactaaagttactggcttggtcttatttgcacagtttttgcgtcttgtttgcttcttgcatctgattaactagaatatttctctttcccccttttaatttgtgatgtcacttgaccccatttatgtgtaggagcactacaccattggtttccaatactgcacacataagatacatacttgtgtgcagaaagtatcttcctccaggcttgtaatacccttcacatggaagattaatgagggaaatctttatattctgtataaaaacaaaagcaaatttatatactaaaatcatttgtctaaaaatttaagttgttttcaaataaaaattaaaatgcatttctgatatgc

SEQ ID NO: 20486 - DNA, 964 bp, Homo Sapiens
gcacgaggatttaatgccctaactctcttattaaggagaaatagaaaagaagaaatttataatgaaaagaagatgaatttcattatgtaaacgctcaggcatgactacgctgtttgaaacagacagatgtttactcttccttgtaatgagtaggtttggatttaagagccgattagaggctacttcctgtaaacaagtacaggaaaatgaaactagacgggtgggggacactagaatgaaaaccagtgttagggtaaagacaaaacagactatgtacataatctgtatatgggaaaagaaagagcgaaattaccttacttaaggataataggacaagacaaattacagattgtctcagagaaaacaaatgagttactctctcggacaagctgtaggtcctacctaaatgtccagcaggacattagacagtcgtacagggtacagaataattcttcgttgtgtggcactaacccacacactgcaggacatcgttctccctggctgcatccactcagtgctgggagtagtccccagttattatgaaaccaccaataacccactgaccacagtgagaaccactgattttttccactgacctactgaatatctagcatccttagattggctcaactgttactttcctaaggagtccttctacagaataggtcagatcttggcctcccaaaccccttatttttaaaatactttgcgccttgctttgataatttgtattatgtatccaaactgaaattatctgctttctgcattagaatgtaagccccctgagggttgagtcagtctgtcttgtttgctgtgccacgcctgatgcccagcccagcagcatgctttgtacactgatatattgggtaaattttgttgaataaattaagctcaactatttgtatttcaatagttgagttgtattgcttcctgttcttcaagcttaatttgaactgcctcgtgc

SEQ ID NO: 20487 - DNA, 476 bp, Homo Sapiens
  misc_feature (390)..(422): n is a, c, g, or t
aggtaaaataagggcatatctttattttgctacaaggcagtaagtacaccgtcatatctcaaaagttcagtgctggccatcttgcatcaaatgttcttaaggcagtgactggctatcaaccacagtttctgtctccccagttgcaaacacaggatccatgcaacagttctgaaaccatacacttaaaaaccacaggggatgcggatcaaatgcaaaactcccaaattataaaacagtcaggctacactcaaaacaaaacatagaacatcaacaacacacatctcccaaaaaagaagtgcaacgcatgcttgtataaaccaacaataacaaaaaaaccacaataaaaaatgcagagtctcccaaacaagttttcaaatgtattgcagaagnnnnnnnnnnnnnnnnnnnnnnnnnnnnnnnnngtctgaaatactagtgcatagtcaattacctaacaccaagtttcttttctttct

SEQ ID NO: 20488 - DNA, 1002 bp, Homo Sapiens
cgggctgcaggaattcggcacgaggctatcctttttaaaaaagctgctttgtaccgcctcagtggagactggaatcccttacacattgatcctaactttgctagtctagcaggttttgacaagcccatattacatggattatgtacatttggattttctgccaggcgtgtgttacagcagtttgcagataatgatgtgtcaagattcaaggcaattaaggctcgttttgcaaaaccagtatatccaggacaaactctacaaactgagatgtggaaggaaggaacagaattcattttcaaaccaaggtccaagaaactggagacattgtcatttcttttgcatatgtggatcttgcaccaacatctggtacttcagctaagacaccctctgagggcgggaagcttcagagtacctttgtatttgaggaaataggacgccgcctaaaggatattgggcctgaggtggtgaagaaagtaaatgctgtatttgagtggcatataaccaaaggcggaaatattggggctaagtggactattgacctgaaaagtggttctggaaaagtgtaccaaggccctgcaaaaggtgctgctgatacaacaatcatactttcagatgaagatttcatggaggtggtcctgggcaagcttgaccctcagaaggcattctttagtggcaggctgaaggccagagggaacatcatgctgagccagaaacttcagatgattcttaaagactacccaagctctgaagggcacactacactattaataaaaatggaatcattaaatactctcttcacccaaatatgcttgattattctgcaaaagtgattagaactaagatgcaggggaaattgcttaacattttcagatatcagataactgcagattttcattttctactaatttttcatgtatcattatttttacaaggaactatatataagctagcattgataagttgaaaaggaaaattaaatcaataaaggcctttgataccttt

SEQ ID NO: 20489 - DNA, 1279 bp, Homo Sapiens
  misc_feature (555)..(588): n is a, c, g, or t
  misc_feature (1027)..(1061): n is a, c, g, or t
gcacgaggcatctggacagcaacattgagaatcaagagattgtcaccaatccgccagacatttgccaagttgtagaggtgaccactgagagcgacgagcagccggtcagcatgagcgagctctaccctctgcagatctcccccgtgtcttcctatgcagaaagcgaaacgactgatagtgtgcccagcgatgaagagagtgccgagggacggccacactggcggaagaggaatattgaaggcaaacagtacctcagcaacatggggactcgaggctcctacctgctgcccggcatggcgtccttcgtcacttccaacaaaccggacctccaggtcaccatcaaagaggagagcaatccggtgccttacaacagctcctggcccccttttcaagacctccccctttcttcctccatgaccccagcatccagcagcagtcggccagaccgggagacccgggccagcgtcatcaagaaaacatcggatatcacccaggcccgcgtcaagagctgttaagcctctgactctccgcggtggttgttggggcttcttggcnnnnnnnnnnnnnnnnnnnnnnnnnnnnnnnnnnctctctgacacctgttttagacaaatctaagggaaaaagccttgacaatagaacattgattgctgtgtccaactccagtactggagcttctctttaactcaggactccagcccattggtagacgtgtgtttctagagcctgctggatctcccagggctactcactcaagttcaaggaccaacaagggcagtggaggtgctgcattgcctgcggtcaaggccagcaaggtggagtggatgcctcagaacggacgagataatgtgaactagctggaattttttattcttgtgaatatgtacataggcagcactagcgacattgcagtctgcttctgcaccttatcttaaagcacttacagataggccttcttgtgatcttgctctatctcacagcacactcagcacccccttctctgcccattccccagcctctcttcctnnnnnnnnnnnnnnnnnnnnnnnnnnnnnnnnnnngctcttttcctacttttccttccctcaaagcttccattccacatccggaggagaagaaggaaatgaatttctctacagatgtccattttcagactgctttaaaaaaatccttctaatctgctatgcttgaatgcacgcggtacaaaggaaaagtatcatggaatatatgcaaattcccagatttgaagacaaaaatactctattctaccagagcaagc

SEQ ID NO: 20490 - DNA, 955 bp, Homo Sapiens
gcacgaggggactattaccctggaggctacgacatcgaaagtgattttcctccacccccagaagacttccccgcagctgatgagctaccaccgttaccgcccgaattcagcaatcagtttgaatccatccaccctcctagagacatgcctgccgcgggtagcttgggttcttcatcaagaaaccggcagaggttcaacttgaatcagtatttgcccaatttttatcccctcgatatgtctgaacctcaaacaaaaggcactggtgagaatagtacttgtagagaaccccatgccccttacccgccagggtatcaaagacacttcgaggcgcccgctgtcgagagcatgcccatgtctgtgtacgcctccaccgcctcctgctctgacgtgtcagcctgctgcgaagtggagtccgaggtcatgatgagtgactatgagagcggggacgacggccacttcgaagaggtgacgatcccgcccctggattcccagcagcacacggaagtctgactctcaactccccccaaagtgcctgactttagtgaacctagaggtgatgtgagtaatccgcgctgttctttgcagcagtgcttccaagctttttttggtgagccgaatgggcatggctgcgctggatcctgcgcctctggacgtgctagccatttccagtgtcccaactactgtcatcgtgaggttttcatcggctgtgccatttcccaacgtcttttgggatttacatctgtctgtgttaaaataatcaaacgaaaaatcagtcctgtgttgtcagcatgattcatgtatttatatagatttgattattttaattttcctgtctctttttttgtaaattttatgtacagatttgatttttcatagttttaactagatttccaagatatttgtgcattgtttcactgaattttagtggtgtcagtgccattatctagcaccctga

SEQ ID NO: 20491 - DNA, 2066 bp, Homo Sapiens
  misc_feature (1630)..(1690): n is a, c, g, or t
  misc_feature (1855)..(1901): n is a, c, g, or t
gcacgaggctggccctgtagacctaggaccggctcaccgggtcgcttggtggctccgtctgtctgtccgtccgcccgcgggtgccatcatggcggacgcggccagtcaggtgctcctgggctccggtctcaccatcctgtcccagccgctcatgtgggatatgagcctcttcctccaacaataggacgaaatatttttgggcggcaagtgtgtcagcttcctggtctctttagttatgctcagcacattgccagtatcgatgggaggcgcgggttgttcacaggcttaactccaagactgtgttcgggagtccttggaactgtggtccatggtaaagttttacagcattaccaggagagtgacaagggtgaggagttaggacctggaaatgtacagaaagaagtctcatcttcctttgaccacgttatcaaggagacaactcgagagatgatcgctcgttctgctgctaccctcatcacacatcccttccatgtgatcactctgagatctatggtacagttcattggcagagaatccaagtactgtggactttgtgattccataataaccatctatcgggaagagggcattctaggatttttcgcgggtcttgttcctcgccttctaggtgacatcctttctttgtggctgtgtaactcactggcctacctcgtcaatacctatgcactggacagtggggtttctaccatgaatgaaatgaagagttattctcaagctgtcacaggattttttgcgagtatgttgacctatccctttgtgcttgtctccaatcttatggctgtcaacaactgtggtcttgctggtggatgccctccttactccccaatatatacgtcttggatagactgttggtgcatgctacaaaaagaggggaatatgagccgaggaaatagcttatttttccggaaggtcccctttgggaagacttattgttgtgacctgaaaatgttaatttgaagatgtggggcagggacagtgacatttctgtagtcccagatgcacagaattatgggagagaatgttgatttctatacagtgtggcgcgcttttttaataatcatttaatcttgggaaaattcagggtttggtgtctgccttttttgttcttttttccagcacaacataacttaccactgatattccccctttagttattctgaattaggatatttttgctccaaattcttattttacttaaccagaagggaaaaaaagttgtattttcctgaagctacaggcactttgtcatgtgatttttgagtctcaatttaaggctttgtaaaatgaagagtagaattccaagaaaaatgagaaataattttgtaaaacttaacaaaatcactaaattaaactatatgggaggttatgaattactttttcttgggtagaccctaaaatgtcagtagcatgcaccagaatctgactcccattatgcttctaagcacatttcattgaccttgtctctcatacttcaagaaaaggacagtacattgctacattaccctagaaagtctgtgtgaggatctgccccttcagtctgttattgcaaagtaataaaatgtcacctacagggagcctctgagcctactctagttcaagaggctacctnnnnnnnnnnnnnnnnnnnnnnnnnnnnnnnnnnnnnnnnnnnnnnnnnnnnnnnnnnnnnaagcaagatttggaaaggaagtataatggcacttttttcctcaaaggaagttcttgttttcacataaaatatgaaaagcagatcctgcaggagtaactcctcttctttaagagccaagtatttgccagtgcttaaattacaccataccgttctaattatatatannnnnnnnnnnnnnnnnnnnnnnnnnnnnnnnnnnnnnnnnnnnnnnccgaaggtgagtagttttgcatttctgatgacagccttggaaagtatatttgtaactccatgtctggtaatgccacccaagtcgacatgggtcttaggacactgaccacctcacatgccataccctcagttaagcatgttaacatttataggaggaaaaaatcac

SEQ ID NO: 20492 - DNA, 1163 bp, Homo Sapiens
  misc_feature (148)..(158): n is a, c, g, or t
  misc_feature (163)..(181): n is a, c, g, or t
ctgaaaatcagccttttaatctatttgaacccaacgagtggggaaagaactaaaacatttttttcccttcaaattttgattataagaataacgggtcaaaggtgtctcttccataggaaactgacatcccctatgtcctcagagttgnnnnnnnnnnncttcnnnnnnnnnnnnnnnnnnntttcaactcatgggcatgccacacatttccatccccaccccaccctgccccaccctctacaggcacacatattcacacaccaaagggactccttcctgtaactggggaacagaatgtaaaaaaatccatccaagtggccaccgataccagaaataaccaaatgcatttacactcacaacatcagtcaactcacatgcacaaggagaagcgtctccaatcggagcttagagccaaaaattacaaatggcagagacttgagctatccataagataattttaaaaatccttccactggacactccccttcattacaaaagtatgcaaacaatcttgctataaatggaaaacaggcgtgtggctctctccctgggacatgagggcatagctaaaattccctgggtggaattaatgcctggaccattgctcctccctttcaggacaaaagggaaaggatgaagaggagcagcagggtagggacccacctcaggagcaggtggggcaccctggagctgcctcaggggctgggaacgtgttggcatgtgaccagctgatggaggagcacagtgtcaagtgggccacgatggctgtagagaaacccaagtgctctgcacccgtagggagtccagaaggtagaggtccacggacaggacaggcctggcctgctttgcttcctccacctaaggccttgggaccgatggcgtccgtctgagaggctgcatgattattttagggttgcaggaaggatgcttcccatctggacgtaagtgcacaaaccatgtctatctggatctcaaaagatgacttcccctttacacaacccccactccctgccactgcagatcccagcagagtggtgggagatcttggcagtgggaaccagaatgctgttgccacacagcacacaggctgaggcacattggtggagggttcagaggaacgaggagaagagaggaagaggaatctgtgacccgcctcctcgtgc

SEQ ID NO: 20493 - DNA, 1093 bp, Homo Sapiens
  misc_feature (892)..(909): n is a, c, g, or t
gggctgcaggaattcggcacgagggtttcttgtaaagctaaactttatgagaaaagtgtacctactctataaaggtaataaatgtaaaacctcttgctgttattgaggaagctcttcaactaccctaaatttcacaaatgtaacttataacactatgaaaagatttgaccaacaatttacgtttgctgtgtgctttagtttttgtttaagcatattcttttgcttgaatttctgtgttcatgagagttagggtgttttatgcttcttgaactaattttataacatatttaatatattaccagttaagatataaaatcatttgtacatagcgaattgtaaagcagctattaaagtaggtgaaataaagtatatatttgccggttatccatatcttttagaagtcctgacagaacaaccagtttatttgcacataggtagcttctgtttgaaggaaggtaaagttataaggaaactcaaatactataagatgtgtcaaggtatttctccagaattaattgcaaagctagtgctgaaggattttaatcagcttctaaaattttcttctcaataagacatatgttttgattacttagggaagattcctcatttttatttgccctttatgcatttaatccacatgataggacattaaaaattaatataaagaaaaatcgtgctcatactgtacatctatttctgtgcttggaactacttgttaatagtttttatcgaagctgtcagcaataagggacataaaactgctgtattatacattgtggaattgaataaacagcctaatatttctttctctagtatagggtacttaagcatttccacttttggaagaaaagtgtattagtattttatattgcatttcatttaaaaggacagnnnnnnnnnnnnnnnnnngtaaatccattcattgaaatggtttctaaactgtataatgtaatttggagcctatttagtaatagaattaaatgtcctatgtagtgctacaatttttgaattagaaagtgatcaaatgtaagaaaaaaatttaaaaattcagcccagaaaacaaaatagtgtattaaattagtttaatgtaaaa

SEQ ID NO: 20494 - DNA, 683 bp, Homo Sapiens
gcacgaggcacaacttacttcctgtccagctccaacctgcaaagatctgtcctcagccttgccagagatccaaaagaagcccccagctaagaacctggaacttggggagttaagacctggcagctctggacagccccaccctggtgggccaacaaagaacactaactatgcatggtgccccaggaccagctcaggacagatgccacacaaggatagatgctggcccagggcccagagcccagctccaaggggaatcagaactcaaatggggccagatccagcctggggtctggagttgatctggaacccagactcagacattggcacctaatccaggcagatccaggactatatttgggcctgctccagacctgatcctggaggcccagttcaccctgatttaggagaagccaggaatttcccaggaccctgaaggggccatgatggcaacagatctggaacctcagcctggccagacacaggccctccctgttccccagagaaaggggagcccactgtcctgggcctgcagaatttgggttctgcctgccagctgcactgatgctgcccctcatctctctgcccaacccttccctcaccttggcaccagacacccaggacttatttaaactctgttgcaagtgcaataaatctgacccagtgcccccactgaccagaactag

SEQ ID NO: 20495 - DNA, 886 bp, Homo Sapiens
  misc_feature (235)..(256): n is a, c, g, or t
  misc_feature (634)..(646): n is a, c, g, or t
gcgatatagaatcttagctttttatttgtaggaaaaaataaacagatttccctccccaacaaggcgtcacaagaaatgaggcaataaagggaaaaatgcaaatcctaaagtcatctagtgcctttctcataattctaaacaaagaaaaagtgctctcaggttttgaaatcttcacatacactacagatgggcaaaaaagctacagacatctcagtttacaagtttcaagttcttnnnnnnnnnnnnnnnnnnnnnncctttcctccagggaaagcccatgagatcaattatcgaattgaattatacaattccacttcaactagtctaacattgatgtgctttgccaaaaaccttgaaaaatagaattaactggtttttacagaaccatagcagccaattatttagaaacaccacctgtcctttatattagagtacctgccccagttgtctttgtaatagtctgaagcaacacactgttcatggtaaacactctattttagtagataaatatatgaggactaatcgaaaagtctcttcaagaagaaaatatcttagtcctttgtatatcaaatcagaatctaataggtaaaataatatacattattttcaaatatacaaattatgtgctaaagtnnnnnnnnnnnnntgtcctttagttcaagccaaacttctgttggtgccacttcagtgggcacgtgtgctaggagatgggtcctccatgccgagagtcactcctgccggcttctagcaatgccgtattttctcctgcatctcctttaaagctgggatcacactgtggctcagattcagcaggggaggctgatggtggactgctgtcatcacttccgtcatcatctggtaaagctagactcaatttgcagctgga

SEQ ID NO: 20496 - DNA, 910 bp, Homo Sapiens
ctcagcgcggatcgctgctccctctcgccatggcgcaggtgctgatcgtgggcgccgggatgacaggaagcttgtgcgctgcgctgctgaggaggcagacgtccggtcccttgtaccttgctgtgtgggacaaggctgaggactcagggggaagaatgactacagcctgcagtcctcataatcctcagtgcacagctgacttgggtgctcagtacatcacctgcactcctcattatgccaaaaaacaccaacgtttttatgatgaactgttagcctatggcgttttgaggcctctaagctcgcctattgaaggaatggtgatgaaagaaggagactgtaactttgtggcacctcaaggaatttcttcaattattaagcattacttgaaagaatcaggtgcagaagtctacttcagacatcgtgtgacacagatcaacctaagagatgacaaatgggaagtatccaaacaaacaggctcccctgagcagtttgatcttattgttctcacaatgccagttcctgagattctgcagcttcaaggtgacatcaccaccttaattagtgaatgccaaaggcagcaactggaggctgtgagctactcctctcgatatgctctgggcctcttttatgaagctggtacgaagattgatgtcccttgggctgggcagtacatcaccagtaatccctgcatacgcttcgtctccattgataataagaagcgcaatatagagtcatcagaaattgggccttccctcgtgattcacaccactgtcccatttggagttacatacttggaacacagcattgaggatgtgcaagagttagtcttccagcagctggaaaacattttgccgggtttgcctcaaccaattgctaccaaatgccaaaaatggagacattcacagatttt

SEQ ID NO: 20497 - DNA, 1289 bp, Homo Sapiens
  misc_feature (1119)..(1127): n is a, c, g, or t
gcacgaggcttaatactacaattgctggtgtggaagaggcagatgttgttcttctggttggtacaaacccacgttttgaggcaccactgtttaatgctaggattcgaaagagctggctgcataatgacttaaaagtggcccttataggcagtccagtggacctcacttacacatatgaccacctgggagactcccccaaaattcttcaagacattgcttcgggaagccatccatttagccaggtcctaaaggaagctaaaaaaccaatggtggttttaggcagttctgcactccaaagaaatgatggagcagcaattcttgcagctgtttctagcattgcacaaaagattcggatgactagtggtgttactggtgattggaaagttatgaatatccttcataggattgcaagtcaagtagctgctttggaccttggctataagcctggggtggaagcaattcggaagaaccctcccaaggtgctgtttctcctgggagcagatggaggttgtatcacacgacaggatttgccaaaggattgtttcattatttatcaaggacatcatggtgatgttggggctcccatagctgatgttattctcccaggagctgcttacacagagaagtctgctacatatgtcaacactgagggtagagctcagcagactaaggtagcagtgacacctcctggcttggcaagagaagactggaaaattataagagcactctctgagattgctggaatgactcttccatatgatactctggatcaagtaaggaacagattggaagaagtctctcctaatcttgttcgatatgatgatattgaaggggctaattacttccagcaagcaaatgagctctcaaagctagtgaaccagcagcttcttgctgacccacttgttccacctcagctaactataaaagacttctacatgacagattcaattagcagagcctcacagacaatggccaaatgtgtcaaagctgtcacagagggtgcccaggcagtagaggaaccatccatatgctgaagcttctactaggatcccagttttgccgcagataattaatggacaactgtagtgcagtgatcctttacaggtttatttctttgtnnnnnnnnntaataataatttgaatcatgtaatatttaaggttatactatgcctatttgaaaatgatattagttatcaactttgcagtttgaaaaacatgtattgtgtgtaaaggttaaataacaaaactatgcagatgctcttaaaagcattgataacctttgtgacgaa

SEQ ID NO: 20498 - DNA, 1753 bp, Homo Sapiens
gtccgggactacgccatgttggggtttgtgggtcgggtggccgctgctccggcctccggggccttgcggagactcaccccttcagcgtcgctgcccccagctcagctcttactgcgggccgctccgacggcggtccatcctgtcagggactatgcggcgcaaacatctccttcgccaaaagcaggcgccgccaccgggcgcatcgtggcggtcattggcgcagtggtggacgtccagtttgatgagggactaccaccaattctaaatgccctggaagtgcaaggcagggagaccagactggttttggaggtggcccagcatttgggtgagagcacagtaaggactattgctatggatggtacagaaggcttggttagaggccagaaagtactggattctggtgcaccaatcaaaattcctgttggtcctgagactttgggcagaatcatgaatgtcattggagaacctattgatgaaagaggtcccatcaaaaccaaacaatttgctcccattcatgctgaggctccagagttcatggaaatgagtgttgagcaggaaattctggtgactggtatcaaggttgtcgatctgctagctccctatgccaagggtggcaaaattgggctttttggtggtgctggagttggcaagactgtactgatcatggagttaatcaacaatgtcgccaaagcccatggtggttactctgtgtttgctggtgttggtgagaggacccgtgaaggcaatgatttataccatgaaatgattgaatctggtgttatcaacttaaaagatgccacctctaaggtagcgctggtatatggtcaaatgaatgaaccacctggtgctcgtgcccgggtagctctgactgggctgactgtggctgaatacttcagagaccaagaaggtcaagatgtactgctatttattgataacatctttcgcttcacccaggctggttcagaggtgtctgcattattgggccgaatcccttctgctgtgggctatcagcctaccctggccactgacatgggtactatgcaggaaagaattaccactaccaagaagggatctatcacctctgtacaggctatctatgtgcctgctgatgacttgactgaccctgcccctgctactacgtttgcccatttggatgctaccactgtactgtcgcgtgccattgctgagctgggcatctatccagctgtggatcctctagactccacctctcgtatcatggatcccaacattgttggcagtgagcattacgatgttgcccgtggggtgcaaaagatcctgcaggactacaaatccctccaggatatcattgccatcctgggtatggatgaactttctgaggaagacaagttgaccgtgtcccgtgcacggaaaatacagcgtttcttgtctcagccattccaggttgctgaggtcttcacaggtcatatggggaagctggtacccctgaaggagaccatcaaaggattccagcagattttggcaggtgaatatgaccatctcccagaacaggccttctatatggtgggacccattgaagaagctgtggcaaaagctgataagctggctgaagagcattcatcgtgaggggtctttgtcctctgtactgtctctctccttgcccctaacccaaaaagcttcatttttctgtgtaggctgcacaagagccttgattgaagatatattctttctgaacagtatttaaggtttccaataaaatgtacacccctcagaa

SEQ ID NO: 20499 - DNA, 1113 bp, Homo Sapiens
  misc_feature (928)..(947): n is a, c, g, or t
tctggcattggagtctcccaggtgctgtccacatacatgaagaatctggacataagtcgtccagacaagaagagcaagaagcaacaggattccacctaccctattaagaatgaagtggcaagtgggatgatactggtcatggctttctttctcatcacctacacctttcattcaacctgggtgaccagtgaggcctactcttctccgtccattgtactatctgcccgtggtggggatggcagtaggatcatatttgatgacttccgagaagcatattattggcttcgtcataatactccagaggatgcgaaggtcatgtcctggtgggattatggctatcagattacagctatggcaaaccgaacaattttagtggacaataacacatggaataatacccatatttctcgagtagggcaggcaatggcgtccacagaggaaaaagcctatgagatcatgagggagctcgatgtcagctatgtgctggtcatttttggaggcctcactgggtattcctctgatgatatcaacaagtttctttggatggtccggattggagggagcacagatacaggcaaacatatcaaggagaatgactattatactccaactggggagttccgtgtggaccgtgaaggttctccagtgctgctcaactgcctcatgtacaagatgtgttactatcgctttggacaggtttacacagaagccaagcgtcctccaggctttgaccgtgtccgaaatgctgagattgggaataaagactttgagcttgatgtcctggaggaagcatataccacagaacattggctggtcaggatatacaaggtaaaggacctggataatcgaggcttgtcaaggacataaatgtcacgtccagctctgatatgcttcgcactgagcacatcacatttaggacgttgaagannnnnnnnnnnnnnnnnnnnaatatgcagtttgtaagaacaaaactggatggcatcagaattgtctggaagttttgtcttgggcagtatgggctgggccaaatgaaatgatttttataattctaaacaggttaccaaatgaaatgtcatggctttactttggtcaattaaaggggggaattttttt

SEQ ID NO: 20500 - DNA, 1011 bp, Homo Sapiens
  misc_feature (271)..(280): n is a, c, g, or t
gcacgaggcgaatgcaatggaggccgcggcacctgccactactacgccaacaagtacagcttctggctgaccaccattcccgagcagagcttccagggctcgccctccgccgacacgctcaaggccggcctcatccgcacacacatcagccgctgccaggtgtgcatgaagaacctgtgagccggcgcgtgccaggaagggccattttggtgcttattcttaacttattacctcaggtgccaacccaaaaattggctttatttttttcttnnnnnnnnnngtctaccaaaggaatttgcatccagcagcagcacttagacctgccagccactgtcaccgagcgggtgcaagcactcggggtccctggagggcaagccctgcccacagaaagccaggagcagccctggcccccatcagccctgctagacgcaccgcctgaaggcacagctaaccacttcgcacacacccatgtaaccactgcactttccaatgccacagacaactcacattgttcaactcccttctcggggtgggacagacgagacaacagcacacaggcagccagccgtggccagaggctcgaggggctcaggggctcaggcacccgtccccacacgagggccccgtgggtgggcctggccctgctttctacgccaatgttatgccagctccatgttctcccaaataccgttgatgtgaattattttaaaggcaaaaccgtgctctttattttagaaaacactgataatcacactgcggtaggtcattcttttgccacatccctatagaccactgggtttggcaaaactcaggcagaagtggagacccttctagacatcactgtcagccttgctacttgaaggtacaccccatagggtcggaggtgctgtccccactgccccacgttgtccctgagatttaacccctccactgctgggggtgagctgtactcttctgactgccccctcctgtgtaacgactacaaaataaaacttggttctgaatattttt

SEQ ID NO: 20501 - DNA, 487 bp, Homo Sapiens
  misc_feature (140)..(169): n is a, c, g, or t
ttcggcacgaggacctcctttaaaaagattttaaatcgaggtttatttattgctaaaattgcgggaagttattaagtcctttaaagtctttccatgtaaattatattttaattttataattggtattaggaataaagtgnnnnnnnnnnnnnnnnnnnnnnnnnnnnnnaggagttaacagagcagtttcataaagttgaatctcaactgaataagctaaatcatctcctcactgatattcttgctgatgtgaagacaaaaagaaaaactttggcaaataataaattacatcaaatggaaagagaattctatgtatattttttaaaagatgaagattatctgaaagatattgtggagaatttagaaactcaatcaaagattaaggctgttagtcttgaagattgaaaattactgaaaactgaatctttattacgtgtcctcttttatttattagaagactgtgtataataaacactactaaattttt

SEQ ID NO: 20502 - DNA, 692 bp, Homo Sapiens
gcacgaggcccagatgagataaaagagttgtgtcagtctgtgatgcctgctggtgttgataaaatctccactgctcagaaatatgttctagcaagacggcgcttggtgaaggtgatcaacaatcgagctaaactgctttccctttgttcttttatcatagagacctgcctatttattctttggcgccatctggagtactacttgttacattgcatgcccacggattctcaagattccttatttgcctcgagaaccttgtttaaaagcagaagactgcaagattccttcgcctcagaaaccaatctagattttagaagtgggctggctatagtgagccaacatgatttagaccagcttcaggctgatgcaatcaacgcttttggagaatcactacaaaagaaacttctggacattgaaggattatattcaaaagttcgatctcgatatagtttcatacaggctcttgtcagacgtatccgtggcctcttgaggatatcaaggaactgagagcccgtgcttatgctcttctatgagagagatgaattggggagaattgtctccattttatagattagtttctttctaaattatgaccaaaaatattttgctatttctttctttgtatatggacatcttttctgtaaacttcttcccctagttccatcctcactagtaaaaaataaatacttttt

SEQ ID NO: 20503 - DNA, 886 bp, Homo Sapiens
gcacgaggactgccgaagctgagactgactactgtgcattaggaaagacctggagtcaggactttggtgggatttggagctccgaggcagtaataactgaacaagcagccctgtcccctaggctgcagaagcttgaatgcatcctctcccagaacctgccacaggaaactgggggctttgtcaggtcagcccaactgcatgcaaaagaccaccatcctcagaagccaagttgtcttttatgaagaggcaaggaaaggggaaacccacatgtgaccctgattttggtatggcttgatagagttccctgaaaactccttgtatgtgtgctaaaaccagggaagcatgtgactgccaagcaggcaacccctgatgatttgtaaagccaggtggcagggccttggggagccccagcacaatgatattgtgtggtcttccctcctgtggaatcgaggggaaattattcttcccaataccttgatttgattttcagtttcataagcttcttcctctgaatcttattgagggactatggtaccaagcaggtaggactgttcacctggtggaacagttcttgctctgccttctaggcttcatcccagaaatccagcctctttctggagaccccaaagctggagggagatgggctttcctctgggcctctctcctactttgccatccacactgctcctggctaaccccagcaataaccaacaaatggtaggaagccccatctattgctttttctcaattatgactgcatagtttgtggaaacaaagatcttgaggaagatgagggaagccctcccctcttcatagtcccctctcttctcctttgtacctgtcacaccagagttcagtgtttaaacagacaaatataaagtattga

SEQ ID NO: 20504 - DNA, 839 bp, Homo Sapiens
gcacgagggtggcattgaggggcatccctcctagaacctccaggaaaagctcgcggaagacgaggttctgcggagagagaggctccaagcagtctgggaagtgtagtccagttggcttagcagtagtttcgttgggggggagccgaggttccgggaaggggctaggccggcttgaaaagagattatgactgtaccttttaactttgtagctggaacacaagaagtgtttgtttaatgaatgacgtacacatttaagatctgtttggacgcggaggataatcctgtgaattgctaatagttcactgggtttggcccttagtgttgacttcagtatgctgagacggaaaccaacacgcctagagctaaagcttgatgacattgaagagtttgagaacattcgaaaggacctggagacccgtaagaaacagaaggaagatgtggaagttgtaggaggcagtgatggagaaggagccattgggcttagcagtgatcccaagagccgggaacaaatgatcaatgatcggattggttataaaccccaacccaagcccaataatcgttcatctcaatttggaagtcttgaattttagagatggattatcttgcatgccagagcgctggaatggaataaaatgatggcagaagtacaaaccagatttagagaattgagtgcttgcagtcaagcagaatgtacctcctgcagagacaaatcttctgcatgagattactgatgcttcacttgcactctaagctggaatccaaactctggtttgtctcttgaaaatttgactctataaactgatctgattttctgtttttaaaaataaatatatttttgg

SEQ ID NO: 20505 - DNA, 1335 bp, Homo Sapiens
gcacgagggcggcattgggggaggggacgggggtcgcggggctattgggggtcccagtccggcttaagacctctgggcgtggtgggcaccggccttcgccgtcggagcaggggtcccagactcgcacccaaaagttcccgtcgggcccgagcggggaggagctgcggggcgggcagaggcggagatggcggagggcggtgggacgtgatgcgcgggtcagagccgggccttgagaaggaactggaggcccctggcagcggtgtcccctcgaggacccctctgccgggctcaccaggtggctggcggagagccggagagttgggcgggagggaagcagggtttggcgaccaggtttagcaggccttggaatcctggagcccagcccccaaccccattcccacttggccggatggttaagggcctagcgtgctggctgcggtgtggccaccttccccttctccgactccgtatctctttttccagggtccggctttgctggcccagcaagcctgataagcatgaagctcttatctttggtggctgtggtcgggtgtttgctggtgcccccagctgaagccaacaagagttctgaagatatccggtgcaaatgcatctgtccaccttatagaaacatcagtgggcacatttacaaccagaatgtatcccagaaggactgcaactgcctgcacgtggtggagcccatgccagtgcctggccatgacgtggaggcctactgcctgctgtgcgagtgcaggtacgaggagcgcagcaccaccaccatcaaggtcatcattgtcatctacctgtccgtggtgggtgccctgttgctctacatggccttcctgatgctggtggaccctctgatccgaaagccggatgcatacactgagcaactgcacaatgaggaggagaatgaggatgctcgctctatggcagcagctgctgcatccctcgggggaccccgagcaaacacagtcctggagcgtgtggaaggtgcccagcagcggtggaagctgcaggtgcaggagcagcggaagacagtcttcgatcggcacaagatgctcagctagatgggctggtgtggttgggtcaaggccccaacaccatggctgccagcttccaggctggacaaagcagggggctacttctcccttccctcggttccagtcttccctttaaaagcctgtggcatttttcctccttctccctaactttagaaatgttgtacttggctattttgattagggaagagggatgtggtctctgatctccgttgtcttcttgggtctttggggttgaagggagggggaaggcaggccacaaagggaatggaga

SEQ ID NO: 20506 - DNA, 1209 bp, Homo Sapiens
atcccccgggctgcaggaattcggcacgaggttaaagcctcctttttctactcatttttgaaagcaaaattacattttactattttacataaccagtgaaaagacgttgaaagcctacagctcactgtttttggtgctctggaaatgttgagggtgggtttttaaccagtgatttttaacgtgcagtgaatttgttagacttttaaacaccagctaaggtagtcaaacttgatccccattaaaaatcaaggaattaggggtcgggggagggtttaggagtgatccagaatgacctcccagaattactgtgcgtacaactttatttttcagagttttcattggaatggtaagagttttatgaaagacagttttaaaacttattctgagttaaatattaatactttaaaaaattattgtactagacttatcgcagccttttgaaagtagcagagtttcatcataccacatatataacagagcataaattttctataatcaggcaccttttgctgcttttgagtaagactgttttcctgtttaagtgttaagcatcgccagacataaaaatctattctctcctctcgattgtagcatagcctgacagctctagatacagcatttctatgatgaaaaatgagtatccatcaggaaatctagaagactagccgtgttttctcagactccacctttgtttgcactctgttgcctgtgaggagctttctggcatgtgattatttacttcaaaactagagttccaagcacctacattaattattttatattgtgtgcagaatagtatatcttttaatgtcagatatgatacactgcacatattgcttttgcactcttaaaatttttgtactaaataatagaaaatatttatattctttgagtgtgagctttgaatagatggcattatcactttattgtttttttaacaaaaactttttctcaattattctattgcaatgttattctgagcaagtcctatgccaaatatcttgtataatgtttgtatggaagattaaattttactcttgtgtggtaagactatttcagttactgattttatagttggaatttgatattccagcacaaagtccacagtgtattcagaaatccaagttggtgtcatacatttcattttgatgtgaacttttctttgctttcctttgttctaagactccattttgcaataaaccctcgtgc

SEQ ID NO: 20507 - DNA, 1019 bp, Homo Sapiens
  misc_feature (32)..(45): n is a, c, g, or t
atcccccgggctgcaggaattcggcacgaggnnnnnnnnnnnnnngcacacaattatgattttatttgttaagttacaatagccaaaagagctttacaaaaggcaaaataaactacacatccattttagaaaagtcctttttatttctttaaatcagaggccccctctagcgtttgaaagcagtcacaggcaacacacaatgcaattgaaagtaaacagtcacagcattttaccgcagaccttccaaaacataaggcttgcttctgttccattcaagtggcacaaaaatcaatgagagaaaaatagctaaccataattaatattgcaaattcctgctatgattcagattcattatcctctcattcagtaatttctttattatttactgctgggttattttttactagattaatactctgttaataaggaaaaaatatataataaatatagggactttaatttccctaataagaaatatacctcatttgaaatgaccgaaaattaatgttaccatatatcctactctgctttgatggaagttattggtaacttcctaaagtatatacttaattttaactttattatatttggaaatcagaactttttaaagtacatatattttgaaattcaacctaatctgtgactttgctaaaactttttcagtactcagtaaaaggaggtgggaaacgttgctttgaggacaaatgttggctctgaagaatatgatataaaggaacgcttaagagtttttatacagacagggcactgcataaatccaatgagtgaatctcgtgcgcttttgaaaacgattgattgaaattagcgggagtaaaaaatagttgattttcactctattttttcagctaatgtctttatgtgtctgtttccatgttctattacagagggtttaagctgacagctagtattactataactggaaaataaaaagaaatctctaattttaacaaaagaaaacaatgcaaacttgaggaagaaaccaacagagaaaaccctcgtgc

SEQ ID NO: 20508 - DNA, 1156 bp, Homo Sapiens
gcacgaggcagaccttcgacgacgaggagagactcctggcccaccagaagaagcacgatgtctgagacggtgggcggggccgtgttggctgagagagggctggggtccttcgtggtgggagtcgcagtgggctgggggtgcctgcctagtgctggagtaggggacaatgggaatcctagaggggatggaagacgcggggagtgagctgggtgggccctgctagcgagagaggtcaaccccggtggccagggaacccacttccaagcgcagggacgccggcctccagctggtgtgtgctaaggctccgtcctgactgccctgtgccctggaaaagcagcaatagcatccgccccttagagccctctggctagaggagccaccagtggaaaggaagaccctccatcctctggtattaacgccttaatgcccctgtcttttactgtaagttacttaagatcatttttggaagcaggcgtggtagagtcctgtaaatgaatgctctgggctagatacagcttggagaacctgctggccttgttagacagcacttgggcctttgccagcagcaagaggtgaagcgaagccactcttacctctcccttcccctcccacctgccccctgcgtaggcacccagacttggagagacccgtctgctgttaatacttccatcctcttccttcccaaagagcagatcccaaggcatttactccttggtctgtctcgctttatctgtcgcccctcccagcgctgagagcctcccctggctgtcagcagcactgtgtccaggctcttgtctgaacaccgcagcccctccttcgctccttccagagctcagcatgtcacggcaaggactgccgcattggtgatggagggccagctgaggggaagttgctggtgagtttccttttctccatttctagcatatggacacctggcctctgcttgagcacttaggtgacaggaacttccgcacctcctgaggccctggatgattctaattgttagaaattctaattgttagaaatccttccttataatgaatgaattctgctttcctataatttctacctattgggccttgttctgttctctggaactaaacagaacaaccatttacccctccttttcaactagagaataaagatttggttttag

SEQ ID NO: 20509 - DNA, 1017 bp, Homo Sapiens
gcacgaggctgcatttcattggaaatgtcatttttccaaagtttctagctatatactctctttccttcaaataacataagtctgaaagcaatgaaaacgtcaaaggaaaatgtttatatacatccacatgtttatttaatatgtttctcttaacacctgaaacttgttttaaaacaaaaagcagtattcacttcaaatcataaacttagaattctgtatctcatgtcagaaatatgtttatggccttgcttttaagtggtgctgtttcccatagggcattagttctcagattttggaatgtgaaataatcacctaggaagttggtttaaaatgcacactagtgagcccaccttagacttcttttggggccttcgacctcactttgagaaataccttcttcaggttattctttatgtttgtcctgtggttaaatattagagtattcatgataaaacattttgagaaggggtaagcagtgagttattacccacaatttaaagcaaattttgaatgaatctttaagttaggtatctaccttcccaccagccccccaaaaaacctctcagtagtttctttcagtgtacaaaatgatgagcatttttctatgatgaggttttaaccattattcagggtggtcttttgtttttaaatctttttttaactaataagatttacggtgtgtattttatacagaaatgcattataaatgtttttaattgtgttctgttttttgcagtctttaagtgccatgccaattgttcttatattctatagaagttcgctcaaaatactcaacaggggaataggcagcggacagtcagaatggttggaattttggctttctaagaaaaactttattttgcataagcatgtggtcagatcattttgtgcatatgcagcctggattggatgttaagtaaatgcttgttcagtgccggtacatttacttaaatctgtttttatttttgtcatgtagaatactactgtggtcatcataatgtaatctatttctgtacc

SEQ ID NO: 20510 - DNA, 950 bp, Homo Sapiens
gcacgaggctgacatggaggatgatttcatgtgcgatgatgaggaggactacgacctggaatactctgaagatagtaactccgagccaaatgtggatttggaaaatcagtactataattccaaagcattaaaagaagatgacccaaaagcggcattaagcagtttccaaaaggttttggaacttgaaggtgaaaaaggagaatggggatttaaagcactgaaacaaatgattaagattaacttcaagttgacaaactttccagaaatgatgaatagatataagcagctattgacctatattcggagtgcagtcacaagaaattattctgaaaaatccattaattctattcttgattatatctctacttctaaacagaattctgattttttatgtcagatggatttactgcaggaattctatgaaacaacactggaagctttgaaagatgctaagaatgatagactgtggtttaagacaaacacaaagcttggaaaattatatttagaacgagaggaatatggaaagcttcaaaaaattttacgccagttacatcagtcgtgccagactgatgatggagaagatgatctgaaaaaaggtacacagttattagaaatatatgctttggaaattcaaatgtacacagcacagaaaaataacaaaaaacttaaagcactctatgaacagtcacttcacatcaagtctgccatccctcatccactgattatgggagttatcagagaatgtggtggtaaaatgcacttgagggaaggtgaatttgaaaaggcacacactgatttttttgaagccttcaagaattatgatgaatctggaagtccaagacgaaccacttgcttaaaatatttggtcttagcaaatatgcttatgaaatcgggaataaatccatttgactcacaggaggcccagccgtacaaaatgatccagaaattta

SEQ ID NO: 20511 - DNA, 888 bp, Homo Sapiens
gcacgaggactccttaaaagatgcaatatcctacatgcagatatcaagccagacaatatcctggttaatgaatccaaaactattttaaagctttgcgattttgggtcggcttcacatgttgcggataatgacataacaccttatcttgtcagtagattttatcgtgctcctgaaatcattataggtaaaagctatgactatggtatagatatgtggtctgtaggttgcaccttatacgaactctatactggaaaaattttattccctggcaaaaccaataaccatatgctgaagcttgcaatggatctcaaaggaaagatgccaaataagatgattcgaaaaggtgtgttcaaagatcagcattttgatcaaaatctcaacttcatgtacatagaagttgataaagtaacagagagggagaaagttactgttatgagcaccattaatccaactaaggacctgttggctgacttgattgggtgccagagacttcctgaagaccaacgtaagaaagtacaccagctaaaggacttgttggaccagattctgatgttggacccagctaaacgaattagcatcaaccaggccctacagcacgccttcatccaggaaaaaatttaaacaagatgaagaaactccaagggtttgagtaaatacaaagactgaagaaatttcacagcagtttattaatgtgtgtgtgtgcaggccacagcagcatgcccttggtgtagtcagtgccgaaaggggtctgtttcttcttgagcctgcctgcagggatggtctccttttaaagcaggttgtgtgcagcattcagtacactgaaaggcataaacctcccactctggaacaaagcagctgctttttaaaagcgagaaaagggaaacgggg

SEQ ID NO: 20512 - DNA, 778 bp, Homo Sapiens
gcacgaggggaaaggacaacttcaccctgattccggagggcaccaatggcactgaggagcggatgtccgtcatctgggacaaggctgtggtcactgggaagatggatgagaaccagtttgtggctgtgaccagcaccaatgcagccaaagtcttcaacctttacccccggaaaggccgcattgctgtgggatccgatgccgacctggtcatctgggaccccgacagcgttaaaaccatctctgccaagacacacaacagctctctcgagtacaacatctttgaaggcatggagtgccgcggctccccactggtggtcatcagccaggggaagattgtcctggaggacggcaccctgcatgtcaccgaaggctctggacgctacattccccggaagcccttccctgattttgtttacaagcgtatcaaggcaaggagcaggctggctgagctgagaggggttcctcgtggcctgtatgacggacccgtgtgtgaagtgtctgtgacgcccaagacagtcactccagcctcctcggccaagacgtctcctgccaagcagcaggccccacctgtccggaacctgcaccagtctggattcagtttgtctggtgctcagattgatgacaacattccccgccgcaccaccccagcgtatcgtggcgcccccccggtggccgtgccaacatcaccagcctgggctagagctcctgggctgtgccgtccactggggactggggatgggacacctgaggacattctgagacttctttccttcttccc

SEQ ID NO: 20513 - DNA, 789 bp, Homo Sapiens
cgggctgcaggaattcggcacgaggccaaccttctatggtgctctgcatccctggtgtgtaagattgctgactttggcctggcccgggtcattgaggacaacgagtacacggctcgggaaggggccaagttccccatcaagtggacagctcctgaagccatcaactttggctccttcaccatcaagtcagacgtctggtcctttggtatcctgctgatggagatcgtcacctacggccggatcccttacccagggatgtcaaaccctgaagtgatccgagctctggagcgtggataccggatgcctcgcccagagaactgcccagaggagctctacaacatcatgatgcgctgctggaaaaaccgtccggaggagcggccgaccttcgaatacatccagagtgtgctggatgacttctacacggccacagagagccagtaccaacagcagccatgatagggaggaccagggcagggccagggggtgcccaggtggtggctgcaaggtggctccagcaccatccgccagggcccacacccccttcctactcccagacacccaccctcgcttcagccacagtttcctcatctgtccagtgggtaggttggactggaaaatctctttttgactcttgcaatccacaatctgacattctcaggaagcccccaagttgatatttctatttcctggaatggttggattttagttacagctgtgatttggaagggaaactttcaaaatagtgaaatgaatatttaaataaaagatataaatgccaaagtctttacc

SEQ ID NO: 20514 - DNA, 887 bp, Homo Sapiens
gcacgagggggcactgacatccgagactcactgatgcaggccctggccagctacgtgtgctacccacactccctgcgggctgtggagcgaatccccgaggagcagcgtatcgccatggtgaggaacctcctggcgccctatgagcagcggccctgggcccagaccaactggatcctggtgcggctctggaggggctgtggcttcgggtaccgctatacacggctgccacatctgctgaaaaccaaacttgaggacgccaatttgcccagcctccagaagccctgcccttccaccctgctgcagcagcacatggcggacctcctacagcagggtcctgatgtggcacccagcttcctcaacagcgtcctcaatcagctcaactgggccttctctgaattcattggcatgatccaagagatccagcaggctgctgagcgcctggagcggaactttgtggacagccggcagctcaaggtatgtgccacctgctttgacctctcggtcagcctgctgcgtgtcttggagatgactatcacactggtgcctgagatattccttgactggacccggcctacctctgagatgctgctgcggcgtcttgcacagctgctaaaccaggtgctgaaccgggtgacagctgagaggaacctgtttgatcgtgtggtcaccctacggctgcctggcctagagagcgtggaccactatcccattctggtggcagtgacgggcatcctggtgcagctcctggtgcgtggcccagcctcagagagagagcaagccacatcagtgctcctggcagatccctgcttccagctacgctcaatatgctatctcctgggacagccagaagccccccagcacctggcactgctctgccagcccctgac

SEQ ID NO: 20515 - DNA, 914 bp, Homo Sapiens
  misc_feature (783)..(797): n is a, c, g, or t
gcacgaggagcgcggccggcttgcaccctaccggacaccagagtaaggaggagctgggccgcgccatgcaagtggccaaggtctccaccgcctctgtggggcgctttcaggagcgcctccccaaggagaaggtgccccggggctccggcaagaaaaggaagtttcaaccccttttcggggactttgcagccgagaaaaagaaccagttggagctgcttcgtgtcatgaacagcaagaagcctcagctggatgtgactagggccaccaataagcagatgagggaggaggaccaggaggaggccgccaagaggaggaaaatgagccagaagggcaagagaaagggaggccggcaggggcctgggggcaagaggaaagggggcccgcccagccagggagggaagaggaaagggggcttgggaggcaagatgaattctgggccgcctggcttgggtggcaagagaaaaggaggacagcgcccaggaggaaagaggaggaagtaatagtttctaactgtcggacccgtctgtaaaccaaggactatgaatactaaatgttaagttctaggcaattatacggggactcagaaggacctggccgctgccttcattgagtttaaagggacaggattgcccttccgtcaagaaagtatgtaagtgttggactgcacaaattaatgtttttcccacaaccgagactttggagattaagaacttatttgaggatttaagaattagggaaataatttggtggaaaccgggaatgagttctattcttaaacagccnnnnnnnnnnnnnnnaatgttggatatacgggcgaggtagagttggccatatttcagagacttagattgacgtatatggtttctgcattattttacaacaagtttgtgtatcaaagccggaagggcggggga

SEQ ID NO: 20516 - DNA, 1338 bp, Homo Sapiens
  misc_feature (529)..(548): n is a, c, g, or t
  misc_feature (571)..(807): n is a, c, g, or t
gcacgaggggaaactatgcttcaacatttacatggtgggatcgaatttttggaacagactctcagtataatgcctataatgaaaagaggaagaagtttgagaaaaagactgaataaatatctcacgtaaaccttcctgaaagataaacgttttcctgaattcagaaactagtagctaacattgcttctggagagcagaaataagcatgtcttctggctactaagtgataaaaagaacattaacaacctttaattaccttcctagtgggaactttttctactttacctacaagttctatatatatgtagaaatgaataaatatatatttaagtacagttttcatgaggaagttttaaaagaccatgttcctaagcttccaagaaggttttggatactagaagtattaatctatggcttttctcccagtaaaaccataggcctgaagttcacattgggtctttaaatcttttagatatatactggtcatttcagaaaattcttcatagtggtattggccttatatttaacnnnnnnnnnnnnnnnnnnnngagacaaagccacactctgtctnnnnnnnnnnnnnnnnnnnnnnnnnnnnnnnnnnnnnnnnnnnnnnnnnnnnnnnnnnnnnnnnnnnnnnnnnnnnnnnnnnnnnnnnnnnnnnnnnnnnnnnnnnnnnnnnnnnnnnnnnnnnnnnnnnnnnnnnnnnnnnnnnnnnnnnnnnnnnnnnnnnnnnnnnnnnnnnnnnnnnnnnnnnnnnnnnnnnnnnnnnnnnnnnnnnnnnnnnnnnnnnnnnnnnnnnnnnnngtgtaagccactgcgcccgggccttttaactttaaacatgttttagaattcacctaaagatcaaaatatcatggattgaacctcatcaattgatagcagtgagtgactgaagcttccaaatcaagaaaagccggcaccaagaacttccattctaatctagagctgaccagtttgagctgattctctctttgaagagtccttcttgattgcagtgcagtactggcatttctgaatggatgtaagtggagtattttagtctaaaggcttttcaaattacttgaatttttttaaaaattgaggagctttatttctatttacccttccatttttgtatatcaaatttccattgtcattaaaaactgtatcttgaaactttgtgaactgacttgctgtatttgcactttgagctcttgaaataaatgtgatttttgtgtgattatctggtttccagttttaaacattaactgtcaccttttattcttaaacttgaaagtacagaaatcattaaattattaagttgtaccctcgtgc

SEQ ID NO: 20517 - DNA, 831 bp, Homo Sapiens
gcacgaggatttactttttaacaatctaacaataatatttcaagtgcctagactgttactttggcaatttcctggccctccactcctcatccccacaatctggcttagtgccacccacctttgccacaaagctaggatggttctgtgacccatctgtagtaatttattgtctgtctacatttctgcagatcttccgtggtcagagtgccactgcgggagctctgtatggtcaggatgtaggggttaacttggtcagagccactctatgagttggacttcagtcttgcctaggcgattttgtctaccatttgtgttttgaaagcccaaggtgctgatgtcaaagtgtaacagatatcagtgtctccccgtgtcctctccctgccaagtctcagaagaggttgggcttccatgcctgtagctttcctggtccctcacccccatggccccaggcccacagcgtgggaactcactttcccttgtgtcaagacatttctctaactcctgccattcttctggtgctactccatgcaggggtcagtgcagcagaggacagtctggagaaggtattagcaaagcaaaaggctgagaaggaacagggaacattggagctgactgttcttggtaactgattacctgccaattgctaccgagaaggttggaggtggggaaggctttgtataatcccacccacctcaccaaaacgatgaaggtatgctgtcatggtcctttctggaagtttctggtgccatttctgaactgttacaacttgtatttccaaacctggttcatatttatactttgcaatccaaataaagataacccttattccat

SEQ ID NO: 20518 - DNA, 661 bp, Homo Sapiens
ttttggatcccccgggctgcaggcggggttggggcgacggcgggccgggggggacccgacaggccagagccccttggggaggagcggcggctggatgcgcgaggctcctccggatgcccggagagccgcttgcgacttaactcccgcctctttcccagatgccgcgtcactgctccgccgccggctgctgcacacgggatacgcgcgagacccgcaactgcggcatctccttccacagacttcccaagaaggacaacccgaggcgaggcttgtggctggccaactgcctgcggttggaccccagcggccagggcctgtgggacccggcatccgattacatctacttttgctccaaacgttttgaggaggactgctttgagctggtgggaatcagtggatatcacaggctacaggagggggcagtccccaccatatttgagtctttcttcaagttgtgccggattactaagatcaaaggatacagttacccacctggcccccttgaagtcagccggctcatacgatgcaggaagtgctgctttgagggccgagggcccataactccattttctccacctccacctgctgatgtcatctgctttcctgtggaagaggcctcagcacctgccactttgtcggcttctccatctgggaggctgga

SEQ ID NO: 20519 - DNA, 805 bp, Homo Sapiens
gcacgaggctaagatcctattctcgatgagcatagggggacagccttgttttatgccacttttctctccccatacctaccttcccctcatgtgtacttagccacctgtgttgctttgaatctgctgccagttctggctcaaatgtggcacaaaatcagtacatcagacacaccatgaaatccctgtggctataaattctaaggaatcttttgacacttccagcccaaagaacttatttttatttcgtattatataagagtccccacctctactccacgtaccccaaaaagataagctgtcctcagatcctccttctacccaggagggaaataatggatattgccaagggaacaatcagaactcatctggctttgaaaacgacctgccaagtttggctagcaggttcagacaacaagagagtaacaattggtagagagccacaggtagaaaagatactcccagctgacagggtgataaaaggcagggaagaattgggcctgtgctgatccaggaaggttttattgtttgcttgttttttgtatttactcgtgactaaattttattcatttaagtcagaattttgatatttgaaataagactactttcccttttcttactatctataaaaaagacgaggcagggatgctgtgttctttctgtcaaattctaaatgtgatctttgccattgcttatttgaattcagaaagctatactttttcatcacatataactcacagtttctttttgcattggtggattagacttaataaaacctaatggaaataaattcctaaatctgaaaaaa

SEQ ID NO: 20520 - DNA, 578 bp, Homo Sapiens
gcacgaggagcacgcactctcagtcaacatgacagattctggaggataacccgcaggagcagagataacttcaggaagtccatttttgcccctgcttttgctttggattatacctcaccagctgcacaaaatgcattttttcgtatcaaaaagtcaccactaaccctcccccagaagctcacaaaggaaaacggagagagcgagcgagagagatttccttggaaatttctcccaagggcgaaagtcattggaatttttaaatcataggggaaaagcagtcctgttctaaatcctcttattcttttggtttgtcacaaagaaggaactaagaagcaggacagaggcaacgtggagaggctgaaaacagtgcagagacgtttgacaatgagtcagtagcacaaaagagatgacatttacctagcactataaaccctggttgcctctgaagaaactgccttcattgtatatatgtgactatttacatgtaatcaacatgggaacttttaggggaacctaataagaaatcccaattttcaggagtggtggtgtcaataaacgctctgtggccagtgtaaaag

SEQ ID NO: 20521 - DNA, 831 bp, Homo Sapiens
  misc_feature (689)..(697): n is a, c, g, or t
gcacgaggtttttatttagtttacaggaagaatctgtaagtacaggttgcagaaagaaaacgtttagtgctatttacattcattttaaaactctgctctatacaaatttaattctgatcagtatgaacaatattttcgtagatctactgcatataaagccttttcatcaaagcattaacaatgaataaaataacatgattacatttaaacaacgctgaccatttgaaaccatttacatttaatgtttgtaagggctgttgacacttagtaagtacagaatgtaatgtcagcctgcaacttcatttttataaaggctaaacttatttatatggaatattgttctatatactacgcgccaatctatattttaagtcctgtagttaggtattttataagtcttttattaaatatattctacacatatttgtaatttcatccaggaagaatttcttcccagtgaaaaaatataaaaatctttcatatttttacaggtttagatgaaagtagctcatgctttagtgctgtgcaaattgtttttagcatatcaatctttaaattattggtatgaaataaaagaaaaagtggcattcttgtgtatgccataaaaatcagcttttgactttaatacaattgcaagcactaatatcaaacgcaaactatataaagaaacaaaattagtactatggagnnnnnnnnnaattttaagaatcatctgaactcttagggagtaagcatgacactggatgtggttacaaattaatgataattatgggaaatttcaatttgctgatattcaaatacataaattggatcatgaagttttctaatatt

SEQ ID NO: 20522 - DNA, 1538 bp, Homo Sapiens
gcacgaggaacagtaacaggctaacttattagcttgtaagtggaatccaatcaaatcccagacctgacatctctatgttctgaaaatatgaatttctgacagttatttttactgaggaagtagttacaagacattttgtaagtatacctaccagttggtctccatctcaacgatggtcccatcattggtttttggcctcttaaagatgaactcatgttgagtggttggatattctcgtggggtgcttttgtggtttcttgacttgttcctaactaaagtcacaagtgcatacaccttgatagcaccaaatataaaccggagaaatgagatacaaagaattgcggagcaggagctggccaacctggagaagtggaaggagcagaacagagctaaaccggttcacctggtgcccagacggctaggtggaagccagtcagaaactgaagtcagacagaaacaacaactccagctgatgcaatctaaatacaagcaaaagctaaaaagagaagaatctgtaagaatcaagaaggaagctgaagaagctgaactccaaaaaatgaaggcaattcagagagagaagagcaataaactggaggagaaaaaaagacttcaagaaaaccttagaagagaagcatttagagagcatcagcaatacaaaaccgctgagttcttgagcaaactgaacacagaatcgccagacagaagtgcctgtcaaagtgctgtttgtggcccacaatcctcaacatgggccagaagctgggcttacagagattctctaaaggcagaagaaaacagaaaattgcaaaagatgaaggatgaacaacatcaaaagagtgaattactggaactgaaacggcagcagcaagagcaagaaagagccaaaatccaccagactgaacacaggagggtaaataatgcttttctggaccgactccaaggtaaaagtcaaccaggtggcctcgagcaatctggaggctgttggaatatgaatagtggtaacagctggggtatatgagaaaatattgactcctatctggccttcatcaactgacctcgaaaagcctcatgagatgctttttcttaatgtgattttgttcagcctcactgtttttaccttaatttcaactgcccacacacttgaccgtgcagtcaggagtgactggcttctccttgtcctcatttatgcatgtttggaggagatgattcctgaactcatatttaatctctactgccagggaaatgctacattatttttctaattggaagtataattagagtgatgttggtagggtagaaaaagagggagtcacttgatgctttcaggttaatcagagctatgggtgctacaggcttgtctttctaagtgacatattcttatctaattctcagatcaggttttgaaaagctttgggggtctttttagattttaatccctactttctttatggtacaaatatgtacaaaagaaaaaggtcttatattcttttacacaaatttataagggaaatcctcgtgccgaattcctgcagcccgggggt

SEQ ID NO: 20523 - DNA, 1003 bp, Homo Sapiens
ccgggctgcaggaattcggcacgaggtgagtgcttgaaggagtttgtcactccagacacagacatcaaggtgaccttgagtatctttgagctggcatctgctgcaggtgtgggctgtgacattgacccagccttggtggctgccattgctaatctgaaagctgatacttcatctcctgaggaggaatataaggtggcctgcctgctcttgatctttctggcagtttccctcccactccttgccactgacccttcttccttttatagcattgagaaggatggttacaacaacaatattcattgcttgaccaaagccatcatccaggtgtctgctgccctcttcacgctctacaacaagaacattgaaactcacctcaaggaatttctggtggtggcctctgtcagcctcttgcagctgggccaggagactgacaagcttaaaaccagaaatcgagaatccatttctctgctcatgcgcttggtggtggaggagtcatccttcctgaccctggacatgctggagtcctgtttcccttatgtcctgcttcgaaatgcctatcgggaggtgtctcgggccttccacctaaactgaatgcctgccagtacccactgaagagccctttggaccttcctaaacccttgccatagtggaagctgtggtcactttcgcagggggtgggaatggggtggggtcactaaggagagagggtcaggagccagagttgatgagcagatctgtggaagaacaatccagggctgagaaatcgtagagcagtgaggcaggctgggagcatggaggacagcttatggaaaaagttagggcgtggggccacatgtgtgaattttacatgaaaaaggagtaacgtacaagtatattttctatcttctggtgacttgagcttgagctctgacagcatggggctctccgaccttcatccactattcttatgataatgctggcgggcagagatgatcaatctcctattaaatcataatgagcctat

SEQ ID NO: 20524 - DNA, 1196 bp, Homo Sapiens
gcacgagggccacttgggccaattggacctccaggtgtacgaggcagtgtaggagaagcaggacctgagggccctcctggtgagcctggcccacctggccctccgggtccccctggccaccttacagctgctcttggggatatcatggggcactatgatgaaagcatgccagatccacttcctgagtttactgaagatcaggcggctcctgatgacaaaaacaaaacggacccaggggttcatgctaccctgaagtcactcagtagtcagattgaaaccatgcgcagccccgatggctcgaaaaagcacccagcccgcacgtgtgatgacctaaagctttgccattccgcaaagcagagtggtgaatactggattgatcctaaccaaggatctgttgaagatgcaatcaaagtttactgcaacatggaaacaggagaaacatgtatttcagcaaacccatccagtgtaccacgtaaaacctggtgggccagtaaatctcctgacaataaacctgtttggtatggtcttgatatgaacagagggtctcagttcgcttatggagaccaccaatcacctaatacagccattactcagatgacttttttgcgccttttatcaaaagaagcctcccagaacatcacttacatctgtaaaaacagtgtaggatacatggacgatcaagctaagaacctcaaaaaagctgtggttctcaaaggggcaaatgacttagatatcaaagcagagggaaatattagattccggtatatcgttcttcaagacacttgctctaagcggaatggaaatgtgggcaagactgtctttgaatatagaacacagaatgtggcacgcttgcccatcatagatcttgctcctgtggatgttggcggcacagaccaggaattcggcgttgaaattgggccagtttgttttgtgtaaagtaagccaagacacatcgacaatgagcaccaccatcaatgaccaccgccattcacaagaactttgactgtttgaagttgatcctgagactcttgaagtaatggctgatcctgcatcagcattgtatatatggtcttaagtgcctgggctccttatccttcagaatatttattttacttacatcctcaagtttaattgatttaaatatttttcaatacacagtttaggtttagatgaccatgacaatgaccacctttgca

SEQ ID NO: 20525 - DNA, 1142 bp, Homo Sapiens
gcacgaggccgcaccattgcagaccattgccccgactcggcttgcaagcaggacctgctggcctacctgcaacgcatcgccctctactgccaccagctgaacatctgcagcaaggtcaaggccgaggtgcagaatctcggcggggagcttgttgtctctggggtggacagcgccatgtccctgatccaggcagccaagaacttgatgaatgctgtggtgcagacagtgaaggcatcctacgtcgcctctaccaaataccaaaagtcacagggtatggcttccctcaaccttcctgctgtgtcatggaagatgaaggcaccagagaaaaagccattggtgaagagagagaaacaggatgagacacagaccaagattaaacgggcatctcagaagaagcacgtgaacccggtgcaggccctcagcgagttcaaagctatggacagcatctaagtctgcccaggccggccgcccccacccctcggggctcctgaatatcagtcactgttcgtcactcaaatgaatttgctaaatacaacactgatactagattccacagggaaatgggcagactgaaccagtccaggtggtgaattttccaagaacatagtttaagttgattaaaaatgcttttagaatgcaggagcctacttctagctgtattttttgtatgcttaaataaaaataaaaattcataaccaaagagaatcccacattagcttgttagtaatgctctgaccaagccgagatgcccattctcttagtgatggcggcgttagggtttgagagaagggaatttggctcaacttcagttgagagggtgcagtccagacagcttgactgcttttaaatgaccaaagatgacctgtggtaagcaacctgggcatcttaggaagcagtccctggagaaggcatgttcccagaaaggtctctggagggacaaactcactcagtaaaacataatgtatcatgaagaaaactgattctctatgacatgaaatgaaaattttaatgcattgttataattactaatgtacgctgctgcaggacattaataaagttgcttttttaggctacagtgtctcgatgccataatcagaacacacttttttttcctctttctcccagctttcaaatgcaaattc

SEQ ID NO: 20526 - DNA, 713 bp, Homo Sapiens
gcacgaggatcaagataacctcttgaatgtaatagctcatagcactttaatttggcaagccatttttcctgttttattataaatctatattagatgtttgaatatggtttgaaatatttcactaccgtgctgaaaaaggttggttgatagcagcttggagtgctaactggaagatcaaaatcatgtctcttgctgataacctaagagcattaagctctgagtccagtgaggtcatagcagtgtatgctccttgcccttacggagtgtctgtttttagaaatttagattttaaaaggcgtgggacatacgaccaggccctatagccacataaatataaatttcatagaaaaagaataaaagcggagatatattttttgacacagaggcacccaaagaaatacaaacattgcctagctgctgccatttctgtaactgcccagaagggtgacagatttctgaaggggaaaggattcagatatgaccttttctttagtcccaaccactagttttaacaaatgtgaattattgaaatgtgaagggacaaaaagaatcatacatttaaactgtcttgttcagcataccaatattgtatgttacaaatcatcatttctaaatctggattgattctgttgtgtttttgactgtttctaaagtaagtgtgtataaaagtctcctttttaaaaagatcatatttttaaataaagcattttttg

SEQ ID NO: 20527 - DNA, 852 bp, Homo Sapiens
  misc_feature (678)..(703): n is a, c, g, or t
gcacgagggcggccctccaggcactgaagcgtaagaagaggtatgagaagcagctggcgcagatcgacggcacattatcaaccatcgagttccagcgggaggccctggagaatgccaacaccaacaccgaggtgctcaagaacatgggctatgccgccaaggccatgaaggcggcccatgacaacatggacatcgataaagttgatgagttaatgcaggacattgctgaccagcaagaacttgcagaggagatttcaacagcaatttcgaaacctgtagggtttggagaagagtttgacgaggatgagctcatggcggaattagaagaactagaacaggaggaactagacaagaatttgctggaaatcagtggacccgaaacagtccctctaccaaatgttccctctatagccctaccatcaaaacccgccaagaagaaagaagaggaggacgacgacatgaaggaattggagaactgggctggatccatgtaatggggtccagcgctggctgggcccagacagactgtggtggcctgcgcagcgagcaggcgtgtgcgtgtgtggggcaggcaggatgtggtgcaggcaggttccatcgctttcgactctcactccaaagcagtagggccgcgttgctgctcactctctgcatagcatggtctgcacctgggagatnnnnnnnnnnnnnnnnnnnnnnnnnntgggaagtgcctgctgtttataatgttgaatttctgtaaaataaactgtatttgcaaatccaacattgagcttctggactacgctgactccactgttgaatcctcaatggaaagggtcgactggttgccgttgaaatgacctgaaatgt

SEQ ID NO: 20528 - DNA, 599 bp, Homo Sapiens
ggcaggcaactatggaaaaccatgtttatttttaataaaggatgacatttccaatcagtaaaatatcataaaagtataaaaatgtactaagtacaatcattagcattacgttataggggaatagtggttataacttttccctgtaagatgacacattggatggtcacagttggcttgatttacagaggggcaagagtaggtgaccagttgtaccagttgctccagtttcctaggatttgggactctgtaaaaatgagaaagtcccaggcaaactgggacggttggtcctacaagaaaaagagcagcatcagagtgttggctatagtttggaacttaggaacaggatcagacattattttttaacttctccacctattttccctttagctgtgaaataaaaatcccttttgttattactgagggtgttacagctttcagaggcttttttaccactgggtttcatgtaattttgacttaatacctatgtcaagcctgggaagaaaggcagttctaatcaacttgcaggtgtggcattctgcttcaagccacctgcatcctagagagcaaggattcaaactcagatctcctgagcctcgtgc

SEQ ID NO: 20529 - DNA, 669 bp, Homo Sapiens
tggaaacggaaacctttttagggagtccaaggtacagtcgccgcgtgcggagcttgttactggttacttggcctcatggcggtccgagcttcgttcgagaacaactgtgagatcggctgctttgccaagctcaccaacacctactgtctggtagcgatcggaggctcagagaacttctacagtgtgttcgagggcgagctctccgataccatccccgtggtgcacgcgtctatcgccggctgccgcatcatcgggcgcatgtgtgtggggaacaggcacggtctcctggtacccaacaataccaccgaccaggagctgcaacacattcgcaacagcctcccagacacagtgcagattaggcgggtggaggagcggctctcagccttgggcaatgtcaccttccaagttgttccatgggctcctggctctggactgtggccaaccttctccacattccgcccaatctgtaccggatgctggcagggaggtggcagagagctcactgggactgaggggctgggcacccaacccttttccacctgtgcttatcgcctggatctatcattactgcaaaaacctgctctgttgtgctggctggcaggccctgtggctgctggctgagggttctgctgtcctgtgccaccccattaaagtgcagttccctcccgg

SEQ ID NO: 20530 - DNA, 1645 bp, Homo Sapiens
  misc_feature (154)..(186): n is a, c, g, or t
  misc_feature (226)..(235): n is a, c, g, or t
gcacgagggttctggggtaggaagtggtcccgggagattttggatggaaaagtcaggaggattgacagcagacttgcagaattacatagagaaattaggaacccccaaatttcatgtcaattgatctattccccctctttgtttcttggggcannnnnnnnnnnnnnnnnnnnnnnnnnnnnnnnnacccctccttagctttatgcgctcagaaaccaaattaaannnnnnnnnnatgtaacaggggggcagtgacaaaagcaagaacgcacgaagccagcctggaaaccaccacgtcctgccccccgccatttatcgccctgattggattttgtttttcatctgtccctgttgcttgggttgagttgagggtggagcctcctggggggcactggccactgagcccccttggagaagtcaaaggggagtggagaaggccactgtccggcctggcttctggggacagtggctggtccccagaagtcctgagggcggaggggggggttgggcagggtctcctcaggtgtcaggagggtgctcggaggccacaggagggggctcctggctggcctgaggctggccggaggggaaggggctagcaggtgtgtaaacagagggttccatcaggctggggcagggtggccgccttccgcacacttgaggaaccctcccctctccctcggtgacatcttgcccgcccctcagcaccctgccttgtctccaggaggtccgaagctctgtgggacctcttgggggcaaggtggggtgaggccggggagtagggaggtcaggcgggtctgagcccacagagcaggagagctgccaggtctgcccatcgaccaggttgcttgggccccggagcccacgggtctggtgatgccatagcagccaccaccgcggcgcctagggctgcggcagggactcggcctctgggaggtttacctcgcccccacttgtgcccccagctcagcccccctgcacgcagcccgactagcagtctagaggcctgaggcttctgggtcctggtgacggggctggcatgaccccgggggtcgtccatgccagtccgcctcagtcgcagagggtccctcggcaagcgccctgtgagtgggccattcggaacattggacagaagcccaaagagccaaattgtcacaattgtggaacccacattggcctgagatccaaaacgcttcgaggcaccccaaattacctgcccattcgtcaggacacccacccacccagtgttatattctgcctcgccggagtgggtgttcccgggggcacttgccgaccagccccttgcgtccccaggtttgcagctctcccctgggccactaaccatcctggcccgggctgcctgtctgacctccgtgcctagtcgtggctctccatcttgtctcctccccgtgtccccaatgtcttcagtggggggccccctcttgggtcccctcctctgccatcacctgaagacccccacgccaaacactgaatgtcacctgtgcctgccgcctcggtccaccttgcggcccgtgtttgactcaactcagctcctttaacgctatattttccggcaaaatcccatgcttgggttttgtctttaaccttgtaacgcttgcaatcccaataaagcattaaaagtcat

SEQ ID NO: 20531 - DNA, 1455 bp, Homo Sapiens
  misc_feature (427)..(482): n is a, c, g, or t
atcccccgggctgcaggaattcggcacgaggccccttctccatcagttccagcatggccaccaccaccggcgtagacccggtggccaagtggtgggcctctctgacagctgtggtgatccactggctgcggcgggatgaggaggcggctgagcggctgtgcccgctggtggagcacctgccccgggtgctgcaggagtctgagagacccctgcccagggcagctctgcactccttcaaggctgcccgggccctgctgggctgtgccaaggcagagtctggtccagccagcctgaccatctgtgagaaggccagtgggtacctgcatgacagcctggctaccacaccagccagcagctccattgacaaggccgtgcagctgttcctgtgtgacctgcttcttgtggtgcgcaccagcctgtggcggcnnnnnnnnnnnnnnnnnnnnnnnnnnnnnnnnnnnnnnnnnnnnnnnnnnnnnnnngcttccgcccttgagctgcgtggcttccaacgggacctgagcagcctgaggcggctggcacagagcttccggcccgccatgcggagggtgttcctacatgaggccacggcccggctgatggcgggggccagccccacacggacacaccagctcctcgaccgcagtctgaggcggcgggcaggccccggtggcaaaggaggcgcggtggcggagctggagccgcggcccacgcggcgggagcacgcggaggccttgctgctggcctcctgctacctgccccccggcttcctgtcggcgcccgggcagcgcgtgggcatgctggctgaggcggcgcgcacactcgagaagcttggcgatcgccggctgctgcacgactgtcagcagatgctcatgcgcctgggcggtgggaccactgtcacttccagctagaccccgtgtccccggcctcagcacccctgtctctagccactttggtcccgtgcagcttctgtcctgcgtcgaagctttgaaggccgaaggcagtgcaagagactctggcctccacagttcgacctgcggctgctgtgtgccttcgcggtggaaggcccgaggggcgcgatcttgaccctaagaccggcggccatgatggtgctgacctctggtggccgatcggggcactgcaggggccgagccattttggggggcccccctccttgctctgcaggcaccttagtggcttttttcctcctgtgtacagggaagagaggggtacatttccctgtgctgacggaagccaacttggctttcccggactgcaagcagggctctgccccagaggcctctctctccgtcgtgggagagagacgtgtacatagtgtaggtcagcgtgcttagcctcctgacctgaggctcctgtgctactttgccttttgcaaactttattttcatagattgagaagttttgtacagagaattaaaaatgaaatcctcgtgc

SEQ ID NO: 20532 - DNA, 718 bp, Homo Sapiens
  misc_feature (476)..(485): n is a, c, g, or t
  misc_feature (553)..(563): n is a, c, g, or t
ccatgaaccaagtgtttttaaggaaacaaaactatttttttaatcatcagatttatactagctatatggatattagcatatctggtaattatgaatctagaatttttttacatatttttataatactgttagctcagttattggatgagtgaaagataatcatgttggttttaatagtgtcaatttttgtaaaataaaaattaaacttcaaactctttactttataaattgtccataggccacactttaatatcacattataaagggaaggacagtcttcattcctcctggttattggtttgtttgtcattaaagatatattttgaatccatgaaattgctatgctaaacagcctttacatgtatggtctggttaaagttcctttgttccttttgttttaataaaatgtgtcactgattttttagctcaaaatcatcactgttaatttccagtcaccccaaatatggttaaaagannnnnnnnnnaatcatgaagagaaaattagtagcatttctttctctccccattatttattggttttcctcactaatcnnnnnnnnnnnagtccaaaagccaaaaatatttatcttggttttacattttaatttccattcttaattgtaatttttttctttaaataaggaaacaaatataatctcatgtataaaaaacttaaatattttacaagttacatatagcatcattctaaaaataagaa

SEQ ID NO: 20533 - DNA, 1334 bp, Homo Sapiens
gcacgaggcaaatgcaaaaaggtaacaaattcataactggaaagcaaagagaagaacaagtatgatttggatgataaagcattgttttaatggtgaaaacttcacagatcactaatgtttctagaggttaacttcaagtgggcaagctggggtttttaggtagtcagtggcctagttcctaaagccacagtataggatctgttaaactgaatgtctgttgaaagtttgttttagctgcttggaggcttccttttaagacaaactgtatgtgattaagttgttttgagggaactgaagaacctgatgtagcccctggccagataactgcctgatttctcagatattatttctctgggaaacattctacatagcacaggagcttaagagtggcattatcttctcgccttaatttccagagattatttctgtactgagaatcctggaactactatgctaggaaatttaaagctgcatggtctgtcttgttttcatttaattattgtgaatacctagaatctttcttggtcctgatttctcttgcttaatccagtctttatctctaactgccccttatttgatcaccatgtactaggagctctgatagccagctcagctcctaatccttgaggcaacattctttttctatttgaacttcagttctgtccttgaatcccgactagatatttcttgccctctggtctcagaattctcttggcttttattccttgatccacttgccagttttatcactttacccttgttcctcatggcttcccatcaagccatgggtattaggtgacagtgtaatttattagattctggttttgcccaaatactgggcatgctttaataataactgaaccatttcattatttggataggcatgggtaccttatcaagcagattaaaaggatatggtacccgtcctttagaaaagaacagctaaaaccttgttgtggattatggatttagcctaaagaaaaataatctggcataaattaagagtaagagagaagattaatagaaatttcacttcacataacttaaaacatggctatttcaataaaggactaaagtttctcctggatcccagaattcaacctgtatttataaatgtataatgtatttagctactttttggtttaaatgaacttgttgggttagcttggtaaatgttataatttttactattttttacaaagaaaatattttctaatttaagttggagctatctgtgcagcagtttctttacagttgtgcataaatgtttttactataaaatgagctaatgtataaaatactgctgtataccataataaagatagtaatacttg

SEQ ID NO: 20534 - DNA, 1260 bp, Homo Sapiens
cggctgttctacccctccccctccccgcggaaagatgaatgggagggctgattttcgagagccgaatgcagaggttccaagaccaattccccacatagggcctgattacattccaacagaggaagaaaggagagtcttcgcagaatgcaatgatgaaagcttctggttcagatctgtgcctttggctgcaacaagtatgttgattactcaaggattaattagtaaaggaatactttcaagtcatcccaaatatggttccatccctaaacttatacttgcttgtatcatgggatactttgctggaaaactttcttatgtgaaaacttgccaagagaaattcaagaaacttgaaaattccccccttggagaagctttacgatcaggacaagcacgacgatcttcaccacctgggcactattatcaaaagtcaaaatatgactcaagtgtgagtggtcaatcatcttttgtgacatccccagcagcagacaacatagaaatgcttcctcattatgagccaattccattcagttcttctatgaatgaatctgctcccactggtattactgatcatattgtccaaggacctgatcccaaccttgaagaaagtcctaaaagaaaaaatattacatatgaggaattaaggaataagaacagagagtcatatgaagtatctttaacacaaaagactgacccctcagtcaggcctatgcatgaaagagtgccaaaaaaagaagtcaaagtaaacaagtatggagatacttgggatgagtgaaaaattacatcattggacatgaaggagtttcaacatccagcttcatctaggtggtcatgattacctgcatgctttgagctcagcagcagtcttcataaacacatttaaaacaagatcctgggtttttgtggtttgacttctatggtgttttaaaaaaacacagatttttagtgttaatattgtgtaaatgtactcaccttagggattcatttgaatgatggtattataccatgattgtatacagtttgtgaaattgttgcaagggcaaagataactcttaaaaaaccgtcgagattacaatgctctagaatcagcatataagaaaataaatgatatctgcatgttgaattggggtggatggggggagcaagcataatttttaagtgtgaagctttgcatcaagaaattattaaaaagctttttttctccagtattttctgtattatcttaatgtttatggcaaataaaatgtaaaggaaccctcgtgc

SEQ ID NO: 20535 - DNA, 849 bp, Homo Sapiens
gcacgaggatctgccacagggtcctgcgaggcctgcacaaggacaagcctcgagggggttgcagcccctcgtcctccgccagccgagcttccacctgccgctgccaccacaagctggtggaggctggggaggtggatccagacccaggcaataacaagctgcaggcttcagcacccaacctgacccccatctgaccacagggcaggggtggggcaacatgcgggctgccaatgggacatgcagggcagtgtggcaggtggagaggtcctacaggggctgagtgaccccactctgagttcactaagttatgcaactttcgttttggcagatattttttgacactgggaactgggctgtctagccgggtataggtaacccacaggcccagtgccagccctcaaaggacatagactttgaaacaagcgaattaactatctacgctgcctgcaaggggccacttagggcactgctagcagggcttcaaccaggaagggatcaacccaggaagggatgatcaggagaggcttccctgaggacataatgtgtaagagaggtgagaagtgctcccaagcagacacaacagcagcacagaggtctggaggccacacaaaaagtgatgctcgccctgggctagcctcagcagacctaaggcatctctactcctctccagaggagccgcccagattcctgcagtggagaggaggtcttccagcagcagcaggtctggagggctgagaatgaacctgactagaggttctggagataccctgctcccagggacttgggtggatgcgctgatagaacatcctcaagacagtttccttgaaatcaataaatactgtgttttat

SEQ ID NO: 20536 - DNA, 1774 bp, Homo Sapiens
gcacgagggcttgctgaggtagaggcagcgccaagaagaggcctttgccgctggtcgggattgggatgtcgaagaacacagtgtcgtcggcccgcttccggaaggtggacgtggatgaatatgacgagaacaagttcgtggacgaagaagatgggggcgacggccaggccgggcccgacgagggcgaggtggactcctgcctgcggcaagaaacatgacagctgccctacaggcagctctgaagaacccccctatcaacaccaagagtcaggcagtgaaggaccgggcaggcagcattgtcttgaaggtgctcatctcttttaaagctaatgatatagaaaaggcagttcaatctctggacaagaatggtgtggatctcctaatgaagtatatttataaaggatttgagagcccgtctgacaatagcagtgctatgttactgcaatggcatgaaaaggcacttgctgctggaggagtagggtccattgttcgtgtcttgactgcaagaaaaactgtgtagtctggcaggaagtggattatctgcctcgggagtgggaattgctggtacaaagaccaaaacaaccaaatgccaccgctgccctgtgggtagcatctgtttctctcagctttgccttcttgctttttcatatctgtaaagaaaaaattacatatcagttgtcctttaatgaaaattgggataatatagaagaaattgtgttaaaatagaagtgtttcatcctttcaaaaccatttcagtgatgtttataccaatctgtatatagtataatttacattcaagtttaattgtgcaacttttaacccctggtggctgggtttttgttctgtttgttttgtattatttttaactaatactgagagatttggtcagaatttgaggccagtttcctagctcattgctagtcaggaaatgatatttataaaaaatatgagagactggcagctattaacattgcaaaactggaccatatttcccttatttaataagcaaaatatgtttttggaataagtggtgggtgaataccactgccaagttatagctttgtttttgcttgcctcctgattatctgtactgtgggtttaagtatgctactttctctcagcatccaataatcatggcctctcaatttatttgtggtcacccagggttcagagcaagaagtcttgctttatacaaatgtatccataaaatatcagagcttgttgggcatgaacatcaaacttttgttccactaatatggctctgtttggaaaaaactgcaaatcagaaagaatgatttgcagaaagaaagaaaaactatggtgtaatttaaactctgggcagcctctgaatgaaatgctactttctttagaaatataatagctgccttagacattatgaggtatacaactagtatttaagataccatttaatatgccccgtaaatgtcttcagtgttcttcagggtagttgggatctcaaaagatttggttcagatccaaacaaatacacattctgtgttttagctcagtgttttctaaaaaaagaaactgccacacagcaaaaaattgtttactttgttggacaaaccaaatcagttctcaaaaaatgaccggtgcttataaaaagttataaatatcgagtagctctaaaacaaaccacctgaccaagagggaagtgagcttgtgcttagtatttacattggatgccagttttgtaatcactgacttatgtgcaaactggtgcagaaattctataaactctttgctgtttttg

SEQ ID NO: 20537 - DNA, 1217 bp, Homo Sapiens
cccccgggctgcaggaattcggcacgaggagagagtgtaagcccaaggctgactctttggactgctccagatttcttgtggaggccccccatgactgggatttagaggaggttatgaacagtatcagagattgcttcgtgactggaaagtggcagatgataaagatgcagccaaggtcttagcagaagatgaggagctctacggtgactttgaagacttggaaacaggggacgtgcacaagggaaaatcaggccccaatactcagaatgaagatatagagaaagaagttaaggaagaaattgaccccgacgaagaagaaagtgccaagaaaaagcatttggataagaagagaaaattgaaggagatgtttgatgcagaatatgatgaaggagaaagcacatattttgatgatcttaaaggagaaatgcagaaacaagcacagctgaatcgcgcagaatttgaagatcaagatgatgaagccagagttcagtatgagggttttcgacctgggatgtacgtccgcattgagattgaaaatgttccctgtgaatttgtgcagaactttgacccccattaccccattatcctgggtggcttgggcaacagtgagggaaatgttggctacgtgcagatgcgtctgaagaaacatcgctggtataagaaaatcctcaagtcccgagatccaatcatattttctgtagggtggaggaggtttcagaccatcccactgtattatatcgaagaccacaatggaagacaaaggcttctaaagtataccccacagcacatgcattgcggagcagccttttggggccctatcactccacagggaactggtttcttggcaatacagtctgtcagtggcataatgcctgattttcggatagctgctacaggagttgtccttgatctggataaatccataaaaattgtgaagaaattaaagctaactggttttccatataaaattttcaagaacacttcatttattaagggaatgtttaattctgccttggaagtggccaaatttgaaggtgctgtgattcgaacagtcagtgggataagggggcagatcaagaaagcactccgagctccagaaggagctttcagggccagctttgaggataagctgctgatgagcgatattgtcttcatgcgaacttggtatcctgtttccatcccagcgtctataacccagtaacatctttgttgaaacc

SEQ ID NO: 20538 - DNA, 1102 bp, Homo Sapiens
ccgcggtggcggccgctctatcaattaaaaggatcccccgggctgcagagaccgcgcgcgggacggggaggaatggcctgtccgcgttaaaccatcacaagccatggttgcggaagggccacgcgtcccccagtaggagaatgactccgattcgtgaccctcagcgccggtgcatgtcgatatatttattgagtgtctactgtgtgccaggcactatatctatgtgcatagaaaaaccctggaaggccatacaacaatatatatagagtgatcgtctctgcttgctgagctaacaggggtgtcaagcttccattttggtatctacttctaaatacactcagaacaggagaaatttggactaattttcaaactacagacactttctaatcatgatgcatttcaaaagtggactcgaattaactgagttgcaaaacatgacagtgcccgaggatgataacattagcaatgactccaatgatttcaccgaagtagaaaatggtcagataaatagcaagtttatttctgatcgtgaaagtagaagaagtctcacaaacagccatttggaaaaaaagaagtgtgatgagtatattccaggtacaacctccttaggcatgtctgtttttaacctaagcaacgccattatgggcagtgggattttgggactcgcctttgccctggcgaacactggaatcctactttttctgtacttttgacttcagtgacattgctgtctatatattcaataaacctcctattgatctgttcaaaagaaacaggctgcatggtgtatgaaaagctgggggaacaagtctttggcaccacagggaaattcgtaatctttggagccacctctctacagaacactggagcaatgctgagctacctcttcatcgtaaaaaatgaactaccctctgccataaagtttctaatgggaaaggaagagacattttcagcctggtacgtggatggccgcgttctggtggtgatagttacctttgggcataattctccctctgtgtctcttgaagacttagggtatcttggctatactagtggatttccttgagctgtatgggttttttcctaattgtggtaattacaa

SEQ ID NO: 20539 - DNA, 937 bp, Homo Sapiens
gcacgaggatccaggctctgtttattccccacaagacttgcatagaaaaataagatattatattttgtttgtatgtatttagtgttttgtataataccaagaaccgctgactaaatttactcaaattagggcattaaatatcatgtacttcatagtttgagactgttcactcaaatagggcagagtactattctatctagatgtgtaagtgttttttttaaaatcacatggaacggttttttttatactaaaaagtggagggagatttgtttaaacaagtatttctaaaagaaatatgtacatagttctggaaattatttgtggtaaggaaatattctttactccagttgcatttctcagacaataaagtggtgcatccatgctacctcctactttgtcaacaaagatgctatttaccctttacatttttgtatcataatagattttaaaaatctaatgttctttattgcaagacattcttttgttaacaggtttgtttctttttaatgttttacctaaaatttgacatgcttacaggacaggtttgcctcttactttatttaacattgtagaaatgtaattaataaacaatgctcactacacagtttagaatagacgttctcatttatattatcttccaaatttgatcagttagcaaaacttaatacaccaattaaaatatttctacatatgagaatgtttacaatttaaattttagaacttgttttggatgtgattatatgtacgaaaatcgtgtaacactatgctcatgctaagaaccgacataacagaattactgaaataaatgtgctgtgaggaatggaaatatgggtgcaggtgtcttggtcatgataaattgtgattcttttaaaaattttttccaaaacaattaggtatttaatctgaaatcagtttcctttacaacaaacagtttttg

SEQ ID NO: 20540 - DNA, 1217 bp, Homo Sapiens
gcacgaggatgggctttaaaaaatgcttttgactatttcaacaatatgcgaatgaaatacaatactgaaggacgtgtgtccccatcaccctctcaggaaagtctaagttcatcaaaatcggatacagatacaggggtatgcagtggaactgatgaagaccctgatgataaaaatgcaccctttcggcaacggccattttgcaaatataaaggacatactgctgatctccttgatctttcatggtctaaaaactactttcttctttcttcttcaatggataaaacagtcagattatggcacatttctcgaagagaatgcctttgctgttttcaacatatagattttgtcactgccatagcttttcatccaagagatgacaggtattttctaagtgggtctttggatggaaagctccgcctttggaacatacctgacaaaaaagtggctttgtggaatgaagtagatggtcagacaaaattgatcacagctgcaaatttctgtcagaatggcaaatatgcagtgattgggacatatgatggcagatgtattttctatgatacagagcatttgaaataccatacacaaatacatgtccgatctactagagggcgcaacaaggttggaagaaaaattactggcattgagcctttacctggagaaaataagatattggtaacctcaaatgactccagaatcagactatatgatttgagagatttgtcactatccatgaagtataagggttacgtcaatagcagcagccagatcaaagcaagtttcagccatgattttacttacctcgttagtggttcagaagataagtatgtttatatctggagtacctaccatgacctaagcaagtttacttcagtcaggagagatcgtaatgacttctgggaaggtattaaagcccacaatgcagttgttacatcagccatctttgcaccaaacccaagtttgatgttatctttggatgtgcaatctgaaaaatcagaagggaacgagaaaagtgaagatgctgaagttttggatgccacaccttctggtattatgaagacagataacacagaagttcttctctctgctgacttcactggagcaatcaaagtgtttgttaataaaagaaaaaatgtatcttaatttggaaatggcatttaaaataaacatatcagtaggtttctatatgtatcaaaactgaaaaaatagtgttccaggct

SEQ ID NO: 20541 - DNA, 969 bp, Homo Sapiens
  misc_feature (243)..(315): n is a, c, g, or t
  misc_feature (338)..(415): n is a, c, g, or t
gcacgaggcgggctgtccggcccgcagggcggtcgagcccgcggcgccatggctcacgtcggctcccgcaagcgctcgaggagtcgcagccggtcccggggacgggggtcggaaaagagaaagaagaagagcaggaaagacacctcgaggaactgctcggcctccacatcccaaggtcgcaaggccagcacggcccctggggcggaggagagaagcaagcagaaggcccggaggagaacaagnnnnnnnnnnnnnnnnnnnnnnnnnnnnnnnnnnnnnnnnnnnnnnnnnnnnnnnnnnnnnnnnnnnnnnnnnagtgatggccggaagaagcgggnnnnnnnnnnnnnnnnnnnnnnnnnnnnnnnnnnnnnnnnnnnnnnnnnnnnnnnnnnnnnnnnnnnnnnnnnnnnnncacagcaggtggaggctctgccgggcccctcgctggaccagtggcaccgatcagctggggaggaagaggatggcccagtcctgacggatgagcagaagtcccgaatccaggccatgaagcccatgaccaaggaggagtgggatgcccggcagagcatcatccgcaaggtggtggaccctgagacggggcgcaccaggcttattaagggagatggcgaggtcctagaggaaatcgtaaccaaagaacgacacagagagatcaacaagcaagccacccgaggggactgcctggccttccagatgcgagctgggttgcttccctgagggcccccgctggccaaggcctgtggacgacgctggcggcccagcctgggcaggtttcagggtgccagtgggaagcctgatgggtgctggtggcctttcccccgtggattggtctctggcccagcccagtctcttctcaggggcagggggtggaggttggggtcaccggcctgcttggcacccccatctgaaagagcagcacttctcagctattaaaggccccctggatag

SEQ ID NO: 20542 - DNA, 890 bp, Homo Sapiens
gcacgaggagcaactgctaaggctgccttgggaagaggatgatcctaaacaaagctctgatgctgggggcccttgccctgaccaccgtgatgagcccctgtggaggtgaagacattgtggctgaccacgtcgcctcttatggtgtaaacttgtaccagtcttacggtccctctggccagtacacccatgaatttgatggagatgagcagttctacgtggacctggggaggaaggagactgtctggtgtttgcctgttctcagacaatttagatttgacccgcaatttgcactgacaaacatcgctgtcctaaaacataacttgaacagtctgattaaacgctccaactctaccgctgctaccaatgaggttcctgaggtcacagtgttttccaagtctcccgtgacactgggtcagcccaacatcctcatctgtcttgtggacaacatctttcctcctgtggtcaacatcacatggctgagcaatgggcactcagtcacagaaggtgtttctgagaccagcttcctctccaagagtgatcattccttcttcaagatcagttacctcaccctcctcccttctgctgaggagagttatgactgcaggtggagcactggggcctggacaagcctcttctgaaacactgggagcctgagattccagcccctatgtcagagctcacagagactgtggtctgcgccctgggattgtctgtgggcctcgtgggcattgtggtgggcactgtcttcatcatccgaggcctgcgttcagttggtgcttccagacaccaggggcccttgtgaatcccatcctggaatggaagggctgactgaaaccgtggctaagatttgggagactctcttgtttcaagccaatttaacatcatttacc

SEQ ID NO: 20543 - DNA, 916 bp, Homo Sapiens
  misc_feature (467)..(489): n is a, c, g, or t
gcacgagggttggccgaaatgcacagtcaattattatagaaactgataacagggagtacttgttcccccttttgccttcttaagtacattgtttaaaactagggaaaaagggtatgtgtatattgtaaactatggatgttaacactcaaagaggttaagtcagtgaagtaacctattcatcaccagtaccgctgtaccactaataaattgtttgccaaatccttgtaataacatcttaattttagacaatcatgtcactgtttttaatgtttatttttttgtgtgtgttgcgtgtatcatgtatttatttgttggcaaactattgtttgttgattaaaatagcactgttccagtcagccactactttatgacgtctgaggcacacccctttccgaatttcaaggaccaaggtgacccgacctgtgtatgagagtgccaaatggtgtttggcttttcttaacattccnnnnnnnnnnnnnnnnnnnnnnnccttcttaatgaactaaatacgaatagatgcaacttagtttttgtaatactgaaatcgattcaattgtataaacgattataatttctttcatggaagcatgattcttctgattaaaaactgtactccatattttatgctggttgtctgcaagcttgtgcgatgttatgttcatgttaatcctatttgtaaaatgaagtgttcccaaccttatgttaaaagagataagtaaataacagactgtattcagttattttgccctttattgaggaaccagatttgttttctttttgtttgtaatctcattttgaaataatcagcaagttgaggtactttcttcaatgctttgtacaatataaactgttatgcctttcattgcattactatgggaaggagcaactaaaaaataaagacttaccaaaagggaaa

SEQ ID NO: 20544 - DNA, 921 bp, Homo Sapiens
gcacgaggctgaagatattgttcggtccaatcattatgaccctgaagaagatgaagaatattatcgaaaacagctgtcatactttgaccgaagaagttttgagaataagcctcctgcacacattgctgccagccatctctccgagcctgcaaagccagctcattctcagaatcaatcaaatttttctagttattcttcaaagggaaagcctcctgaagctgatggtgtggatagatcatttggcgagaaacgctatgaacccatccaggccactccccctcctcctccattgccctcgcagtatgcccagccatctcagcctgtcaccagcgcgtctctccacatacattctaagggagcacatggtgaaggtaattcagtgtcattggattttcagaattccttagtgtccaaaccagacccacctccatctcagaataagccagcaactttcagaccaccaaaccgagaagatactgctcaggcagctttctatccccagaaaagttttccatagaaactggtgttagtataattatccctcaaggagccattcccgaaggagttgagcaggaaatctatttcaaggtctgccgggacaacagcatccttccacctttagataaagagaaaggtgaaacactgctgagtcctttggtgatgtgtggtccccatggcctcaagttcctgaagcctgtggagctgcgcttaccacactgtgcgtccatgactcctgacggtgatcctaaaacctggcaaaacaagtgtcttcccggagatccaaattatctcgttggagcaaactgtgtttctgtccttattgaccacttttaactcttgaaatataggaacttaaataatgtgaaactggattaaacttaatctaaatggaaccactcctatcaagtattataccttttt

SEQ ID NO: 20545 - DNA, 937 bp, Homo Sapiens
gcacgaggctgacatctggcgcttctatctgctgtacattcggcctgagggccaggacagtgctttctcctggacggacctgctgctgaagaataattctgagctgcttaacaacctgggcaacttcatcaacagagctgggatgtttgtgtctaagttctttgggggctatgtgcctgagatggtgctcacccctgatgatcagcgcctgctggcccatgtcaccctggagctccagcactatcaccagctacttgagaaggttcggatccgggatgccttgcgcagtatcctcaccatatctcgacatggcaaccaatatattcaggtgaatgagccctggaagcggattaaaggcagtgaggctgacaggcaacgggcaggaacagtgactggcttggcagtgaatatagctgccttgctctctgtcatgcttcagccttacatgcccacggttagtgccacaatccaggcccagctgcagctcccacctccagcctgcagtatcctgctgacaaacttcctgtgtaccttaccagcaggacaccagattggcacagtcagtcccttgttccaaaaattggaaaatgaccagattgaaagtttaaggcagcgctttggagggggccaggcaaaaacgtccccgaagccagcagttgtagagactgttacaacagccaagccacagcagatacaagcgctgatggatgaagtgacaaaacaaggaaacattgtccgagaactgaaagcacaaaaggcagacaagaacgaggttgctgcggaggtggcgaaactcttggatctaaagaaacagttggctgtagctgaggggaaaccccctgaagcccctaaaggcaagaagaaaaagtaaaagaccttggctcatagaaagtcactttaatagatagggacagtaataaataaatgtaccatctct

SEQ ID NO: 20546 - DNA, 1112 bp, Homo Sapiens
ccccgggctgcaggaattcggcacgaggggaagcttgggttcaagcgtcactcatctgtacatagttgtaactcccatgtggagtatcagtcgctcacaggacttggatctgaagcacagtaaacgcaagaggggatttgtgtacaaaaggcaaaaaaagtatttgatatcattgtacataagagttttcagagatttcatatatatcttttacagaggctattttaatctttagtgcatggttaacagaaaaaaattatacaattttgacaatattatttttcgtatcaggttgctgtttaattttggagggggtggggaaatagttctggtgccttaacgcatggctggaatttatagaggctacaaccacatttgttcacaggagtttttggtgcggggtgggaaggatggaaggccttggatttatattgcacttcatagacccctaggctgctgtgcggtgggactccacatgcgccggaaggagcttcaggtgagcactgctcatgtgtggatgcccctgcaacaggcttccctgtctgtagagccaggggtgcaagtgccatccacacttgcagtgaatggcttttccttttaggtttaagtcctgtctgtctgtaaggcgtagaatctgtccgtctgtaaggcgtagaatgagggttgttaatccatcacaagcaaaaggtcagaacagttaaacactgcctttcctcctcctcttattttatgataaaagcaaatgtggccttctcagtatcattcgattgctatttgagacttttaaattaaggtaaaggctgctggtgttggtacctgtggatttttctatactgatgttttcgttttgccaatataatgagtattacattggccttgggggacagaaaggaggaagttctgacttttcagggctaccttatttctactaaggacccagagcaggcctgtccatgccattccttcgcacagatgaaactgagctgggactggaaaggacagcccttgacctgggttctgggtataatttgcacttttgagactggtagctaaccatcttatgagtgccaatgtgtcatttagtaaaacttaaatagaaaccctcgtgccgt

SEQ ID NO: 20547 - DNA, 526 bp, Homo Sapiens
gccgggtctggctttgggccctgggccttccagccggggactctgcgcctgcgcccgcctggccgccgcccgctctcccggcgcggcagctgtctgggctgctgcgcgccgcctaggtgtctgggcgatctatgggcaagagcaagggccacgatgacagattacggcgaggagcagcgcaacgagctggaggccctggagtccatctaccctgactccttcacagtattatcagaaaatccacccagcttcaccattactgtgacgtctgaggctggagaaaatgatgaaactgtccagactaccctcaagtttacatacagtgaaaaatacccagatgaagctcccctttatgaaatattctcccaggaaaatctagaagataatgatgtctcagacattttaaaattactagcattacaggctgaagaaaatcttggtatggtgatgatttttactctagtgacagctgtgcaagaaaaattaaatgaaatagtagatcagataaaaactagaagagaagaag

SEQ ID NO: 20548 - DNA, 1652 bp, Homo Sapiens
  misc_feature (606)..(615): n is a, c, g, or t
gcacgagggcggagttgtcgtgtgttctggattcattccggcaccaccatgtcgaaggtttcctttaagatcacgctgacgtcggacccacggctgccgtacaaagtactcagtgttcctgaaagtacacctttcacagcagtcttaaagtttgcagcagaagaatttaaagttcctgctgcaacaagtgcaattattaccaatgatggaataggaataaatcctgcacagactgctggaaatgtttttctaaaacatggttcagaactgcggattattcctagagatcgtgttggaagttgttaatatctgctacttggaacatacgattgcctttcagaataaatattggtattttttgttgttgtaaaattgaaatcaggcatttaacatactatgaaaacaccaggagtcaatgattaatgaaaggtgactcatctgtccctttttgttgtccatactcttcctatgaagagggaatgcgtatgaattaaggctactactgtcacagaagatcatagtctttgatgctacctcacaacacaaacaggtagttcgttgggggcaaatgaattagccaactgttaactggaagcttttgataannnnnnnnnnagaacaatttggaacattaaaatttactgaatcgtatatattcatctgagataaaaatataaaaagaattatggactctggatggcaatttgcttgatagcatctgatttgcagactcataatttgatttttaattaaatatataggttatgatgaagtgaatagacatatcagtgaacagttaactatattaaatttttatcatttactttttttaagattcagacctcagttatataaatttcagtttaatatcaaccaaaaaattaaaattttaatctaacccttatgtgtataaattggtgtcccataccagcttttaatggtggacctatagaatccagtacttttaatggtgggaatttacagtagaagcatcctttgctgagttatacattcctttatcaatctcttttgatacaacatttaaaacaagtagcttcaagaaaccactggtgttttgaggatagtatttctaaatagcattcaggaacagagtattattgcacagatctgaagatcaaaaaaaagctcaaggaaatacagatcggaagtgctgatgagttatatttattgaaaacccaacttttaaggaagtgctaagatcagtcacccatgtgaataagaagccaggaaaggaaagatggggaagcccagatcaccaggcttctattaaggaggaaagcaacagaggaaacagtgaaggggaacagaagggggtagcaaagtgttacagaaaagcggactggatagacaaaactgcagaaggtgtatgttggggagaactgaaagggaaaacaaaatacttgacatagtcttaagtagaagaaggcagttagagaaaacaaagtatctactggccttgtcaacatacagacttcaaaataccccttatgagaatccaaagaatgatgtgtgtaaggaagattttatttgctcttccggaagaaatcagtatctatgcaaatcttgaagacgaaatcaaaggccattaatgattcagatcagtgcttgacctcctgtattctgaatggtga

SEQ ID NO: 20549 - DNA, 1409 bp, Homo Sapiens
  misc_feature (351)..(360): n is a, c, g, or t
  misc_feature (639)..(648): n is a, c, g, or t
gcacgaggttttcattttgttaaaaatatttatttaaaaaaatacaactgctgtccatatctagttgcacatatatctattaacatatatgtatacttttagacttgtagtaaatttgctacagtgcttttgtaaagccagcctgcattatacaaagcaaattcctctgtcagttcttacataaaatagatttttaaaaatgtatatctttcctaaaagatgcatatcaccattatagaatttaacaaaatttttgcataaaacctgggaagtgatagaaaaaatgatcacctgattggtcagagcaaccccttactatgtctggagatgcactgagtatcaactacacannnnnnnnnncaagcagcatattattataaagccctcaaagtgcttttgcatcctttcgctcacctctctacactctataaagtttctctgccgtatacagatagaattcaagactctagctacaatcatcctaatcaatcttagagcaatatccctttgtttcccaacaggtaagtcagactgcttagctaggagatgtggcagcttctctccagctgtttcatcaactaacatgaagtttaataaatgttagcagtgaccattttaattgcttttttaggaaaaggnnnnnnnnnnggtgcttttaatactttgaaggtgctttttaggtctccctaatgtaaattatgctgaaatcaactaagacgagctattattaacactttaacagttatccattcctctgggtaggtgtgcacttacattatatgtaagtatctctacaaagtgttagatactggatatgagatacagatttcaataaaacaagggaaaaaataagcaatgaagtaactgtcttctcagttgagctgacaggtttgaagaaagcactcttgacatgttcttactaccacatatcccaaactaagacatacacataaaataacatatctctcctgtgttaacactgatggagacgcactgcaatagtcccatggcagacatatgcttttcttctgaattacagattggcttaatgaaaattaagagtttattattaagcatcttttaatttttaagtgatgttcatacttgacggttcagaaactgccactgccactgtggttaaatcacttggtgtatggaatttaaaataatctaacctagagctatttcccattaatcaaactcatccctaattgtctcttaggaaggtcttctttaaagaagatcgagtagggctcatgaaaaattattggtttgttcttcaaaatgcaaagttacatacccttattttttagccaatttgattatttggtaaagcaagggcataattttaagaaactaattttaatcaaaaatttttacttgcctcaaactaaaggtaaccctcgtgc

SEQ ID NO: 20550 - DNA, 661 bp, Homo Sapiens
  misc_feature (51)..(79): n is a, c, g, or t
cgctctagaactatgtggatcccccgggctgcaggaattcggcacgagggnnnnnnnnnnnnnnnnnnnnnnnnnnnnngaagtaaactcaatttttattcttctatataatacatggatatatggataaattttcctttaaagagtttgcaaccctgaggcaatgccttgggtacgtaacgtataaagcaacagcaaatgaaatctgaatgcgggaatgacaactggacttccaaacataatttaatattcatgaaattgcacacataccaatagtattctatgtctcgtctagcctcttaatccaactatctcaactgccttgcagtttgcctaccaaacaccccaactctctacatacattctgtcatgtaaatgctgaccttctgactgaaatttaataaattaacatgggatttacatcaagggatttttgtctggggagtgcattgccaaaaagcatgcctagttcctgaccacagcatctgcccacataaaaactttggcccccacaggggaagaaatggcatctgactgcagtaacctcgaggtccttgagggtcccttgggatccaccaagagcaagtttttcatcttatctgagggccgcattaagggtatggcataagaggggaaggccatggctggttagaagagatgg

SEQ ID NO: 20551 - DNA, 1130 bp, Homo Sapiens
  misc_feature (505)..(533): n is a, c, g, or t
gaattcggcacgagggccactttcgaggagttatcttcattagctatatccatcccttaatccaacacacacctgcaatgattactgtgcaactattttgcttaattttttatttgaaaaaatgtatttaaaagtccaacaactttttaatataaattacgactctcaaacccattcccatcactttattagtgatggtagcatacatattagagaaggtagctaaaggcaagagagcaccaaaggaaaaagactgtccaaagaacaggtattataatgaggccgaagatcacggtgaccagagatttctaggagtctctaacttttccaccctatcctgttaaccctttaaatctctagtataacactcaggctactgaggtattttagagcaacaagctgggttactttcagagcaaccagcttgactggaactgagagtaaattgggaatgtatgaccaatcttagaccctgaaaaatggcagaaaatacatggaaatttgnnnnnnnnnnnnnnnnnnnnnnnnnnnnngaacctcagtcactgttctgtagggataagcaaactgaatgggtggtggaattggcagaatggataccagttcctacattcctgaccccactaccataaaacaggatgtttcctgttgcaaagctaatgagaccccacccttcttgtctcagagcaggcaggagctcatctgtcttgttctgccttcctaattaccctggaagggccagaacgaagaacacctgagaatactgaaagtgcctaaaaacccctgctcctacgttgttttcccatttaaagcagactcttcagccagggggcagtgggacctggtcttcagacaaaactccctgagtctaatgtgtgtctaggactagggcacagaaatagagcttaaaatttggggaggataaggagtgtatctactgcttctctctcccctttccccaatcctaccataccctgttcatatctctacactgcaggaaccacttctccagagggcaagaatggaggagggggacctgtccatcatagcaacatgcaaacacaagcaaaacactgaataaagaattgtttggagattatgtgcagccctactgagcccggacgcgtggg

SEQ ID NO: 20552 - DNA, 1499 bp, Homo Sapiens
gcacgaggggcttacattgtctctagtggattttcttccaaaatgaaagttgttgcttctagacttttagagaaatatccccaagctatctacacactctgctcttcctgtgccttaaatatgtggttggcaaaatcagtacctgttatgggagtatctgttgcattaggaacaattgaggaagtttgttcttttttccatcgatcaccacaactgcttttagaacttgacaacgtaatttctgttctttttcagaacagtaaagaaaggggtaaagaactgaaggaaatctgccattctcagtggacaggcaggcatgatgcttttgaaattttagtggaactcctgcaagcacttgttttatgtttagatggtataaatagtgacacaaatattagatggaataactatatagctggccgagcatttgtactctgcagtgcagtgtcagattttgatttcattgttactattgttgttcttaaaaatgtcctatcttttacaagagcctttgggaaaaacctccaggggcaaacctctgatgtcttctttgcggccggtagcttgactgcagtactgcattcactcaacgaagtgatggaaaatattgaagtttatcatgaattttggtttgaggaagccacaaatttggcaaccaaacttgatattcaaatgaaactccctgggaaattccgcagagctcaccagggtaacttggaatctcagctaacctctgagagttactataaagaaaccctaagtgtcccaacagtggagcacattattcaggaacttaaagatatattctcagaacagcacctcaaagctcttaaatgcttatctctggtaccctcagtcatgggacaactcaaattcaatacgtcggaggaacaccatgctgacatgtatagaagtgacttacccaatcctgacacgctgtcagctgagcttcattgttggagaatcaaatggaaacacagggggaaagatatagagcttccgtccaccatctatgaagccctccacctgcctgacatcaagttttttcctaatgtgtatgcattgctgaaggtcctgtgtattcttcctgtgatgaaggttgagaatgagcggtatgaaaatggacgaaagcgtcttaaagcatatttgaggaacactttgacagaccaaaggtcaagtaacttggctttgcttaacataaattttgatataaaacacgacctggatttaatggtggacacatatattaaactctatacaagtaagtcagagcttcctacagataattccgaaactgtggaaaatacctaagagacttttaaaaataggctttcttatatttgatatttggaagaaaagcccgtaacgtgtatgtagaccacttaatcactaaatatctttgcctataggactcatttgaatacattaaccattgataatctaccctgtttaaatgggccctgtttgactctcaagctttgaagacctacctgttcttc

SEQ ID NO: 20553 - DNA, 928 bp, Homo Sapiens
gcacgaggggaagaggctttcttggggaagaggaccccaaaggaggtacttcctcctcactgatgccctcagggctgctgtgtgggtgtgttaagctgataaggttcagtttgcggcggaaactacctgctagtcttgtgtcaggggctgccagcctccttttgttttacttttgcccccttcttgggaacatttgaccaaaaataatcctcatttcatcttgtgtacagtcctttgtgtaccccgcccaggttgagaggtgaatcagcgtaattctccgaagctctgctgggcagctcagccatgttacattgtctatgcagaataagcaggcctggtgtctgcaaatgtaccagtccttctcccgcatctcctgggtgcccccttggctttgcctctcctgtgtcctgtctttctgcgttttagaagtgagagcctctccttcaccttttgagcaactgagtcatctcaagtcctgagctctgctctgccgcctgctggtgccttgtaaaggtatactcgttacaggccctagaggttctaatggtccagggttaagtgagaggagactgtactttgtttcaaaggatccttcaccctgatctgcagtgaggtggatagatcacctggagtccctcgtctgtggtcttggaggcttaaattgtaaaatacatcccttatggaatcctaaattcctctaggtgtttttggaaggcgcatttgagccttgtgagctaaaatggaatggatttaatatttcctatctggcatttccatcttgcccctggtacacaagtcactggcctggaactcagccttgattcactgtccgtcttcacggattagctgtgctgttatgttgtctgtgctgcagattggcccatgtgggaagtcggggggacctgatttcctgcttggagacttgggg

SEQ ID NO: 20554 - DNA, 1059 bp, Homo Sapiens
gcacgaggtccttctttgactataacaaaatctggggaggacaaaggtgattttcctgtgtccacatctaacaaagtcaagattcccggctggacttttgcagcttccttccaagtcttcctgaccaccttgcactattggactttggaaggaggtgcctatagaaaacgattttgaacatacttcatcgcagtggactgtgtccctcggtgcagaaactaccagatttgagggacgaggtcaaggaggatatgataggcccggaagttgctgtgccccatcagcagcttgacgcgtggtcacaggacgatttcactgacactgcgaactctcaggactaccgttaccaagaggttaggtgaagtggtttaaaccaaacggaactcttcatcttaaactacacgttgaaaatcaacccaataattctgtattaactgaattctgaacttttcaggaggtactgtgaggaagagcaggcaccagcagcagaatggggaatggagaggtgggcaggggttccagcttccctttgattttttgctgcagactcatcctttttaaatgagacttgttttcccctctctttgagtcaagtcaaatatgtagattgcctttggcaattcttcttctcaagcactgacactcattaccgtctgtgattgccatttcttcccaaggccagtctgaacctgaggttgctttatcctaaaagttttaacctcaggttccaaattcagtaaattttggaaacagtacagctatttctcatcaattctctatcatgttgaagtcaaatttggattttccaccaaattctgaatttgtagacatacttgtacgctcacttgccccagatgcctcctctgtcctcattcttctctcccacacaagcagtctttttctacagccagtaaggcagctctgtcgtggtagcagatggtcccattattctagggtcttactctttgtatgatgaaaagaatgtgttatgaatcggtgctgtcagccctgctgtcagaccttcttccacagcaaatgagatgtatgcccaagacggta

SEQ ID NO: 20555 - DNA, 952 bp, Homo Sapiens
ccccgggctgcaggaattcggcacgaggatttttataacattccgtctgtgtctattccctaaatatcatgagtttataataaggaaagtgataaaaatacagtaatgaaataaaaatctgaatgtttctaagaaaggttttggaaggaaaaatgacctgaaatcagtgcgtactgcaaagtacagccaataatttttgttctttgttttcacccccaccctcactggaattctcaccaaaaatagtttgatacttaaaaaacagaagtaaatacttttctcaatattgttttggctatgcaaatatttgttttgcttaatgtcctccatttacacttctcagcaaatgtagttgcaaacaaatgctttctttttatttttcccttggtttgaggtatgtaaatagccaaaaatgtacattgaatttcacattgtaaaagttttattttatcccttgtatgatattactcaaaaaatccctgtgtatatgaaagtgcataataaatatatttgctttacagagaagatcttgttttaattttgtccttgaaccagtagaacatgcatgatatgcatatagcataaacaactgttagttgttttaagttattatcttaaataaatcctgagcaaatgaatttggaaacttttgcaaagaagaaagtgaaatataacactgtccaaaggaaggtagaaaacaaagatttactgtttatgtcctcctaagccttttaagacttaatgttcttttccccccgtgactgattatatactatatcacacccatgtcaggttttgtgcctctgagaattgcagtaatcccataacttttgtatatgtgtgctccttgatcatcaaatattatggccatcctatggccggatatttggggagtttattgcaaacatggtcattcattttccaaattaaagttgtgtgtttcttcctccgt

SEQ ID NO: 20556 - DNA, 1615 bp, Homo Sapiens
gcacgaggcggaagcctgcgagggagggtggtgtccactgcccagttccgtgtcccgatgcccagcgccagcgccagccgcaagagtcaggagaagccgcgggagatcatggacgcggcggaagattatgctaaagagagatatggaatatcttcaatgatacaatcacaagaaaaaccagatcgagttttggttcgggttagagacttgacaatacaaaaagctgatgaagttgtttgggtacgtgcaagagttcatacaagcagagctaaagggaaacagtgcttcttagtcctacgtcagcagcagtttaatgtccaggctcttgtggcggtgggagaccatgcaagcaagcagatggttaaatttgctgccaacatcaacaaagagagcattgtggatgtagaaggtgttgtgagaaaagtgaatcagaaaattggaagctgtacacagcaagacgttgagttacatgttcagaagatttatgtgatcagtttggctgaaccccgtctgcccctgcagctggatgatgctgttcggcctgaggcagaaggagaagaggaaggaagagctactgttaaccaggatacaagattagacaacagagtcattgatcttaggacatcaactagtcaggcagtcttccgtctccagtctggcatctgccatctcttccgagaaactttaattaacaaaggttttgtggaaatcccaactcctaaaattatttcagctgccagtgaaggaggagccaatgtttttactgtgtcatattttaaaaataatgcatacctggctcagtccccacagctatataagcaaatgtgcatttgtgctgattttgagaaggttttctctattggaccagtattcagagcggaagactctaatacccatagacatctaactgagtttgttggtttggacattgaaatggcttttaattaccattaccacgaagttatggaagaaattgctgacaccatggtacaaatattcaaaggacttcaagaaaggtttcagactgaaattcaaacagtgaataaacagttcccatgtgagccattcaaatttttggagccaactctaagactagaatattgtgaagcattggctatgcttagggaagctggagtcgaaatgggagatgaagacgatctgagcacaccaaatgaaaagctgttgggtcatttggtaaaggaaaagtatgatacagatttttatattcttgataaatatccattggctgtaagacctttctataccatgcctgacccaagaaatcccaaacagtccaactcttacgatatgttcatgagaggagaagaaatattgtcaggagctcaaagaatacatgatcctcaactgctaacagagagagctttacatcatggaattgatttggagaaaattaaggcttacattgattccttccgctttggagcccctcctcatgctggtggaggcattggattggaacgagttactatgctgtttctgggattgcataatgttcgtcagacctccatgttccctcgtgatcccaaacgactcactccttaaattcacactttgccacttaactccagtgtggatgacagagcgagcctcgtgc

SEQ ID NO: 20557 - DNA, 1597 bp, Homo Sapiens
  misc_feature (1281)..(1310): n is a, c, g, or t
gcacgaggggaaggtcttcctgttttcaccatctttctaatctttttccagcttgagggaggcggtatccacctgcagcccttttagtggtggtgtctcactctttcttctctctttgtcccggataggctaatcaatacccttggcactgatgggcactggaaaacatagagtagacctgagatgctggtcaagccccctttgattgagttcatcatgagccgttgctaatgccaggccagtaaaagtataacagcaaataaccattggttaatctggacttatttttggacttagtgcaacaggttgaggctaaaacaaatctcagaacagtctgaaatacctttgcctggatacctctggctccttcagcagctagagctcagtatactaatgccctatcttagtagagatttcatagctatttagagatattttccattttaagaaaacccgacaacatttctgccaggtttgttaggaggccacatgatacttattcaaaaaaatcctagagattcttagctcttgggatgcaggctcagcccgctggagcatgagctctgtgtgtaccgagaactggggtgatgttttacttttcacagtatgggctacacagcagctgttcaacaagagtaaatattgtcacaacactgaacctctggctagaggacatattcacagtgaacataactgtaacatatatgaaaggcttctgggacttgaaatcaaatgtttgggaatggtgcccttggaggcaacctcccattttagatgtttaaaggaccctatatgtggcattcctttctttaaactataggtaattaaggcagctgaaaagtaaattgccttctagacactgaaggcaaatctcctttgtccatttacctggaaaccagaatgattttgacatacaggagagctgcagttgtgaaagcaccatcatcatagaggatgatgtaattaaaaaatggtcagtgtgcaaagaaaagaactgcttgcatttctttatttctgtctcataattgtcaaaaaccagaattaggtcaagttcatagtttctgtaattggcttttgaatcaaagaatagggagacaatctaaaaaatatcttaggttggagatgacagaaatatgattgatttgaagtggaaaaagaaattctgttaatgttaattaaagtaaaattattccctgaattgtttgatattgtcacctagcagatatgtattacttttctgcaatgttattattggcttgcactttgtgagtattctatgtnnnnnnnnnnnnnnnnnnnnnnnnnnnnnngcataggacagacttaggagttttgtttagagcagttaacatctgaagtgtctaatgcattaacttttgtaaggtactgaatacttaatatgtgggaaacccttttgcgtggtccttaggcttacaatgtgcactgaatcgtttcatgtaagaatccaaagtggacaccattaacaggtctttgaaatatgcatgtactttatattttctatatttgtaactttgcatgttcttgttttgttatataaaaaaattgtaaatgtttaatatctgactgaacctcgtgc

SEQ ID NO: 20558 - DNA, 1185 bp, Homo Sapiens
  misc_feature (400)..(421): n is a, c, g, or t
  misc_feature (501)..(544): n is a, c, g, or t
ttgcatctaaccaaaaagtcttggttttatcttaatccattaaaaagttgttctttgtttccagcttgcattgattgctacaacatcactaatttggctttcacatttaaatggttctgtgctaatcaaaactttcgttgttattattcgttatggtagaatcatttttaattcacgtgctttgtgttcagttttgtggtctgagagatgtaccaattgtcaaattaccgtgtaccacctaatgtttataggagaaagcaaaatacatcagcttggtagttaacacatcaaatatttcttgctgcttctaggagaacttttttggtgtgtgttggaatggctgagcaaatattaaaattgttaatatgcagccatatatggaaggttcctgtggggttgnnnnnnnnnnnnnnnnnnnnnngtggtgggattatgtgcctcccattcactagaaaatgagaaaattgtctgggttccaaaatattgacattgaatggatcnnnnnnnnnnnnnnnnnnnnnnnnnnnnnnnnnnnnnnnnnnnnggcagttgcatgctagcatgggtatttttataacaatataactgagttatattggaattataaatattttctgtcacttaaatttgttctttgtttagcctgaaaacctttatggctcaagatcagattcctgactaacccctctcttagagctacagcgagctgcattaccagcttaaaacacttcttagggattaaatatagatgtaatttttcaaaatcgtttttaatttaaactgtgttttagtgtaaaattgttaaccttgtaagatggataatgtgtataagaatgtaggccttaactatttcacatgagtcaaaacaaagcagctttaaaaaaataattggaagcacaagtgcatggcactgactgaatgctgttaatatttctaaaagtttctacattcagattatatgcctgattcatagtaaaatacctctaataaacactgttttatagaaaacctgacttcagtgaatatttttgtattttacatgggccagtttatatactgctattacactattatttcctatagctacatgttctttgtaacttttgaatttaattgtattactaaattcataccttgatggtacgctctatctggttttgggtgtttttcatgttttaacatttg

SEQ ID NO: 20559 - DNA, 1313 bp, Homo Sapiens
gcacgaggtagaggcgatccgcagccggacacaggaagcgggagctctcggtgtgtctgaccgtggttcctggagagacgcggacagtaggaatgaccaggcagttggtgtgagctttaaggcctctgctggggaaggagaccaggcccacagagaacagggcaaggagcaggccatgtttgataagaaggtgcagctccagagaatggtagaccaaaggtcggtgatttcagatgaaaagaaagttgccctcctctatctagacaatgaggaggaggagaatgatgggcattggttttaataagcagaaacattttgttttaatggcagcctgttggcgacgtgccaacatccaaaggccttaacttattttaagaggccgagggagtctatgaaaatctccccttttttacttttttaaagagtactcccggcatggtcaatttcctttatagttaatccgtaaaggtttccagttaattcatgccttaaaaggcactgcaattttatttttgagttgggacttttacaaaacacttttttccctggagtcttctctccacttctggagatgaatttctatgttttgcacctggtcacagacatggcttgcatctgtttgaaactacaattaattatagatgtcaaaacattaaccagattaaagtaatatatttaagagtaaattttgcttgcatgtgctaatatgaaataacagactaacattttaggggaaaaataaatacaatttagactctaaaaagtcttttcaaaaagaaatgggaaataggcagactgtttatgttaaaaaaattcttgctaaatgatttcatctttaggaaaaaattacttgccatatagagctaaattcatcttaagacttgaatgaattgctttctatgtacagaactttaaacaatatagtatttatggcgaggacagctgtagtctgttgtgatatttcacattctatttgcacaggttccctggcactggtagggtagatgattattgggaatcgcttacagtaccatttcattttttggcactaggtcattaagtagcacacagtctgaatgcccttttctgttatagcctaagttctggagtggccagttcctatcagactgtgcagacttgcgcttctctgcaccttatcccttagcacccaaacatttaatttcactggtgggaggtagactttgaagacaatgaagagaatgccgatactcagactgcagctggaccggcaagctggctgtgtacaggaaaatggaagcacacagtggactgtgcctcctaaagatgccttt

SEQ ID NO: 20560 - DNA, 1216 bp, Homo Sapiens
  misc_feature (1106)..(1143): n is a, c, g, or t
gcacgaggcggcagcgtgagctgcagcggcaggagcttctcatgcagaagcggctggcgatggagtccaacaagatcctccaggagcagcaggagatggagcggcaaaggagaaaagaaattgcccagaaggcagcagaggaaaatgagagataccggaaggagatggaacagattgtagaggaggaagagaagtttaagaagcaatgggaagaagactggggctcaaaggaacagctactcttgcctaaaaccatcactgctgaggtacacccggtaccccttcgcaagccaaagtatgatcagggagtggaacctgagctcgagcccgcagatgacctggatggaggcacggaggagcagggagagcaggatttccggaaatatgaggaaggctttgacccctactctatgttcaccccagagcagatcatggggaaggatgtccggctcctacgcatcaagaaggagggatccttagacctggccctggaaggcggtgtggactcccccattgggaaggtggtcgtttctgctgtgtatgagcggggagctgctgagcggcatggtggcattgtgaaaggggacgagatcatggcaatcaacggcaagattgtgacagactacaccctggctgaggctgaggctgccctgcagaaggcctggaatcagggcggggactggatcgaccttgtggttgccgtctgccccccaaaggagtatgacgatgagctgaccttcttctgaagtccaaaaggggaaaccaaattcaccgttaggaaacagtgagctccggccccacctcgtgaacacaaagcctcggatcagccttgagagaggccacactacacacaccagatggcatccttgggacctgaatctatcacccaggaatctcaaactccctttggccctgaaccagggccagataaggaacagctcgggccactcttctgaaggccaacgtggaggaaagggagcagccagccatttgggagaagatctcaaggatccagactctcattcctttcctctggcccagtgaatttggtctctcccagctctgggggactccttccttgaaccctaataagaccccactggagnnnnnnnnnnnnnnnnnnnnnnnnnnnnnnnnnnnnnnaattgctgccaggattgtcactccaaaccttactctgagctcattaataaaataaacagatttattttccagc

SEQ ID NO: 20561 - DNA, 1603 bp, Homo Sapiens
  misc_feature (1381)..(1390): n is a, c, g, or t
  misc_feature (1397)..(1411): n is a, c, g, or t
gcacgagggagcggttccttgtgggctagaagaatcctgcaaaaatgtctctctatccatctctcgaagacttgaaggtagacaaagtaattcaggctcaaactgctttttctgcaaaccctgccaatccagcaattttgtcagaagcttctgctcctatccctcacgatggaaatctctatcccagactgtatccagagctctctcaatacatggggctgagtttaaatgaagaagaaatacgtgcaaatgtggccgtggtttctggtgcaccacttcaggggcagttggtagcaagaccttccagtataaactatatggtggctcctgtaactggtaatgatgttggaattcgtagagcagaaattaagcaagggattcgtgaagtcattttgtgtaaggatcaagatggaaaaattggactcaggcttaaatcaatagataatggtatatttgttcagctagtccaggctaattctccagcctcattggttggtctgagatttggggaccaagtacttcagatcaatggtgaaaactgtgcaggatggagctctgataaagcgcacaaggtgctcaaacaggcttttggagagaagattaccatgaccattcgtgacaggccctttgaacggacgattaccatgcataaggatagcactggacatgttggttttatctttaaaaatggaaaaataacatccatagtgaaagatagctctgcagccagaaatggtcttctcacggaacataacatctgtgaaatcaatggacagaatgtcattggattgaaggactctcaaattgcagacatactgtcaacatctgggactgtagttactattacaatcatgcctgcttttatctttgaacatattattaagcggatggcaccaagcattatgaaaagcctaatggaccacaccattcctgaggtttaaaattcacggcaccatggaaatgtagctgaacgtctccagtttccttctttggcaacttctgtattatgcacgtgaagccttcccggagccagcgagcatatgctgcatgaggacctttctatcttacattatggctgggaatcttactctttcatctgataccttgttcagatttcaaaatagttgtagccttatcctggttttacagatgtgaaactttcaagagatttactgactttcctagaatagtttctctactggaaacctgatgcttttataagccattgtgattaggatgactgttacaggcttagctttgtgtgaaaaccagtcacctttctcctaggtaatgagtagtgctgttcatattactttagttctatagcatacttgcatctttaacatgctatcatagtacatttagaatgattgcctttgannnnnnnnnnaaattcnnnnnnnnnnnnnnnaaaatgccaattaagaacactggtttcattccatgtaagcattaaacagtgtatgtaggtttcaagagattgtgatgattcttaaattttaactaccttcacttaatatgcttgaactgtcgccttaactatgttaagcatctagactaaaagccaaatataattattgctgcctttctaaaacccaaaatg

SEQ ID NO: 20562 - DNA, 1370 bp, Homo Sapiens
cccacgcgtccggcattttgacgggcctgggcttcaatggctttgaagaaaagggcaaggcaaagtgggatgcctgtgccaacatgaaggtgtggctctttgaaacaaacccccgcttcactggcaccattgcctcattcaacatcaacaccaacgcctgggtggcccggtgagctgctggtggggagcctggaccctggttccttccttccactgtcttcccagattggagggcaggggtgtaccatgtcacccctatgcgtctttcccatctgggcagaaccccctgtcgctcacactgactttgacccccacctatacccccctcccaaaaaaaccattactgtcatatttgaaaaaaaggcaagatataaaagtgcgttaagacctgggtgttactccagctctgccaatggacttatgtcctccactgccctgtttatcaacagctttacttgtttgtccccaccactagagtgtgggcagcttgagtagagtgtctggttcaccactgatctcagcatcagcctcagtcactgctgctgaaccaagtggctcgtgcgcacacggtctccagctccgccttgggtctgctttccatctctaaaagtaatcagtcagcactgcctcctgtaccctctgggggctacacgtgggaacccaccagcactccaatccaatcctcatggtgaggacccagaggcagtggcgggatgcaagaccagtcagtttgagggtcgccccacccacccttttcttcagctacatcttcaaacgactcaagttcctttggaaataaagaactctctcagggtctctcgttgctattcctggccctctggcacggcctgcactcaggatacctggtctgcttccagatggaattcctcattgttattgtggaaagacaggctgccaggctcattcaagagagccccaccctgagcaagctggccgccattactgtcctccagcccttctactatttggtgcaacagaccatccactggctcttcatgggttactccatgactgccttctgcctcttcacgtgggacaaatggcttaaggtgtataaatccatctatttccttggccacatcttcttcctgagcctactattcatattgccttatattcacaaagcaatggtgccaaggaaagagaagttaaagaagatggaataatccatttccctggtggcctgtgcgggactggtgcagaaactactcgtctcccttttcacagcactcctttgccccagagcatagaatggaaaagccagggaggtggaagatcgatgcttccagctgtgcctctgctgccagccaagtcttcatttggggcctaaggggaaacttttttttgga

SEQ ID NO: 20563 - DNA, 931 bp, Homo Sapiens
gcacgagggctcgctggaggagccccaggagacgtcacacagcggcagtgataaagagcacagggatgtggagagatctcaagaacaagaatctgaagcacaaagataccatgtggatgacggcaggaggcacagagctcaccacgagcctgaacggctttccagaaggagtgaggatgagcagagatgggggaaaggacctggccaagacagagggaagaaggggagccaggacagcggggctccgggggaggccatggagagactgggaagagcgcagaggtgtgacgacagtccagcacccagaaaagagcgactggcaaacaaggaccggccagccttgcagctgtatgatccaggagctcgcttccgagcgcgagagtgtggcggaaacaggaggatctgcaaggcagaaggttcggggactggtcctgagaagagggaagaggcagagtgagtcactgcacgcacctggcctccatggacgagcaagggcatcccagaaacgtgtaaatgaccccgagtgtgactgggaaggagaacttattccttaccaggaaactggaagctaaaaatacagagggtgacgtagaaacacgcagaaaccattctaaagaaagtagtgatcttgtattaaattgagcagaattctcacagattttaccattcctgttataaactagtatttgttgtttagccaaaacagaaaatgatttccactggacagtagaaaaatatgtgtaaaataggggaagaaagttagtattggatcagtgtgagtcctgaagcactttcagtgctgtgagaacgacatccactttgggtttcattcgtttgtaagcagaggagctgtcagtcactcgtgcttctcggtggctctgagccatggtgtcgagtgaagagtagttcttgtttgttacaacctttgtga

SEQ ID NO: 20564 - DNA, 661 bp, Homo Sapiens
gccgctctataccccatttaggatcccccgggctgcaggaattcggcacgagggagatacttacctatccttcagcttttggatccattacaggcccagcccactgggaggtgttgctgcgggcccgtgctatcgaaacccagtgctatgtagtggcagcagcacagtgtggacgccaccatgagaagagagcaagttatggccacagcatggtggtagacccctggggaacagtggtggcccgctgctctgaggggccaggcctctgccttgcccgaatagacctcaactatctgcgacagttgcgccgacacctgcctgtgttccagcaccgcaggcctgacctctatggcaatctgggtcacccactgtcttaagacttgacttctgtgagtttagacctgcccctcccacccccaccctgccactatgagctagtgctcatgtgacttggaggcaggatccaggcacagctcccctcacttggagaaccttgactctcttgatggaacacagatgggctgcttgggaaagaaactttcacctgagcttcacctgaggtcagactgctgtttcacaaaggtggaattttatatagtcattgtttatttcatggaaactgaagttctgctgagggctgagcaacactggcattgaaaaa

SEQ ID NO: 20565 - DNA, 473 bp, Homo Sapiens
gcacgaggtttgagccttacatctcattcactgtctttctccaagaaaagtattttgggcggacagtcagatcaagcagtaaaattagctctttcaaatcttcttgtcatgtaaaatgaagctagtctgttttaaaatttttagttttggattgtatactaatgaaaatcttaatgatgtttttgatttttatatacttattttaaagaaaatcttatatagtacattttacaaaaattataaaaaatgaattagtactggcgaggactaaatgaaacaataatttttcattttgataactagctttccaggtggacttagccataggaaaatattactaatgtaatttaacaaattgctgcatgtattccatttaaaaatatgtttaaattgtcctaaaacaaaataattttctccctaggagtatgcatttggctacagtgttttgaaacagaaaccttagaataggtcat

SEQ ID NO: 20566 - DNA, 1182 bp, Homo Sapiens
gcacgaggtattaacttgttacagtagaatacattttttaaaatatagtacaaaaaattctcggtgatcaccaaaaatgtaatcaataaggttacattcctttgtttctctgaatcttctttttcctataatgaaaagtgtattttttaaaccttaagaaattctttttgcactaccttttcctatccattgcatcatagtttatgtcccaccagttaggatcttggagaactgctcacattaatcttgtttcctgggttttatttcaaactgtcctgaactttatagtaatttttgctaaaggaagttcctagtaagcagttatttgcctttggtaaacttaattttagatgaaaactatgcacaaaaaaacaattgtcttatgattagaccttcaagttaggaggtgaatagtctatgcagcataagacaaaccataactcttacctttaaattttctcatttgacaagaactatcaaattcctttttaaaagagtacacatatacgtttttaatttggaaatttcatattcggtaaaaattcaaattttaattactgtggaattttgacaactccagcaatggcaaagctgaatttatttcactattatctatcaaaaagcaagtaacattataagattccaaatgtttaacctggtaaaagtgagaatatatttcaatcaagagcataccatctaaaaaaaacactattgctatctagtcatatgcatttcttattacatttttgcagcccctaagtgttcagaacaaatgtagcattcacataatactatagtcaatgaaaagagtatattcttttattggtttttgttcatacatgttaagtttcaactttcaataataaaattcaataaatttgattccttaatcataaaaactggctttacacattatttacatatgtcaaagtccatacaaaacatcacaaggatttgattgactctatgcatggtaccatcacacaggaggagggagctaatccagtaacatacattcaaagattaaattgcagatatgcacagtgtatttggcactgttcattaatattataacaccttcctctcaaagacaggcattcttaagcgttagtcacgatataccagaatttggtattcacattaaaaccaccttttaaactttctaacagtaaccggttatta

SEQ ID NO: 20567 - DNA, 504 bp, Homo Sapiens
  misc_feature (318)..(332): n is a, c, g, or t
gcacgagggtttcttccttctttactgcactcagatttaagccttacaaagggaaagcctctggccgtcacacgtaggacgcatgaaggtcactcgtggtgaggctgacatgctcacacattacaacagtagagagggaaaatcctaagacagaggaactccagagatgagtgtctggagcgcttcagttcagctttaaaggccaggacgggccacacgtggctggcggcctcgttccagtggcggcacgtccttgggcgtctctaatgtctgcagctcaagggctggcacttttttaaatataaaaatgggtgttannnnnnnnnnnnnnngtaaagtgatttttggtcttctgttgacattcggggtgatcctgttctgcgctgtgtacaatgtgagatcggtgcgttctcctgatgttttgccgtggcttggggattgtacacgggaccagctcacgtaatgcattgcctgtaacaatgtaataaaaagcctctttctttt

SEQ ID NO: 20568 - DNA, 410 bp, Homo Sapiens
  misc_feature (103)..(115): n is a, c, g, or t
gcacgaggggaaggtccatgatgctcagccacatactgtagagagaggcaatttaatgttaaatgacgcaccatcctccctcccacccttctcccagtcaacnnnnnnnnnnnnnctagaactactaattatctctcaaggctgaaaaattaattgccttaggtggagaacttaattcctagtatccaccaaacttaactccgtatctccatatggtgtctccatatctactgtgtgagctacttaactgacgccctcttcctccaactgaaggatcgcccaacgtttttggattatagaattattatttcctgctttctttctttgggacttttgaatttctttggtttcgtttttaagaagtaacccaacatttcctacaacactaaataaaatggtacttacctttc

SEQ ID NO: 20569 - DNA, 238 bp, Homo Sapiens
gcacgaggcaaaaccatcaaccaccaggcagccaggccatcagcccacctccacctctggagggtccccagagacccacgcccgacgcagacccggaggagcatcagcaaggggcccgggcagagaatcggctatgtcttcattatgagagcaggagagacggcagagatatgttgctaggtgaatatatatttatataataaatccgtaagttaataaagtaaatagtaattctctg

SEQ ID NO: 20570 - DNA, 855 bp, Homo Sapiens
gcacgaggcttcgcccaaaatggagttaatcctgactgggagaagaaagtaattgagtattttaaggaaaagctgaaggaaaataatgctcctaagtgggtaccatcactgaacgaagttccccttcattatttgaaacctaatagttttgtgaaatttcgttgcatgattcaggatatgtttgaccctgagttttacatgggagtttatgaaacggttaaccaaaacacaaaagcacatgttcttcattttggaaaatatagagatgtagcagagtgtgggcctcaacaagaacttgatttaaactctccacgaaataccactttggaaagacagactttctattgtgttccggtgcctggggaatctacgtgggtaaaagaagcctatgttaatgcaaaccaagctcgagtcagtccctcaacatcctacactcctagtcgccacaagaggagttatgaagatgatgacgatatggacctacagcccaataagcagaaagaccaacatgcaggtgccagacaagcagggagtgttggtggtcttcaatggtgtggagagccaaaacgtttagaaactgaagcttctactgggcaacagctgaactctctgaacttgtcttctccttttgatttgaattttccattgccaggagagaagggccctgcatgccttgtgaaggtttatgaagattgggattgtttcaaagtaaatgacattcttgagctatatggcatactgtctgtggatcctgtgctgagtatactgaataatgatgaaagggatgcctctgcactgctggatccgatgggagtgcacagacacagcagaggagcagagagtacacagtcctcc

SEQ ID NO: 20571 - DNA, 1799 bp, Homo Sapiens
  misc_feature (1320)..(1332): n is a, c, g, or t
  misc_feature (1414)..(1446): n is a, c, g, or t
gcacgaggctttcttctgtggataagctggaacagatctatgaatgcaccgatacggaagatgtgtgcattgtagagagattgttctccagcagcctagtggccatcgtgagccttaaagcaccaaggaagctaaaggtttgccactttaagaagggaactgagatctgcaactacagctactccaacacgattctggctgtgaagctcaacaggcagaggctgatagtatgcctggaggagtccctgtacatccacaacattcgggacatgaaggtgctgcatacgatcagggagacgcctccaaaccctgcaggcctgtgtgcgctgtcaatcaacaacgacaactgctacttggcgtacccagggagcgcgaccatcggagaggtgcaggtcttcgataccattaatttgagagctgcaaacatgattccggctcacgacagtcctttagcggcactggcctttgacgcaagtggaactaaacttgccacggcttcggagaaggggaccgtgattagggtattttccattccagaaggacaaaaactctttgagtttcggagaggagtaaagaggtgcgtgagcatctgctccctggccttcagcatggacggcatgttcctctccgcctccagcaacactgagaccgtgcacatcttcaaactcgagactgtgaaagaaaaacccccagaggagcccaccacctggaccgggtacttcgggaaagtgctcatggcctccaccagctacctgccttcccaagtgacagaaatgttcaaccagggcagagccttcgccacggtccgcctgccattctgcggccacaaaaacatctgctcgctagccacaattcagaagatcccgcggttgttggtgggtgccgccgacgggtacctgtacatgtacaacctggacccccaggagggcggcgagtgtgccctgatgaagcagcaccggctggacggcagtctggaaacgaccaatgagatcttggactctgcctctcacgactgccccttagtcactcagacatacggcgcagctgcaggaaaaggtacttacgtgccttcatccccaacgagacttgcctacacagacgacctgggtgctgtgggtggcgcctgcctggaggacgaggccagcgccctgcgcctggatgaggacagcgagcacccgcccatgattcttcggactgactgaacttgacctgtgacctctgacccggggagcagagaacactggcttcacagaggactttgtgcattgctgctatgaactttgacctgagtcgggggagaggatggcagagactttattnnnnnnnnnnnnngattgtagtggtagtctaactccataacgctgaggaaatacatcattttcacttcagtggcttttaaatcctgcttatgaannnnnnnnnnnnnnnnnnnnnnnnnnnnnnnnngccaaaattaactgtttggtgaagcccgcaaaacctcctcgctttgcatgcatgaacgtgccaagccagcataggggagctagaagccactttccagccacctgccgttgggttttttcatatctgtacataatgccgagtgcgtaaggaaaccgtggcgtcgcgcacagtgggtctgcttgtcaaggccagttctgcagtgacaggcccaggggctgcccaccaggtgtgctgggcagacttcagctgggacagaagtccgatctccctagggccccacctggaccattttccctccgttttattttgttaattaaattctttcccaattggatcgctctgggatttcttcc

SEQ ID NO: 20572 - DNA, 1027 bp, Homo Sapiens
gcacgagggtgccatcatagctcattgaagcctcgcactcctgggctcaagtggtcctcctgcctcagcttactgagtaaggatatgtatttcttgaaagttagtttatccacttcagatttcgtggtttcatttgtaaggataaacttttcccacaaattttcaacaatcattgtagaaactaagggggagaaagtaatctcagttgttttagaaacgaaaaagttaagcattgtttacttgaagtgggcagggaagcagcactgagtaaagttcaattgagtggttacagtctagggcagtggttcccaactctccgatcagaatcatctgggaagcattttcaaacagcaaagtactttgaaaaccattattaaatagaattatgcatgaattactgtttcagatcctttaatgtggtagttggtaataataagatgaaattcctctgttgttagtaaaattatgaaattgaagttctgcagcatgtcaggccaggattattagggagattcctcgaaactagtgtgtgtttattaaaaggagaaaggataacaatagaatgttctaaaaccagaagtccaagtgcgtgtctacttatgggaccaataaataaagaacagacatttgatttgaggtgaggtaaaagcctgaaacatggaatggcattctgttttgatggattttcatttcttcgcacttctgagacggcaaagccaaccacttagaagccttccacatctttgtcacctgcctggctcctgctctctgatgtacctctgggtagtgagatggaaatggtgcctgcagaagttggggagaaggatacttttgcacagcctccatgatgtctttattgcaaatatggatgacaagggtctctggtacgggggcctcagagcaccttcgtttctcctctagaccagggacaggtgtagagataagactggcaaccagagcctcagcatccaaagatggactgaagtgggatggctgacaggcacataacttaccggaaagggaattt

SEQ ID NO: 20573 - DNA, 1347 bp, Homo Sapiens
  misc_feature (170)..(180): n is a, c, g, or t
gcacgaggggggtcttcatttccatgaaaaagggactccaagaggcagtggtggctgtggcccccaactttggtgctccagggtgggccagctgcttgtgggggcacctgggaggtcaaaggtctccaccacatcaacctattttgttttaccctttttctgtgcattgnnnnnnnnnnncctcctaaaaggaatatcacggttttttgaaacactcagtgggggacattttggtgaagatgcaatatttttatgtcatgtgatgctctttcctcacttgaccttggccgctttgtcctaacagtccacagtcctgccccgacccaccccatcccttttctctggcactccagtcccaggccttgggcctgaactactggaaaaggtctggcggctggggaggagtgccagcaatagttcataataaaaatctgttagctctcaaagctaattttttactaaagtttttatacagcctcaaattgttttattaaaaaaaagatttaaaatggtgatgcttacagcagtttgtacgagctcttaagtgttgattccatggaactgacggctttgcttgttttgattcttttccccctacttttcctaatggtttaaattctggaattacactggggttcttttgccttttttagcagaacatccgtccgtccatctgcatctctgtcccgtgactcaggggcgcccactctgcttcgattctcctcctgtggaagaaaccattttgagcatgacttttcttgatgtctgaagcgttattttgggtactttttagggaggaatgcctttcgcaataatgtatccattccctgattgagggtgggtgggtggacccaggctccctttgcacacagagcagctacttctaagccatatcgactgttttgcagaggatttgtgtgtgctgcctcaggaggggagggctggtaggagggggggagaggtctctgtcctactgctctccagagggcatttccccttgcgccttctcccacagggcccagcccctctcccctgccccagtccccagggggtactctggagtgagcagtgcccctgtgggggagcctgtaaatgcgggctcagtggaccactggtgactgggctcatgcctccaagtcagagtttccctggtgccccagagacaggagcacaagtgggatctgacctggtgagattatttctgatgacctcatcaaaaaataaacaattcccaatgttccaggtgagagctttgaaaggccttccaaacagctccgtcgcccctaacaactccaccattgggcactgccatgcagagacgtggctggcccagaatggcctgttgcc

SEQ ID NO: 20574 - DNA, 1267 bp, Homo Sapiens
ccccgggctgcaggaattcggcacgaggatagccttaagagaaaatcatgaaggagaagaggtcctcctttagctgcctctacttggtatcttagagagggcttagagggctctcagtcttctgcccatgaaaagacttctttgagcctctgccttcatggctcttagggttctgatcttgatatcagcagccccaaccactttctttctgaatgtctagtcagtatttttccccttttggtgttttatgaagccatgtggtaacgaatgaatctgtatcatttttcctacctgagtggcccaaagccagcaccaaaccctgggagtccctgaagcctaacagaacaggtagaacttgcaaaaggaatttggctgagagctcacttctaatcctgtactcactgtgtctttgtagatagaaacaagctagctttaccaaagagaaatagtgtcatagaagaacaaaacttcatatagaaagttctaggcaagtatttgatggtttccttaaggatgtgagctttgtatttccacctagccttgtaaaatgttcctgtggtattttgtgtcacacatcctacctttgatgagtctcacatcccaccttcctataaacagctaaattaattttgtttcatcttccccagaccaaaatgtttgataatcttatcaacattgtgggaggtcttgtgcaatggaaattttgccatttctccaaaactggtggcataaaggctgatgcttggggagaaccccattgctcgggacaggcaactctgttcaatgggatcttctttggtttgatgttcccattgttttctcagttctgggaagcctagtacattagtactaatgtaatcactgaaaccttttcttgaaataagggaagcagccaaactttgattaaagttgcaagttctggggacttgcgggggttgtcataaactgtaacagtgggttttggttcagcatgtaaatgcaactttgattttcttgaggaccgattgacctgtcatgtccctgtatcctcatgctcatcatctcagcaggcctgagaggctgggtcagtttgggtgttcatcatgaggattgcttctgccatggagctgatggacgtgggcaggttgctgagaagtggggtgaaagtgagtgccgggggtgggtgagtgccctggtcttgttcataggggagcctttctctagcagtggaacgctgttgtcattttctctagcatattccctttggagtctagatttgctattaatc

SEQ ID NO: 20575 - DNA, 1140 bp, Homo Sapiens
gcacgaggaagtggtccatgtgttgtgtgcagctgttgtggagatgttgattttgagattaaatctcttgatgaacagtgtgtggttggcaaaatttccaagcactggactggaattttgagagaggcatttacagacgctgataactttggaatccagttccctttagaccttgatgttaaaatgaaagctgtaatgattggtgcctgtttcctcattgacttcatgttttttgaaagcactggcagccaggaacaaaaatcaggagtgtggtagtggattagtgaaagtctcctcaggaaatctgaagtctgtatattgattgagactatctaaactcatacctgtatgaattaagctgtaaggcctgtagctctggttgtatacttttgcttttcaaattatagtttatcttctgtataactgatttataaaggtttttgtacattttttaatactcattgtcaatttgagaaaaaggacatatgagtttttgcatttattaatgaaacttcctttgaaaaactgctttgaattatgatctctgattcattgtccattttactaccaaatattaactaaggccttattaatttttatataaattatatcttgtcctattaaatctagttacaatttatttcatgcataagagctaatgttattttgcaaatgccatatattcaaaaaagctcaaagataattttctttactattatgttcaaataatattcaatatgcatattatctttaaaaagttaaatgtttttttaatcttcaagaaatcatgctacacttaacttctcctagaagctaatctataccataatattttcatattcacaagatattaaattaccaattttcaaattattgttagtaaagaacaaaatgattctctcccaaagaaagacacattttaaatactccttcactctaaaactctggtattataacttttgaaagttaatatttctacatgaaatgtttagctcttacactctatccttcctagaaaatggtaattgagattactcagatattaattaaatacaatatcatatatatattcacagagtataaacctaaataatgatctattagattcaaatatttgaaataaaaacttgatttttttgt

SEQ ID NO: 20576 - DNA, 1220 bp, Homo Sapiens
ttcggcacgaggcagccccttaggcggcggaggcggcggtcgagaccccgagggggaagcggcggctgagtcagggtcgcgcctccgttggaaacttgggctgagtaccgcggcgggcgcgagcgaggcgccctagacatcttctccctcccttgcctcagatttattgctaaacatgggtgcatttttggataaacccaaaactgaaaaacataatgctcatggtgctgggaatggtttacgttatggcctgagcagcatgcaaggatggagagtggaaatggaagatgcacacacagctgttgtaggtattcctcacggcttggaagactggtcattttttgcagtttatgatggtcatgctggatcccgagtggcaaattactgctcaacacatttattagaacacatcactactaacgaagactttagggcagctggaaaatcaggatctgctcttgagctttcagtggaaaatgttaagaatggtatcagaactggatttttgaaaattgatgaatacatgcgtaacttttcagacctcagaaacgggatggacaggagtggttcaactgcagtgggagttatgatttcacctaagcatatctactttatcaactgtggtgattcacgtgctgttctgtataggaatggacaagtctgcttttctacccaggatcacaaaccttgcaatccaagggaaaaggagcgaatccaaaatgcaggaggcagcgtgatgatacaacgtgttaatggttcattagcagtatctcgtgctctgggggactatgattacaagtgtgttgatggcaagggcccaacagaacaacttgtttctccagagcctgaggtttatgaaattttaagagcagaagaggatgaatttatcatcttggcttgtgatgggatctgggatgttatgagtaatgaggagctctgtgaatatgttaaatctaggcttgaggtatctgatgacctggaaaatgtgtgcaattgggtagtgggacacttgtttacacaagggaagtcgagataacatgagtattgtactagtttgcttttcaaatgctcccaaaggtctcagatgaagcggtgaaaaagattcagagttggataagcacttggaatcacgggttgaagagattatggagaagtctggcgaggaaggaatgcctgatccttgcccatgtcatgcgcatcttgtctgcagaaaatatccc

SEQ ID NO: 20577 - DNA, 595 bp, Homo Sapiens
gcacgagggatttacgggttacacagtacagcaattcatttgattacccagatatcattcttaaatatctagtactaagcttttcttaaatttccttcaatttgttgtttctttagaagactttaggtgttaaaatttagctttgttgtcttcatttaaaaagttgagtataggcattttttccaatgaatacctttattcttattacaggccatccgagttactcatgagaccagtgcccatgaaggtcagactgaggcaccaagtatagatgagaaagtagatcttcattttattgcattagttcatgtagatgggcatctctatgaattagatgggcggaagccatttccaattaaccatggtgaaactagtgatgaaactttattagaggatgccatagaagtttgcaagaagtttatggagcgcgaccctgatgaactaagatttaatgcgattgctctttctgcagcatagcttgtcaataatggaaacaccaaaaactgtattatttgcaactaaattttctctgccatacactaactcaaaaattttgatattttcattaacgtgatgattaaactttatgtgagtt

SEQ ID NO: 20578 - DNA, 898 bp, Homo Sapiens
  misc_feature (123)..(133): n is a, c, g, or t
  misc_feature (175)..(247): n is a, c, g, or t
  misc_feature (266)..(324): n is a, c, g, or t
  misc_feature (589)..(597): n is a, c, g, or t
  misc_feature (787)..(796): n is a, c, g, or t
gcacgagggtttaatcagttctgtgtggtgcattcctgaagtctctaatgtgactgttgagggcctggggaaaccatggcaaagtggatccagttagagcccattaatcttgatcattccggnnnnnnnnnnngtccatcttgtttcatttgcttgccccgcccccgagacggannnnnnnnnnnnnnnnnnnnnnnnnnnnnnnnnnnnnnnnnnnnnnnnnnnnnnnnnnnnnnnnnnnnnnnnnaagcttgtccaggttgatnnnnnnnnnnnnnnnnnnnnnnnnnnnnnnnnnnnnnnnnnnnnnnnnnnnnnnnnnnngggtgagccaccgtgcccaacctcacttgcttcttatccttacactcccccagccccagagaaactgccacatacaccacaaaaaccaaacatcccccaatgaccttagccccattgctccattcactcccaggtgagaattcaggcaaacgtccacaaaggtcacaggcagcgtacatacggttctgttataccccatatattaccccttcatgtcctaaagaagacattttctcttagagattttcattttagtgtatctttnnnnnnnnntcttgtgttaacttgcctccatctttttcttgggtgaggacacccaggaatgacccttttgtgtctatgatgttgctgttcacagcttttcttgataggcctagtacaatcttgggaacagggttactgtatactgaaggtctgacagtagctcttagactcgcctatcttaggtagtcatgctgtgcannnnnnnnnncattggtgtactgtgtttgatttgtctcatatatttggagtttttctgaaaaatggagcagtaatgcagcatcaacctattaaaatacattttaagcctttt

SEQ ID NO: 20579 - DNA, 3528 bp, Homo Sapiens
gcacgaggcccgggtggctcggtttcctggggctatgtaactgagctcgtcgacttaggggtccttcttcgctgccctcgccgcgtgctagcagggagtttccgctcgggagagagactgtcctcacgcccgctgcgcctcctcgacggcagagcaggcttgctcgcccgtgggagcgtcccggccgagaagccctgaggggggaggggaggccattttgtcccgaccgactccccggaaccgggcggagcggctgggagaggctgcggagccgcggtcgccgccctcggaggcactggacgccgccactgtcggggcttcctcaaagctgttcgtaggtcgcccgcgccgtctcgagcctttttcccacgcttccccggtcctccggcctgagaacgcccgagtgaggagttggccgtagtgagagggaccgatcccttggggccgccggcggcgagagcccgagccgctcctcccaatggcgaagaagacgtacgacctgcttttcaagctgctcctgatcggggattccggagtggggaagacctgcgtcctttttcgtttttcggatgatgccttcaatactacctttatttccaccataggaatagacttcaagatcaaaacagttgaattacaaggaaagaagatcaagctacagatatgggatacagcaggccaggagcgatttcacaccatcacaacctcctactacagaggcgcaatgggtatcatgctagtatatgacatcaccaatggtaaaagttttgaaaacatcagcaaatggcttagaaacatagatgagcatgccaatgaagatgtggaaagaatgttactaggaaacaagtgtgatatggacgacaaaagagttgtacctaaaggaaaaggagaacagattgcaagggagcatggtattaggttttttgagactagtgcaaaagcaaatataaacatcgaaaaggcgttcctcacgttagctgaagatatccttcgaaagacccctgtaaaagagcccaacagtgaaaatgtagatatcagcagtggaggaggcgtgacaggctggaagagcaaatgctgctgagcattctcctgttccatcagttgccatccactaccccgttttctcttcttgctgcaaaataaaccactctgtccatttttaactctaaacagatatttttgtttctcatcttaactatccaagccacctattttatttgttctttcatctgtgactgcttgctgactttatcataattttcttcaaacaaaaaaatgtatagaaaaatcatgtctgtgacttcatttttaaatgtacttgctcagctcaactgcatttcagttgtattatagtccagttcttatcaacattaaaacctatagcaatcatttcaaatctattctgcaaattgtataagaataaagttagaattaacaattttattttgtacaacagtggaattttctgtcatggataatgtgcttgagtccctataatctatagacatgtgatagcaaaagaaacaaacaaaagccaggaaaacactcattttcgccttgaatatgtaaatgggattaattttgtcctgtgccttatgtggaaaggaacttctttggttttccttttttgttctggtggaagcatgtgcaggagacatatcatccaaacataaaccattaaaatgtttgtggtttgcttggctgtaattttcaaagtagttaattgaggacaaagggtaatgcagaagtgatagctttggtttgctgagtcttgttttaagtggccttgatatttaaaactattcctgccaccatttcttctccttggccacttcttccttgcgtctccctgcatgctgctttatttgcttctccctccccaaccacctcatggtatatttaagagtgaaagggacaaactagtaggtttgtcaagtttaatataaagcactgatgtaacttgctaggtaaacggaaagataagttctaactgcctactatccaatgtcagttaattggtgtcttcccccctcatttgctctcttccctaaaatgtgtcccagatgccttcatttgctgttttacttctatgttctgcttttcctcctctctttgttcccttcctgtctatccattgagtttatgaaatggaagagttaactgcatgcactagtgtttggagggtgttgtggtttgtctttctaattaggtgtatagcctattcactttcctagaataaatctcttaacctaaatttgagtagtctgcattttggcaactcctctagcagcttggtagcctagtacaggttgtttttttaaaaaaggaaaagcaggaaggaggagtgaattttattaacatgtttgccaaatgtattgagatttggcctctgaagaacactttttcagtgttaagtttctttaccttaagattcagaaatactttagaatattattaattttaagtcctgtctttacatccttttggaaaacttgtattaccatgggtttggaaaaaggacaacgaaaggcttttcatgtaaagataagatctttagctatctctaaccctgtccttttttcactgcattttttctagttttgcttcattgcttatcattaggatagggtaagtgaagtttgctatgctgctagcatcctaagatgatacctttgttgaaagaattgtgaatagcatgattcatttctagcagaggctgagtttaggacagcagcttccattgagaagtctttctgtgtcgtgaatagcattttaatgacctcttggctcacataagcaaacaacatagggacgtatctgctatgaaaatccacaaatttttcagatagtgccctaaaaacaattttatatgcctcactggttgttattcttaggttattcccacacttgactttatcattgtttactactagtaaaaagcagcattgccaaataatccctaattttccactaaaaatataatgaaatgatgttaagctttttgaaaagtttaggttaaacctactgttgttagattaatgtatttgttgcttccctttatctggaatgtggcattagcttttttattttaaccctctttaattcttattcaattccatgacttaaggttggagagctaaacactgggatttttggataacagactgacagttttgcataattataatcggcattgtacatagaaaggatatggctaccttttgttaaatctgcactttctaaatatcaaaaaagggaaatgaagtataaatcaatttttgtataatctgtttgaaacatgagttttatttgcttaatattagggctttgccccttttctgtaagtctcttgggatcctgtgtagaagctgttctcattaaacaccaaacagttaagtccattctctggtactagctacaaattcggtttcatattctacttaacaatttaaataaactgaaatatttctagatggtctacttctgttcatataaaaacaaaacttgatttccaaaaaaacctcgtgc

SEQ ID NO: 20580 - DNA, 857 bp, Homo Sapiens
gcacgaggccaagcggtactggacgctcttcagctgccaggtgtggcccgacgactgtgacgaggacgaggaggcagccacggggcccctgggctggcgccttcctctgttgggccagcggtacctggacctcctgaccacgtggtactgcagcttcaaagactgctgccctagaggggattgcagaatctccaacaactttacaggcttagagtgggacctgaatgtgcggctgcatggccagcatttggtccagcagctggtcctaagaacagtgaggggctacttagagacgccccagccagaaaaggcccttgctctgtcgttccacggctggtctggcacaggcaagaacttcgtggcacggatgctggtggagaacctgtatcgggacgggctgatgagtgactgtgtcaggatgttcatcgccacgttccactttcctcaccccaaatatgtggacctgtacaaggagcagctgatgagccagatccgggagacgcagcagctctgccaccagaccctgttcatcttcgatgaagcggagaagctgcacccagggctgctggaggtccttgggccacacttagaacgccgggcccctgagggccacagggctgagtctccatggactatctttctgtttctcagtaatctcaggggcgatataatcaatgaggtggtcctaaagttgctcaagggctggatggtctcgggaagaaattacgatggaacacctggagccccacctccaggcggagattgtggagaccatagacaatgggctttggccacagccgtcttgtgaaggaaaacctgattgactacttcatccctttcctggctttggagtaccg

SEQ ID NO: 20581 - DNA, 1571 bp, Homo Sapiens
  misc_feature (848)..(856): n is a, c, g, or t
gcacgaggctttaatttaatatacttgattcagaaacaaaacaatagagtacaaaagtgccaagcagaacataaaacatccttacttttatttcacacagttttatatatagatagaagactgtacaatttgagccgggtgttaggccagctattttccttttcctgtgctttctcctttgagagattgacaaagcatttgttaacgtcctattatttaccttaattacatttttgtaacaaaggagtctgtaactttatttatacttatgaatatatccagggactacttctcattgctgagcagcttttaatacacctctgcttgaggagaaagtctagttcattgctactgccaagagctagttcttgtgttcatatagtaactgcacagggcttatagctgcttcattctgctactttgtaactaggagccattgcatttattaaatgtccctcagtaacgttaagtgctagttgtgattttatacataaaggccagaagctgtctgaggcaatcatgattgattgtatgtatcacttactgaagaatacctgaagtgatcatgtaactacttataagggatatccatttgtttgattacatgggtaaataatttgtcattaaacttgtgtttgaatcatgaattcccttgtttcaaaagacttgcagctaatctaaaaaactggtgatatttaatatgcatgtatgtatctaaacacccacatatatttgtggtttaagtgtgagaaatcttgctaatctatatgccacagaagagcaaaattgtatccaaatttatgccacttaaatttctttaccacgagggatagagcatgcatactggnnnnnnnnncttgatttgcccatataattggtaatggataacttaataaatttgtgtgatataaaagtagtgtatcatgttctactgtttgatcttatcccttcccatttctgcaaaggtactgttagctggaaaaaaaacattttggttagctttgtatgacagtagtctttccctttatagtttctctataaaaactggttttaaaatcagtggaaaagggcaggttgaatcaaggtgaatcaatctgaaattgagcacacctgcctgccatcgctgttccttcaactgagtgctgcacatcatgggctctgtctgtgagagaaaaatcccggtgcttggtgtccttgcatgacatggagttttgcatgtagatcaatttaaaatgtacctcttgtttacataatttgcataattttaaaagataatgttgccaaactttggaaatgttaatgttcagactgaaaatctccactacatgtaactttcttcctctggatcagtggcatggcttataatcccagccagtggtttgaactgttccagtgtcaactgccatgtgctctgcttcaagggggaactagccttttgtgaattttttgtacataagtatttgttacaaatattttagcaaatgctttctatttctcttgcttgtgcatatcttggctggcgttacagaaaaatagtgtaaacattatttcctttacccggggaatgaggg

SEQ ID NO: 20582 - DNA, 1544 bp, Homo Sapiens
  misc_feature (189)..(198): n is a, c, g, or t
  misc_feature (1115)..(1124): n is a, c, g, or t
gcacgaggattatcttctcagtgaaggtcatttgtgatggggtctaattcttattacttcaacaaatattgttttgacttggggggaggggctataaccctgctatttttcattgactctattgaactctttaggatgatgactgatcatacaaaacgtattataacattttcgtagcaaaattaaccnnnnnnnnnnccagtcacagtatttgtgaaaagtaatgagccatagtacccagtcatgttaaatgaatattaaaagcatggagaggaaacatgaggaacaatgaatttcaacatatggcttcagaacatgaagatgttcttgtatggattatagtatctagtattcaaaaatgcctgcatctcttctcttatttattgtaagtttttaaatgtataaattgtcttatatttcttaacctcttttataaaaattttcctagaaggtttatactgccttcttgctttaaagcaattggtctaaaatatatgtaatcgtcttaattaaaaagttgcagtagggttgcttttagagtattatttttttgtaagggggtgggtgggacagtaaatttgtattgtctcgatgtacagtttaacggggatagagggggaataatgtccataccattgtgtgtggaggatttacagctaagctgtagttgcagagtacatgtacagtaatgaagttcactgtgtttataaattgaaaaggtaccaggtcttacagcattttatatatcacatctttacagaataacatgatggcaatatacaagtggtattgttaggtggtttaacttagaataaaatgagaattcttcagttatattttgtactatggtttagggctatgactaatatttcaggccatttccggtgaaagaaacttagttttacaagaaaaaccatttgctactgaatgcttaaactaattttagtgtttaatgttacatgcttaaatttttttcagttttaacagtggcatatttaggcatggaaatattattatgaaatttattttcaggatctgctataaggttgaaatttagcccagctctaggcattttacaaattatttttcaagcagtcattcttgattgtttgacnnnnnnnnnnaaattaaagattgggaatgtatgtgagagtatgcatatgtatgggtgtgtgtgtgtgcgcgcaatcaaactgtggtgtaaatagattctcagtgaattctggtattcagactctattccactagtgaaagaaccattttttaaacttcccttgccttttttatttatttaattttcttggtttggagatgtcagtcccaaacaccagagtctgtacttttctataacacagctcagattaaggtagggcatatgccaaggaggttctcacctccctaaagaagggacttgaattttagggactttaattcacccctccttcaatacaactttcccccttcttgtttgcacatgccaagataactgcttttatgcaggctgtacccccttgaaaatcctttctacagtgctgctcacaaaa

SEQ ID NO: 20583 - DNA, 696 bp, Homo Sapiens
gcacgagggtgacccaccctcggtgagaaaagccttctctagcgatctgagaggcgtgccttgggggtaccggatcccccgggccgccgcctctgtctctgcctccgttatggtagcgctgccgtagcgacccgctcgcagaggaccctcctccgcttccccctcgacggggttgggggggagaagcgagggttccgccggccaccgcggtggtggccgagtgcggctcgtcgcctactgtggcccgcgcctcccccttccgagtcgggggaggatcccgccgggccgggcccggcgtcccagcgggttgggacgcggcggccggcgggcggtgggtgtgcgcgcccggcgctctgtccggcgcgtgaccccctccgccgcgagtcggctctccgcccgctcccgtgccgagtcgtgaccggtgccgacgaccgcgtttgcgtggcacggggtcgggcccgcctggccctgggaaagcgtcccacggtgggggcgcgccggtctcccggagcgggaccgggtcggaggatggacgagaatcacgagcgacggtggtggtggcgtgtcgggttcgtggctgcggtcgctccggggcccccggtggcggggccccggggctcgcgaggcggttctcggtgggggccgagggccgtccggcgtcccaggcggggcgccgcgggaccgccctcgtgtctg

SEQ ID NO: 20584 - DNA, 1561 bp, Homo Sapiens
  misc_feature (272)..(291): n is a, c, g, or t
ccccgggctgcaggaattcggcacgagggacccccttgattttactttattgaatactatcacacacataatatttacagatgtaattaaacagaatttataagattaccatgtggaatatttttcaaagttaatctgaaactcttaatgaaaatcatcaatacatgtgtgttacaatacaataatagaatgtagaacttttcagccaatatcatgatggttcatttaataaaaactctcttttcaaaaagaggtaagtcggaggaaatatnnnnnnnnnnnnnnnnnnnntatttccatatctagtcataatcttccagcttttctgtaaaataaattatagactttctcaattgcatacatgactattttcttaaataccatatttaacttttagcatattggagttgtttttcttttatcgtattttcagcataggtttaaatgtttttcttatgtttcaaaaggaatacataatctaaatttaaaaccacatctgaatattactttaaaaatagcaacgaggcacgtggccaccatcactaccttggctctttattacggctggtccacggaagggaaccacatggacaacaaaagtgagggagtcctctaaccagttctaagtgtgatttattgtagatgccagttgctttcacagacattaagaagacatcagaaatatggcatctacaccggtatgtctgagagaatacacgcatctgtgggctaatggtcctaacttccatctataacaatattcttagactagaacagacagaaaatgtagggattatggtagcacagtgacatatgagggagagttaacttctctatccgcacaaatgtaaaggcgtttcactctgattttcagtgagctagatttactacccatacacaaaagtcaagaattctagcatttctgatctttaaaaagtagagaatgtgctattatacagagttgattttgcttttgaaaaagcatagttcttcaaaagatattactatcatttttggaaaaactagatattaaaaggtaaaggatctaatcgtatctactcattttgaaacatttcaaaatcagtgtgtcagtgctagtaacttctatattaaaactctgaaaagctaacttaataatttgtaatgtattcattttgttagaataacaccactgaaggggctgataagcattacttagaaaatcatgatgaataaataccatttattatccattatgtaaaaaatattcacttgctaaaaaagcttctggaaatggtagtggtgctgagttttagggtttgtttgtttgttttcaggtaaaatttttccttacatacaataaacagatcttttcctcaagaaatccatttttcagataatatacaggcaagtttcagaatgtcatgaattatcatgtaaataactggaatgtaaattaacggtgcttgaggggccatttttaaatacagaaagtacgcctattcatgaacagtttaagtagttgaaaaaatatatacaaaaataaaggttgaagttgaaacaatggtataaagcctcgtgc

SEQ ID NO: 20585 - DNA, 864 bp, Homo Sapiens
gcacgaggcatctgtcatcagctcagctgagcagccctggatctttgccgtactgtgactgggctctttgccctatttttccctctgtctgtgcccctggatggcaggctgaagtcagaggggctgtttcattctcagccccctcagcagcactgggggaagaaagcattgtcacaacaggttctttctggccctcacccaacagcctgggcacttggccctcctcctccttgacagccctcccccttcctgcaaaggacaggggcgacaggggttggtgttgggattggctcccgctgcctgacaaccacaagtttatttggaaggctagcgggaagcccagcggctggcgtttcccttgactaaggaacagggtgcccatcagagtggggcgggcagctttgggaaggacacaagaagcagtaagagtgtaaagaggatgctggcctgggcaggccagtccagcctggccactagcagaataccaagcagtccagtggattaccctcgtggctaagcaagtgtctgcaggagcagagatggctggaaggggcctctgcacacggaagatggcttgttcagcccattcacctcctgaggatgtgggcagtctcctccaagaacacatggagctgcttcctgatcccaagcaggtcattgccactggaaggacatggccccggtgatccatgcttcatgcccacccagaaacacacccctcagtgtgtgcctcatttactttggagatcagttgtcgtttttagtgctcctttagcttactaaaacagtttttggaaacaaagccattttgaagtattcaagcaaaggaattccctaacactggaccccatgtcctttttttaa

SEQ ID NO: 20586 - DNA, 983 bp, Homo Sapiens
  misc_feature (891)..(900): n is a, c, g, or t
gcacgaggtgatttaaggttgaaatggctttagaatcatttgggtttgagggtgtgttattttgagtcatgaatgtacaagctctgtgaatcagaccagcttaaatacccacacctttttttcgtaggtgggcttttcctatcagagcttggctcataaccaaataaagttttttgaaggccatggcttttcacacagttattttattttatgacgttatctgaaagcagactgttaggagcagtattgagtggctgtcacactttgaggcaactaaaaaggcttcaaacgttttgatcagtttcttttcaggaaacattgtgctctaacagtatgactattctttcccccactcttaaacagtgtgatgtgtgttatcctaggaaatgagagttggcaaacaacttctcattttgaatagagtttgtgtgtacctctccatatttaatttatatgataaaataggtggggagagtctgaaccttaactgtcatgttttgttgttcatctgtggccacaataaagtttacttgtaaaattttagaggccattactccaattatgttgcacgtacactcattgtacaggcgtggagactcattgtatgtataagaatattctgacagtgagtgacccggagtctctggtgtaccctcttaccagtcagctgcctgcgagcagtcattttttcctaaaggtttacaagtatttagaactcttcagttcagggcaaaatgttcatgaagttattcctcttaaacatggttaggaagctgatgacgttattgattttgtctggattatgtttttggaataattttaccaaaacaagctatttgagttttgacttgacaaggcaaaacatgacagtggattctctttacaaattgnnnnnnnnnntccttattttgtataaaggacttccctttttgtaaactaatcctttttattggtaaaaattgtaaattaaaatgtgcaacttg

SEQ ID NO: 20587 - DNA, 774 bp, Homo Sapiens
ccccgggctgcaggaattcggcacgaggaaaagactcctggttcccctgttgatttgtgagggccaagtttgctagtagaaatcgacactgtttagtaaatacctctttagtattcagtggtcttcttttcaggctaattagtggattaagcaataatgaaagcactaagtttggttttgcttttgtgagatggtcagctttggtgctctccacaacatgtgtgttctgacatgtttctaatatgtggccagggcgttcagatttccagttttgaaaacaattgtatagatttcacaacacaaaaaggacatttgtggatgttactgcacattttaaattcttaacactaatttatctgtataagtgttttatatgcatatttttggacataaacagtttatgtaaaattagtaatgaatgatggcaacgagggcactgttatcttcgtttgttttcaatgatcatttagcattcaatgatggaacagctggtataacataagttgttggcatgaaatatttgagattggaaacttcttgccttgaacagaacttatatcttagattctctctcacattttcttggagctggggtttgaataggaaccagatgatgttcactgctgaaattccataatgcttcccattgaagggaagttgagaaccaggaaagctgctttcacgtcattgccatccagtactgacagggaagaaagatgtagttttccagtagtgatgaatcaaattattgaattaaatttcttcttaagaagt

SEQ ID NO: 20588 - DNA, 730 bp, Homo Sapiens
gcacgagggcctgccaccaaatcctgctcgttctcggcatgcaccgatgggatttcctggccgtttgtgctgctcataatgcccctggtgatctgggtctatagcacagacactaactttagcgatatgttctggtcttgactgacagttttccataaagaagatgtttaacttaatcaattaatttttttattgtttaaagcaactgtctatttctgctgaattttcacatgaacatactggctggtgatggaggtttcatactctagattttgttttgctttttctgactccagtggggcaagattttccttttttatacacataattaaagtgtccattgacatgtacagagaactaacactattttatgcaaatatttttttgtagatgaaaaagcatgtacagtgttctgtttaatactcatccttgtataaaaaaaatagttgagccagcagacattgtcagcaaattaattggcagcagattttaggaaatgaatgtgtgtggttttttttctaaaactaaatagcatgtattgtgtcttttgcatgatgatccggatttaatttgatatcacagtctaatttttattcataagccaatttttctgcactgagcagagtcttgctacctcagtcagtattgtttgggtttgctacttccctcacccactttgggcctcggttcacccaccccacccacctctccccaccttacccccgccccg

SEQ ID NO: 20589 - DNA, 976 bp, Homo Sapiens
gcacgaggcacaaatgccgacttctggtttgtgcctttcccatattttattaaattcgtgttttattttaaaaaattacagcaacattatcaaagacaacatatgtacaaacattttacaaaaaagaacattaccaatatcagtggcagtaagggcaagctgaagaataaatagactgagtttccgggcaatgtctgtcctcaaagacatccaaactgcgttcaggcagctgaaacaggcttctttcccagtgacaagcatatgtggtcagtaatacaaacgatggtaaatgaggctactacataggcccagttaacaaactcctcttctcctcgggtaggccatgatacaagtggaactcatcaaataatttaaacccaaggcgataacaacgctatttcccatctaaactcatttaagccttcacaatgtcgcaatggattcagttacttgcaaacgatcccgggttgtcatacagatacttgttttttacacataacgctatgccatcccttccttcactgccccagtcaggtttcctgttgttggaccgaaaggggatacattttagaaatgcttccttcaagacagaagtgagaaagaaaggagaccctgaggccaggatctattaaacctggtgtgtgcgcaaaagggagggggaaggcaggaatttgaaaggataaacgtctcctttgcgccgaggaatcaggaagcgtgactcacttgggtctgggacgataccgaaatccggtaccccaccccatcccctgccccgccgggtacctacaagctcggttcctttctcaactcccccagttccttgatctccaccttcttgtacttccccgactttctccggttggtgatcaccaggacggccatgccggcgacgagggccaccacgaccaccacgatgacggcgatgaggccggcggtgaggcgcttcatggagaacttcgggggaatctcggacgcg

SEQ ID NO: 20590 - DNA, 1596 bp, Homo Sapiens
gcacgaggagaaaagctgtttgggaatatggaaggagactgtccctctgactggaaaacagactctacatgtaggatggtaacctcagaaagcaagaatgtgaagctcactgtgagcaatgtgctgaaagagataaaaattcttaacatctttggagttattaaaggctttgtagaaccagatcactatgttgtagttggggcccagagagatgcatggggccctggagctgcaaaatccggtgtaggcacagctctcctattgaaacttgcccagatgttctcagatatggtcttaaaagatgggtttcagcccagcagaagcattatctttgccagttggagtgctggagactttggatcggttggtgccactgaatggctagagggatacctttcgtccctgcatttaaaggctttcacttatattaatctggataaagcggttcttggtaccagcaacttcaaggtttctgccagcccactgttgtatacgcttattgagaaaacaatgcaaaatgtgaagcatccggttactgggcaatttctatatcaggacagcaactgggccagcaaagttgagaaactcactttagacaatgctgctttccctttccttgcatattctggaatcccagcagtttctttctgtttttgcgaggacacagattatccttatttgggtaccaccatggacacctataaggaactgattgagaggattcctgagttgaacaaagtggcacgagcagctgcagaggtcgctggtcagttcgtgattaaactaacccatgatgttgaattgaacctggactatgagaggtacaacagccaactgctttcatttgtgagggatctgaaccaatacagagcagacataaaggaaatgggcctgagtttacagtggctgtattctgctcgtggagacttcttccgtgctacttccagactaacaacagatttcgggaatgctgagaaaacagacagatttgtcatgaagaaactcaatgatcgtgtcatgagagtggagtatcacttcctctctccctacgtatctccaaaagagtctcctttccgacatgtcttctggggctccggctctcacacgctgccagctttactggagaacttgaaactgcgtaaacaaaataacggtgcttttaatgaaacgctgttcagaaaccagttggctctagctacttggactattcagggagctgcaaatgccctctctggtgacgtttgggacattgacaatgagttttaaatgtgatacccatagcttccatgagaacagcagggtagtctggtttctagacttgtgctgatcgtgctaaattttcagtagggctacaaaacctgatgttaaaattccatcccatcatcttggtactactagatgtctttaggcagcagcttttatacagggtagataacctgtacttcaagttaaagtgaataaccacttaaaaatgtccatgatggaatattcccctatctctagaatttaagtgctttgtaatgggaactgcctctttcctgttgttgttaatgaaaatgtcagaaaccagttatgtgaatgatctctctgaatcct

SEQ ID NO: 20591 - DNA, 758 bp, Homo Sapiens
gcacgagggagactcggccccgcctctgcgccgggcagcttaaagggaccacgacccccaggaggattgaaggagaccgggaggctgccggcgtggaccgcgggaaggcggggctggggctcggcgggaggccacccccacagccgccccgggaggagcgcgcccagcagctgctggacgcggtggagcagcggcagcggcagctcctggacaccatcgcagcctgcgaggagatgttacggcagctgggccgccggcgcccggagccggctggtggcgggaacgtctcagccaaacctggagcgcccccccagccggctgtctccgccagaggcggctttccaaaggatgctggcgatggagctgcggagccctgaccatccccgagcagaataccctgacttctctccctccccagggccggtggctggactctgaacaactcccttcagtaaaggggccagtcttcactggcagtggctggtacttggctctcagcctggagtggcagctctgctagcagctgggttcactcccacttcatcctggctgaaagcagtgctgtgctttgaaatgcagccaatgaatacccagtctgattacccagatttgggcagaccagcagtgctcgccagagtggtctggcctgctatgggggatccaggtggtgttacatgtccatttcatgttttgggggcttttagccccacaaaacaccttcagtagagccttgattaaaaggaaacctgcagactctc

SEQ ID NO: 20592 - DNA, 1571 bp, Homo Sapiens
gcacgaggctgagattggggcagcggctcagcagtccctgggggaagccattgacgtgtaccaggcgtctgtggggtttgtgtgtgagagccccacagagcaggtgttgccaatgctgcggttcgtgcagaagcggggaaactcaacggtgtacgagtggaggacagggacagagccctctgtggtggaacgaccccacctcgaggagcttcctgagcaggtggcagaagatgcgattgactggggcgactttggggtagaggcagtgtctgaggggactgactctggcatctctgccgaggctgctggaatcgactggggcatcttcccggaatcagattcaaaggatcctggaggtgatgggatagactggggagacgatgctgttgctttgcagatcacagtgctggaagcaggaacccaggctccagaaggtgttgccaggggcccagatgccctgacactgcttgaatacactgaggacccggaatcagttccttgatgagctcatggagcttgagatcttcttagcccagagagcagtggagttgagtgaggaggcagatgtcctgtctgtgagccagttccagctggctccagccatcctgcagggccagaccaaagagaagatggttaccatggtgtcagtgctggaggatctgattggcaagcttaccagtcttcagctgcaacacctgtttatgatcctggcctcaccaaggtatgtggaccgagtgactgaattcctccagcaaaagctgaagcagtcccagctgctggctttgaagaaagagctgatggtgcagaagcagcaggaggcacttgaggagcaggcggctctggagcctaagctggacctgctactggagaagaccaaggagctgcagaagctgattgaagctgacatctccaagaggtacagcgggcgccctgtgaacctgatgggaacctctctgtgacaccctccgtgttcttgcctgcccatcttctccgcttttgggatgaagatgatagccagggctgttgttttggggcccttcaaggcaaaagaccaggctgactggaagatggaaagccacaggaaggaagcggcacctgatggtgatcttggcactctccatgttctctacaagaagctgtggtgattggccctgtggtctatcaggcgaaaaccacagattctccttctagttagtatagcggacttaataaaagaggaaaaaactcttgcttcagtactgacagttccttatgctgcttctctgagcctgcagttgaggcttcgcacctgttttcgtggggttcttgatccaggtgggctccctgatccaggtgggctccccaggccatcagctgtcactgtggagccccaagttgaggacttttcccctttgcttctggtgataaagaggaccccacatctacaaatggttcagtaaggggctctgggatggctacgtgtgggcccctttccataaccagggcccaggcccgccgactcaggctagaagccctgggggagcggtcaagcagcagccttgttggagccagcaaagctgctttttcctttt

SEQ ID NO: 20593 - DNA, 1260 bp, Homo Sapiens
ctcagcatggaggaatctatgtaaagcgcagtgccaaatttaacgagaaagagatgcgaaacaagttgcagagctacgtggacgcaggaactccaatgtatcttgtgatttttccagaaggtacaaggtataatccagagcaaacaaaagtcctttcagctagtcaggcatttgctgcccaacgtggccttgcagtattaaaacatgtgctaacaccacgaataaaggcaactcacgttgcttttgattgcatgaagaattatttagatgcaatttatgatgttacggtggtttatgaagggaaagacgatggagggcagcgaagagagtcaccgaccatgacggaatttctctgcaaagaatgtccaaaaattcatattcacattgatcgtatcgacaaaaaagatgtcccagaagaacaagaacatatgagaagatggctgcatgaacgtttcgaaatcaaagataagatgcttatagaattttatgagtcaccagatccagaaagaagaaaaagatttcctgggaaaagtgttaattccaaattaagtatcaagaagactttaccatcaatgttgatcttaagtggtttgactgcaggcatgcttatgaccgatgctggaaggaagctgtatgtgaacacctggatatatggaaccctacttggctgcctgtgggttactattaaagcatagacaagtagctgtctccagacagtgggatgtgctacattgtctatttttggcggctgcacatgacatcaaattgtttcctgaatttattaaggagtgtaaataaagccttgttgattgaagattggataatagaatttgtgacgaaagctgatatgcaatggtcttgggcaaacatacctggttgtacaactttagcatcggggctgctggaagggtaaaagctaaatggagtttctcctgctctgtccatttcctatgaactaatgacaacttgagaaggctgggaggattgtgtattttgcaagtcagatggctgcatttttgagcattaatttgcagcgtatttcactttttctgttattttcaatttattacaacttgacagctccaagctcttattactaaagtatttagtatcttgcagctagttaatatttcatcttttgcttatttctacaagtcagtgaaataaattgtatttagaagtgtcacgatgttcaaaggaaagggtaaaagtgttcatggggaaaagctctgtttagcacatgattttattgtattgcgt

SEQ ID NO: 20594 - DNA, 769 bp, Homo Sapiens
aataaaacaaaacaaaattttatccagcttctaggcaatcactgtttgaattttcagaaatacacatgtacttgaaaatcaatttttttataaaaataaactctgaatgtgtgattaaaaagcgagaagcccagtcttttagctgcacaaatgcgtattaaaaaggagaggcatctgtctgagatagttcaccccagtgcagagggggctttgactttgggagacagagcctgcttgaagcgtctcttcaggtcctgcatgttgggagagcggggccgagggatgatggaggctcttcttctttccccactgaggccgtgcatcttgctcacttctttgcagagatgctgaaacacatcacagacatcttcgtagttttcgctagtggaaatttcaaggaacaggctgcccagctcattggctagctgaataccgtcctgtgtctgcacctgccgggcatgcaaaaggtcccccttgttgcccacgatgatgacaggggctttagagtcagggtggaccttccggatgtgctgataaaggggtcggatggacaagtagctgtcatagtctgtgatggaatagaccagcagaaaaccctcggcccactgcacgcatttggacagggaatcgacgacctgggggaggctgtcttggatctggacgcccccgggagtatcctggatctgcagggagagctggtccccctcgacatagaccagccgtgaatacagcttgcctgtattcctcgtgccgaattcctgcagcccgg

SEQ ID NO: 20595 - DNA, 1693 bp, Homo Sapiens
caggaatacctgcagataagatgatagttactgatatatacaatcatagatttcacagaatattcgctatggatgaaaaccttagtagtattatggaacgggatgatatttatgtgtttgaaattaacatcaataggacagaagatacagagcacgtgattattcctgtttgcctaagagaaaaattcagacactcgagttatacccaccatactggttcttcactttttggtcagccctttcttatggctgtaccacgaaacaatactgaagacaaactttataatctcctgctcttgagaatgtgccgatatgtcaaaatatctactgaaactgaagaaactgaaggatccctacactgctgtaaggaccaaaatattaatgggaatggcccaaatggcatacatgaagaaggctcaccaagtgaaatggaaacagatgagccagatgatgaatccagccaggatcaagaacttccctcagagaatgaaaacagtcagtctgaagattcagttggaggagataatgattctgaaaatggattatgtactgaggatacttgcaaaggtcaactcacgggacacaaaaaacgattgtttacattccagttcaacaacttaggcaatactgatatcaactacatcaaagatgataccaggcatataagatttgatgataggcagcttaggctagatgaaagatcttttcttgctttggattgggatcctgatttgaaaaaaagatattttgatgaaaatgctgctgaggactttgaaaaacatgaaagtgtggagtataaaccttcttaaaaaaccctttgtgaaattaaaagattgcattgaaccttttacaacaaaagaaaagctaggtgctgaagatccctggtattgtccgaattgtaaagaacatcagcaagccacaaagaaaattggatttatggtccctgcctccagtacttgtagtacatctcaagcgattttcttacagtcgatacatgagagacaagttggataccttagttgattttcctatcaatgactcggatatgtcggaattcttaattaatccaaatgcaggtccttgccgctataatctgattgctgtttccaaccactatggagggatgggaggaggacactatactgcttttgcaaaaaataaagatgatggaaaatggtactattttgatgacagtagtgtctccactgcatctgaagaccaaattgtgtccaaagcagcatatgtactcttctaccagagacaagacactttcagtggaactggcttttttcctcttgaccgagaaactaaaggtgcttcagctgccactggcatcccattagaaagtgatgaagatagcaatgataatgacaatgatatagaaaatgaaaactgtatgccccctaactaatgaaagtcctagaagccataaaagagacactttcctgctggtggtatctatggaaatgatgaagttaccccccccattaaaacaaaagtctgagatggggagtttcagataaccgaatgtaaatcctttatcagattttaacttgtgcagtacttgaagtgaaacccaatgaaaactttaacagaaattgtctcttaatacatttacagtcttgtatttacaagctaaatatatataggaaatcacaaataaatcccttttaagtttgctgctgttttgatt

SEQ ID NO: 20596 - DNA, 856 bp, Homo Sapiens
gcacgaggcccaaatctcttatcacacccaaaagagaagataaataaggaagcagtgtggttcctttccaacataacagcaggcaaccagcaacaagttcaagctgtaatagatgctggattaattcctatgataattcatcagcttgctaagggggactttggaacacaaaaagaagctgcttgggcaatcagcaacttaacaataagtggcagaaaagatcaggttgagtaccttgtacagcagaatgtaataccaccgttctgtaatttactgtcagtgaaagattctcaagtggttcaggtggttctagatggtctaaaaaacattctgataatggccggtgatgaagcaagcacaatagctgaaataatagaggaatgtggaggtttggagaaaattgaagttttacagcaacatgaaaatgaagacatatataaattagcatttgaaatcatagatcagtatttctctggtgatgatattgatgaagatccctgcctcattcctgaagcaacacaaggaggtacctacaattttgatccaacagccaaccttcaaacaaaagaatttaatttttaaattcagttgagtgcagcatctttcccacattcaatatgaagcaccaccagatggctaccaaatgataagaacaacagcaacaaaaggctccaaaacacacatgcctctttgttttgatgcttctaaagcaagccatgtctcagtcactttgcagttgccaaaagtcactatcacatggactgtaaatgcatatgcatgatttcctaaactgtttaaaactctcccttaacaatctcactaccctatttttccctggttcctgggtgccccaggc

SEQ ID NO: 20597 - DNA, 1454 bp, Homo Sapiens
gcacgagggcaaaagtcactcctcagattgattcatcaaggataaggagtcacatctgtagccacccaggatgtggcaagacatactttaaaagttcccatctgaaggcccacacgaggacgcacacaggagaaaagcctttcagctgtagctggaaaggttgtgaaaggaggtttgcccgttctgatgaactgtccagacacaggcgaacccacacgggtgagaagaaatttgcgtgccccatgtgtgaccggcggttcatgaggagtgaccatttgaccaagcatgcccggcgccatctatcagccaagaagctaccaaactggcagatggaagtgagcaagctaaatgacattgctctacctccaacccctgctcccacacagtgacagaccggaaagtgaagagtcagaactaactttggtctcagcgggagccagtggtgatgtaaaaatgcttccactgcaagtctgtggccccacaacgtgggcttaaagcagaagccccacagcctggcacgaaggccccgcctgggttaggtgactaaaagggcttcggccacaggcaggtcacagaaaggcaggtttcatttcttatcacataagagagatgagaaagcttttattcctttgaatattttttgaaggtttcagatgaggtcaacacaggtagcacagattttgaatctgtgtgcatatttgttactttacttttgctgtttatacttgagaccaacttttcaatgtgattcttctaaagcactggtttcaagaatatggaggctggaaggaaataaacattacggtacagacatggagatgtaaaatgagtttgtattattacaaatattgtcatctttttctagagttatcttctttattattcctagtctttccagtcaacatcgtggatgtagtgattaaatatatctagaactatcatttttacactattgtgaatatttggaattgaacgactgtatattgctaagagggcccaaagaattggaatcctccttaatttaattgctttgaagcatagctacaatttgtttttgcatttttgttttgaaagtttaacaaatgactgtatctaggcatttcattatgctttgaactttagtttgcctgcagtttcttgtgtagatttgaaaattgtataccaatgtgttttctgtagactctaagatacactgcactttgtttagaaaaaaaactgaagatgaaatatatattgtaaagaagggatattaagaatcttagataacttcttgaaaaagatggcttatgtcatcagtaaagtacctttatgttatgaggatataatgtgtgctttattgaattagaaaattagtgaccattattcacaggtggacaaatgttgtcctgttaatttatagaagttttttggggatgtggatgtagttgggtagaaaattattagaacatcacttt

SEQ ID NO: 20598 - DNA, 918 bp, Homo Sapiens
gcacgaggattttgttcatttttattaacataggacatactaaccaaatattatcatttaataaaatcaacgttacaaagaaactcactagcaaataaacaaacgatattcacttgactcttctcttggttgaatgattttctattaattagtagtacacagctatttttatcaatttatgcttaaactgccttatgatttcaatgaaatttcttagcttttacttgttgaataattttttcaattgggaatcttttcataattcaaaatagttcctgaaaattaatgcatccttcaatgtcttctacttaagctgggtgcatttaaaatgcaacacaattctttgaaaggagactatgacatttgagcataaagcctataagaaaaagaaatgtcttccctccccccatgcttcacagagactatatgaatgttccatactcttcatatttagcaacaggagttccttagagatcaaacagcagaaaacaggaggaacttaggccatcaatggacttgtaaaacagataaaactccaaatgtattttaagattccatcttctccacagatgagaaagtgctgaaagggctcttcaacttttctttagcgacatcctctgtgccccaattagaaaaagagttgcaggatggtagtcctccttaaacagcacagactcaatctggaaagagtggcagaaacccctctcccccacaatgtatccccgaaaataaactgcccaagtgcaagagggacaatcttcagaataaataatattctgaaggactgacaaaacagactatttttaaacaagaacacaccaaatactccgaaatttcaggataaccatacatcaagtacttcgtgcaagtaatatttttaccagttaaaagtcattatgaaacacacattcttttaac

SEQ ID NO: 20599 - DNA, 861 bp, Homo Sapiens
gcacgaggcttcctctttattcgagcatactggcaatgcattggaaaacagacagctcccactaagatcacgttctggtatttctgaggttaacacttgatttagcccctacatatctttccatatatcctattatttctgaatatatgtcctcaaaatccccataaatatccatcccttcctagatggcattaactttcattttagattttaggtgactcataattcccattcacttagcctatcagaaaagtcattggcagacatatatgtccttgaaccttttttatttgtgtggattctgctcatcactgtctctgttagacttattttgtagtggctgcatcacatatttttcacttgaatttttttggaaatagctgaatgtaaatagcagggaggaagaagcaagcaaagtgagagcttttcttcatccagaattgccctctgggctcctttggtaacagatggagctccttcctagctagggagaccttatgagaagtggatggtaggaggagtcactaatgtttcaatctctatttctgtaatcttgggcaataatgcataggagttcttgataccccttcattgattactgtgtatcagttctttgttaggcatgaacgtctttattaatccatcattcttttcttcattcaacaaatatgtattgaacacctcctatatgccaggcactgtgctaggtgctgggaataccactgatgagacagacaaggtccctactcttgtggagtttacttctggtggaggagacagatgataagtaaacaaataaataatgtagtttgagatagtgattaagtgctatgaagaaaataaactagggtgatgatttta

SEQ ID NO: 20600 - DNA, 850 bp, Homo Sapiens
gcacgaggctgacttggtggagtggcagcttagaattgcagcaggagagaagattcctttgagccaggaagaaataactctgcagggccatgccttcgaagctagaatatatgcagaagatcctagcaataacttcatgcctgtggcaggcccattagtgcacctctctactcctcgagcagacccttccaccaggattgaaactggagtacggcaaggagacgaagtttccgtgcattatgaccccatgattgcgaagctggtcgtgtgggcagcagatcgccaggcggcattgacaaaactgaggtacagccttcgtcagtacaatattgttggactgcccaccaacattgacttcttactcaacctgtctggccacccagagtttgaagctgggaacgtgcacactgatttcatccctcaacaccacaaacagttgttgctcagtcggaaggctgcagccaaagagtctttatgccaggcagccctgggtctcatcctcaaggagaaagccatgaccgacactttcactcttcaggcacatgatcaattctctccattttcgtctagcagtggaagaagactgaatatctcgtataccagaaacatgactcttaaagatggtaaaaacaatgtagccatagctgtaacgtataaccatgatgggtcttatagcatgcagattgaagataaaactttccaagtccttggtaatctttacagcgagggagactgcacttacctgaaatgttctgttaatggagttgctagtaaagcgaagctgattatcctggaaacactatttacctattttcaaggaaggaagtattgagattgacattccagtccc

SEQ ID NO: 20601 - DNA, 868 bp, Homo Sapiens
gaatgaaaaccatgaatttaatgtgacattgggggagcctcatccttccctttttaccacccacccatccagcctgttgtgagttgggtgagggctgcccccagtctccgtcctgcggctctgggtgccatcctgttcctttgagctcagtcagcctcctgggctcgtctctctgtgaatctccttcttgcgtattcatatagtgcttgcttgcgctcctgcaggctctcctgccgggcccaggaagacttggcaaatgttagggctgttggctgaggggtcaccgggccagagctgggaaacttggaggcagaggctgtgggtagggactgagttcccttggtgatgtcttcaggcatgaaagctacggccccctcaagcagattagtgatagtcaagtctacacagccagtcttggccaggtctctctggatgacacccaatggcacatggggcaaaacttccttgactctctgagccagagttgccagttgcacatcaggagaaggaccaggggagggagggaaagaagactgggctgactgggggcgcaatctggggtgtctttgtcgcttcatgtgctctgctttgtcagctggagtgagccgtgtccctgtctggcccaattccttggccaccagctgttgtacacggagtgcaaactcctcattcgcttcccctagttggcgatgaacaggaccaaccccctgcgaaaggacgctgtctggcaacgccccctgaccaggaaaacgtggatccccgataaaaagccgcaggaccaggaagccaacccacttgtccgtatagcacaacacgagcaataagaaacgtctccctgaatccggtgcgaagggggggcccggtaccc

SEQ ID NO: 20602 - DNA, 923 bp, Homo Sapiens
gcacgaggcaagtacctgccagagaacgacctgaagcggctatgtgactacgtttgtgacctcctcttagaagagtcaaatgttcagccagtatcaacaccagtaacagtgtgtggagatatccatggacagttttatgacctttgtgaactgttcagaactggaggtcaggttcctgacacaaactacatatttatgggtgattttgtagacagaggttactatagtttggagaccttcacttaccttcttgcattaaaggctaaatggcctgatcgtattacacttttgcgaggaaatcatgagagtagacagataacacaggtctatggattttatgatgagtgccaaaccaaatatggaaatgctaatgcctggagatactgtaccaaagtttttgacatgctcacagtagcagctttaatagatgagcagattttgtgtgtccatggtggtttatctcctgatatcaaaacactggatcaaattcgaaccatcgaacggaatcaggaaattcctcataaaggagcattttgtgatctggtttggtcagatcctgaagatgtggatacctgggctatcagtccccgaggagcaggttggctttttggagcaaaggtcacaaatgagtttgttcatatcaacaacttaaaactcatctgcagagcacatcaactagtgcacgaaggctataaatttatgtttgatgagaagctggtgacagtatggtctgctcctaattactgctatcgttgtggaaatattgcttcgatcatggtcttcaaagatgtaaatacaagagaaccaaagttattccgggcagttccagattcagaacgtgttattcctcccataacgacaacgccatatttcctttgaggccttcgcccatcctgctgacccatttttctgccctcttctta

SEQ ID NO: 20603 - DNA, 1403 bp, Homo Sapiens
gcacgaggtcggcctgtacctcgcgcactcctcttgctccaggtccttcagtctccgctcgtctcaccgtaggctgtgacgacatgagcaacaaagaaggatcaggagggttcaggaaaaggaagcatgacaatttcccacataaccaaagaagagaagggaaggatgttaattcatcttcacccgtgatgttggcctttaaatcatttcagcaggaacttgatgcaaggcatgacaaatatgagagacttgtgaaacttagtcgggatataactgttgaaagtaaaaggacaatttttctcctccataggattacaagtgctcctgatatggaagatatattgactgaatcagaaattaaattggatggtgtcagacaaaagatattccaggtagcccaagagctatcaggggaagatatgcatcagttccatcgagccattactacaggactacaggaatatgtggaagctgtctcttttcaacacttcatcaaaacacgatcattaattagtatggatgaaattaataaacaattgatatttacgactgaagacaatgggaaagaaaataaaactccctcctctgatgcacaggataagcagtttggtacttggagactgagagtcacacctgtcgattaccttctgggagtggctgacttaactggagaattgatgcggatgtgtattaacagtgtggggaatggggacattgataccccctttgaagtgagccagtttttacgtcaggtttatgatgggttttcattcattggcaacactggaccttacgaggtttctaagaagctgtataccttgaaacaaagtttggccaaagtggagaatgcttgttatgccttgaaagtcagagggtcagaaattccaaaacatatgttggcagatgtgttttcagttaaaacagaaatgatagatcaagaagagggcatttcttagaatctaacgttactcagttactaattcttttgagaactcctaagagaccaatttgtaagacttatttagtatttcatttaactttattgtggcttttacatagaaacatattcagttgtacttgttttaaattgtatacaagctgtacataaaattagccaaatgaatcatttcttatatcttattcatgaaagtttgcatacagatgtttgcatatatgcctttttgaatttttgctggttaacctttatcatttatctttgtaatgtgaacatgcttcagagtgtaccttttgccataacctattttaatttactttttctgaagtttggagtgataatttttagtggaagcaatttgtaatttaagttggtagttatattatatatagaaaagattttttagttaaacttctggacatgagcgtcctgtttaaatttcttgtta

SEQ ID NO: 20604 - DNA, 1169 bp, Homo Sapiens
gcacgaggtgaggaccagcaaaaccggcttagtgaggagatcgagaagaagtggcaggagctggagaagctgcccctgcgggagaataagcgggtgcccctcactgccctgctcaaccaaagccgcggagagcgccgagggcccccaagtgacggccacgaggcactggagaaggaggttcaggctcttcgggcccagctggaggcgtggcgtctccaaggggaggctcctcagagtgcactgagatcccaggaggatggccacatccccccgggctacatctcacaggaggcatgtgagcgcagcctggcagagatggagtcctcgcaccagcaggtgatggaggagctgcagcggcaccacgagcgggagctgcagcgcctgcagcaggagaaggagtggctcctggctgaggagacggcagccacggcctcagccattgaagccatgaagaaggcctaccaggaagagctgagccgagagctgagcaaaacacggagtctccagcagggcccggatggcctccggaagcagcaccaggcaggtcagatgtggaggcactgaagcgagagctgcaggtgctatcggagcagtactcgcagaagtgcctggagattggggcactcatgcggcaggctgaggagcgcgagcacacgctgcgccgctgccagcaggagggccaggagctgctgcgccacaaccaggagctgcatggccgcctgtcagaggagatagaccagctgcgcggcttcattgcctcgcagggcatgggcaatggctgcgggcgcagcaacgagcggagttcctgcgagctagagaaaacgaactccagtacctaaagaaggaggtgcagtgcctccgggacgagctccagatgatgcagaaggacaagcgcttcacctcgggaaagtaccaggacgtctatgtggagctgagccacatcaagacacggtctgagcgggagatcgagcagctgaaggagcacctgcgtcttgccatggccgccctccaggagaaggagtcgatgcgcaacagcctggctgagtagaggtcccgcccagctgcagaccctccaggctggaggaccagccgccctccttccctcctggatggaagtaaaaagccaagctttctccccaccctctgtgggccacacgtgcacttgcacc

SEQ ID NO: 20605 - DNA, 1314 bp, Homo Sapiens
gcacgaggatgcagcctcatatatttgtgaagctgcatttgatgaagtgaagatggctgcccataccatgggaaatgccactgtaggtcgtcgatacctctggctgaaggattgcaaaattaatttagcttctaagaataagctggcttccactccctttaaaggtggaacattatttggaggagaagtatgcaaagtaattaaaaagcgtggaaataaacactagtaaaattaaggacaaaaagacatctatcttatctttcaggtactttatgccaacattttcttttctgttaaggttgttttagtttccagatagggctaattacaaaatgttaagcttctacccatcaaattacagtataaaagtaattgcctgtgtagaactacttgtcttttctaaagatttgcgtagataggaagcctggtacaaacaatttaacgctttctagatcacatattagtctctaagttgttttctgtttcctgctttacttatgtttttacaattctccaaaactaagaaaattctaattaggatataaggagtatttactgttcaatagaataatatgcatcctcctttatacctaggacagaattaaacatttgttacacattcagaacagtgatgttgttctttttgatacttttatctcagtatcttttcacgttccataacttgtccatatttttgctcatattttcttacttttctttgttatttattcatgtctgcaacatcaatcatggtagtctagatcaatgcaactcaaagcaccagtctacaaactgttacttatccacaggcaagataagcatgcacaagaatttaaatctagagatactttttaggtcaatgacaggatttgattttttagcaaaattttattaatagctaaagcaatgtattgatttacactctgatgcaagtaatttatctcttcattgactggtagcaaccaattcatggaccagtaccatggaccacactttgagaaacacttctttggataataatagatatcctgggatagtgcatgttcaccatctattttgtcagataatggggccttttaaaaaataatactttgctttcatgatatattgtatttttgtggaaagttaagtttagcaatatatactctaaaagcaaatttaattttttttaagccataaagaaattatactatatcccagtatctgtatgtctgtataaagcagtgtattatcctgtttcattttcgtgaatgaaagttaagagtcttaactgcagaggtattggggaaaagtataagccttaaggcatataaa

SEQ ID NO: 20606 - DNA, 1120 bp, Homo Sapiens
  misc_feature (817)..(826): n is a, c, g, or t
  misc_feature (866)..(874): n is a, c, g, or t
gcacgaggtttattgtcaacagtgtttttatttatacctacaaaaagaaaacaagatgatggtatcaaaaggacaatttacaaactaagaatagtaacatagctttcagcatcctgtgcctgaacatcacacatctacaagtctttcaagtcttaatgcaacaggaatgtgtctggagaccagcaagaacatcaatagagagcactgatcccaagcaaaagccactaaccttttagatgagaagtccacacaacgaattgttagggaggattggggagaagcagcccattgcttaatacattggaaccctttccctaagttgagtttcaaccatgaatgcaataactagcataaaacgattcttctgctcatgttctgaagccaacagcagaacctgaattataagtgacagacatggaggcagaagagttaaactctgctagatttcagctgtgctcaggccataatagtttttgaggtttggaatttactgttattttatgattacaatgtcccaggtggaaaaagggaagcaagcaatccaaataaccacttgcttgcccagagacctttccctcaaacagatgctttcaagagctgcgagagagtagggcatcccttgtggtggtacctctatgtttaaagaaagaagaaaaaaacccagaatttggttgtagaaaacaatgcccacaacagactggccagtgcttagacaaatttggggttggggggaacactttggtttgaaagcacagagcagtttgccatgtttcttctgtgcctaccattctcccttggcctcaacttctgtaagatnnnnnnnnnnacaaaaagagaagtaaagttaagaagaaagtggaaaattnnnnnnnnngatgtcaaagtttttacatgcatatatttcagcttatgctgaagacctacctgtatgttgcacattgaatcatactttcagaacccctcagaaaccatccctctctccctaaagaattttaaaaggaaaacaaaacctcgagtatagatcttacagatgagcaagcattcaggccttagccaaagaatgcagtggagccttcccccttcaactgcattgtgaatgaataccaattaaccctcgtgc

SEQ ID NO: 20607 - DNA, 931 bp, Homo Sapiens
gcacgaggtaaggatgtagggccatgtgatcaggtatcaagttgagtaggtacgcagttggcctggtgatgtatctgtgcctgttttatcttctcccaggaagagctgctttggtatagttgtttacttggattcatacaaagaacagggcagcaatcttggaaagctttctgaagcttataagaacctgaaggggtttggagggggaacagtaacaaaggctgcctttatgtctttggtcacaaagcacatagatgtatgttctgtaaagactaaagtgattgttataccagggcttcctgaccttcgggagagactcaaaaaagcagagaggagcacaaagtgaagttaatttggttggcttgctttatctggtttctcattttctttcaatttaaacctgaacataacacccttctccgatacctatccagcagactcctggttgggaagccctgtattaaattttgagaatgtacacagttttcttttgtacagtgctttacaactgctaaaagttaacttgtttaaagcaaaacaagaccttgaaaggtcaatcatattaaagctggtttgattattaatagttatcttttaggaagaagcttttttccctatgtaagatgtcatactgcagatttaaaatatagactatcaataaaatgcatgaagtgatcatttgtgcttgatcatctctccttgggtttttctttaaaaaggggaatctgctataaaggttctgttgcttcaaaccaatgtcaaatagacttgatttttagagtcatggaattacagtgcaaccttgatttttattcccctcactgctatgagtgtgggcaggtactggtttatatgttataacttccgttttatctgtgttgtgtagttgaatggcttaatcgttgagtggtaaaataaaagattatattcc

SEQ ID NO: 20608 - DNA, 1710 bp, Homo Sapiens
gcacgaggcttcctcttcctgggcagcctcgggacggggcgccgcggccgggcgggcagcatgaataaccctataccttccaatttgaaatcagaagcaaaaaaggctgccaaaatattaagagaattcacagaaataacttccagaaatggacctgataagatcattcctgctcacgtaattgcgaaggctaaaggccttgcaattctgtctgtgatcaaagccgggttcctggtgactgccagaggaggcagcgggattgtagtggcgcgccttccagatggaaaatggtctgcaccctcagccattgggatagctggccttggtggaggatttgaaataggaattgaggtatcagacttggtgataattctgaattatgaccgtgctgtagaagcttttgcaaaaggcggaaatctgaccctcggagggaacttgactgtggcggttgggcccttgggaaggaacttggaaggaaacgtggccctgagaagctccgctgccgtcttcacgtactgcaagtcaaggggactctttgcaggcgtgtctttagaagggagctgtttgattgaaaggaaagaaactaatagaaaattttattgtcaaatatccgagcttatgacattttatttggagatacaccgcggcctgctcaagccgaagatctttatgaaattcttgattcctttactgaaaagtatgaaaatgaaggacaacgaatcaatgcaagaaaagcagcaagggagcagaggaagtcttctgctaaagaattacctccaaagccattgtcaagaccacagcagtcatctgcaccagtccagctgaactctggctctcaaagcaatttgaatcaacccatagaagtgacagcgctgtattcatttgaaggacagcagcctggggatttgaattttcaagctggagacagaatcacagttatatcaaaaacagattcacattttgattggtgggaaggaaaacttcgaggtcaaactggcatttttccagccaactacgtaaccatgaattaaagcgtatactattttcttctttgagaattacaaaaaaattatttctacactgacaggatttactagttaagcaatgtttaatataaattttaaaaaacttctgttctacaaaatttccattccgtatgtaaaagattttgtttttctatataaaaagagctgactgacatatctttaaatactttgtactaactttatcacacttactgtgtcatagaatatcatacagtttatacgctcatagttctcttgtgaacacttcaaacatcgctaagcatttgatctggccatgtatatggtagctgtgttttaatttgagaatcttgagggtagagccacaaatttcaattcttacatttccatttgcaaagtgactagagaaaaagaaatcagcttaaatgaggtattaagtaatgtttagagtcgtaggtattaactagaatataaatccttagaaattgtctttataccttcaaaaattatactatgcatttatcatagaaatgtgattacaaagaagtctgactaccatgtctttaaacatatggcatctctcaacttttcttccttatggggctacatttgttcatttccagcagtagcataaacttacggtgacatggtagacttgtctctaaataaaatttttaaatgtttactaagttaaaaaacctcgtgc

SEQ ID NO: 20609 - DNA, 1492 bp, Homo Sapiens
cagtttggaaaaaatgttttattcctctttgcacagagcagtttatgaaggtggttttctcctgactccatgcatcttttacacaaagatgcccccttaaatatgcccagttatctgccccacctcagtgctggagaactggcagttagtaagtggggcagaatgcttaagtctcaggaaggtttttaaaggcatttttgtggggaggaagttctgggtcaaggggaaagattagacccaagagtgagtattccattctccatcttcctggggaaatccaaaccccaaaggttttatgaagaaaagcacctctctcagcgacctagagacagggagagcacagacctactgcttgggtgtaaggctgaggcagagagagggtaggttgcagcgactgcagacccacggcagagagtaaatgcatgtcggggagctgaggggacagagacagcctagaggcccaagtcataagttccactccttccccagttctgagtagaaacttttcttcccaagactagaatggagttttagttttaggaactggctttgctccaggacacagagaagacaaaccaggcaacgatcccacaggtagtaagggtggacagttaaggtagctaactaagagatggacactcgccactgcagttttgaagctatatgccagatcagggtacagaatgcattttatatgccctgttcaatacaatttaaatcgctgtttcttccatgttgtcccttccctatgaactattcccaaagcctcttccaaggcagaggacagggcagtaagaaggaatggaagaaaacactgaggtcactaagtggggttagggcttaagattggataaatccctacccatccccgccccactcgttctatagaaaagaattctctttctctctccccttgctgggctgttgggatgagggccaggtagaggcaaagggaggaaaacactcagcacattctttctcctactttaatctgaagtgtagctacagcaaagggcacagaatttacaaaaatgtcagggcaagggagcatgtgagcataatccagtctagaaagaaagagggtgcttcccctgccctattatctaaatatgctgggagctttactcccagaactgcaagaagaatgaaaaagaataggaagggtgtaggggaggttgagggggcaaccacaaacagaatggagatttaaggatccctgtgatccccgagatgaccctgagagcatcgattggggaactagatgaaaattcacagcagacatgcaaattttttgaagaggatgaagagccaggaacagtgaggtcttcaccgaaggagtgaccacttgatctgttctttggctgactgcagcacctgagacacggtctgctccgtaagggggacatcttcaccccttaatgccacccggtgtaccacctgctggggatcactctctaggatcacccctccatctacaatttcatcctcgtgc

SEQ ID NO: 20610 - DNA, 858 bp, Homo Sapiens
gcacgaggagatggtgcagcagacccagtccctgagagagctcatctcagatctggagcatcggctgcaggggtcagtgatggagctgcttcagggtgtggatggcgtcataaaaaggacggagaacgtgaccttgaagaagccagaaacttttccaaaaaatcaaaggagagtgtttcgagctcctgatctgaaaggaatgctagaagtgtttagagagctgacagatgtccgacgctactgggttgatgtgacagtggctccaaacaacatttcatgtgctgtcatttctgaagataagagacaagtgagctctccgaaaccacagataatatatggggcacgagggacaagataccagacatttgtgaatttcaattattgtactggcatcctgggctctcaaagtatcacatcagggaaacattactgggaggtagacgtgtccaagaaaactgcttggatcctgggggtatgtgctggcttccaacctgatgcaatgtgtaatattgaaaaaaatgaaaattatcaacctaaatacggctactgggttatagggttagaggaaggagttaaatgtagtgctttccaggatagttccttccatactccttctgttcctttcattgtgcccctctctgtgattatttgtcctgatcgtgttggagttttcctagactatgaggcttgcactgtctcattcttcaatatcacaaaccatgggatttctcatctataattttctcactgttctttttctcgccctgtatttccatatttaaatcctaaaaaatgtggagttccccatgactctgtgctcaacaagctcttgaaacttcttacaccctcagccccttt

SEQ ID NO: 20611 - DNA, 1626 bp, Homo Sapiens
  misc_feature (926)..(941): n is a, c, g, or t
gcacgaggtggaatggtaactttttccctcctcagatgaccttacttccactgcctccacaaagaccttcttaccatgacctggttttccagtgtggttctgacagcactactgataaccaaactggagtcaggtattttgtactttgcagtatttctcttgtataccagtttgtgatgttttctctaaaaacttgaagttcctcaggcctgtaacttctggaaaagatgattattcaaaataatgttttggggtaaccagtggagttgggtagaatgaccaaataattattttccaaactgggatactttttagagtgaaaggggctattattaggtgggacaaaagcaataaatgaagactgcccagaaaaaactgagactatggacattcaaatcatgggagaaaataattttgtagattatgttccattgctaatgaatttgacttagaaaagaattgccttatttttaagagattgtttcagtggttcacataaaggctcgctcactggtttctcttgagttccttacacactatataagttgttctttcagttttatgattcaactactgtttttccttcagctgactttatttttaaacacccttaaagacagatatatctcatggcaaatttggtatcctgttacagccttggctcttaaacaactcaaaatattgggataggctgtcagtatgttaaggatagttgctcctgagtcaattcttcacttactccctctgttgttcttggctggatgctaacgctgatttccactctgctgtcacaaacatttttccccccgtaaaatgtcttaatgctgtcctaccattattttaccaactgtgaaagctggctttaatttttaggaggaaaagaaaagcctgcatgtgttctttattggtatcatttaaaatatacnnnnnnnnnnnnnnnnggtaaaggtaggcgtattttaagatattttcttaacttgagcagtagccaacaggaaggataccagtgtctctctctcttagcgacacactccttggtcttgcttaccaactggaggacactaggtaaaataaccgagtatgacaattcttaattgtttacattttataacttcctgtccttcaaaagagtttgaaatgtcattttgggaaaagagagccagtcaagctagtaggctgattgtgaaaaaaatctaataccttatctttatctcaaacctctgtacaactttattttcattgatgggatactttaacaaaaatgaaaatttttttggtttttaaaatatgagtgattatgacctctttggggatcatgcttcaaaaagtcagaaacctagagacaaaactgtcattgatttttaagaagaaacacactaggtcaaaagaagatgtcctggaaataccaagtactctttaaaaaccatgcatttggagaaagtaattgtttccttgaaaaacatgattaaaaactaaaactgggatgttcctgtgtgtacacagtgccaaatggtttttcctttttatgttgtgttttagaaacagcacgaaagttttttccattttaaagtgagaaaacattatattttagacttccataattccaaatcagaagctatttttaaa

SEQ ID NO: 20612 - DNA, 1289 bp, Homo Sapiens
gcacgagggccatttaccatcccttagttaaaactgccatcatgtcagtgtataatctccctgctctctcctcaccacatcattgtgcctaataaaagtcttctcctttacctacaaagatgatgctgacctgccattagtaacccctattcatgcaggtgtttggagttgctggggctttggtaagttctcctgcaatatgggagatgtagtgagagttgtgatgtttttctgtgatcttgacccagaggttttatgtataagactactgggtctagaatctaggtttacaagccaacccagtgaggcaaacaatgcagtgctgctttgaaataccacccttttgtcagtcacagccagctgtttacaaacatgaatcacaaaaggaatgctacctttaggtggagtcttgcaaagggccatgttaggatttatgagtagaatggagttagtgctctgtgttcagctattcccatttcacatgatccttttgcttctctcttctcccaggaatggcgtcatgctcatggcatgaggtgtttgggcatcccaaacactgctcactttgctaatgtgacacagattgaagatgctgtctccttgtgggccaaactgaaattgcagaaagcttcagaacgatggcagcctgacactgaggaagaatatgaagactcaagtgggaatgttgtgaataaaaagacatacgaggatctgaaaagacaaggactgctctagtgttgagggatgtagctcagcttttgggctagccccaggcttccctaagatctgctttttctatttctcccaaccaaatcctcttaaagaccctttgctatgtagtctcatggtctaccatgcatcttgtaaaacaaggcatgctggcagattgcagggttgagatgtgttttatctgttttatattttaaaagattctgccagaaaataaaaccagaccttgttctaaagcccagggttatggaccaactcagtgcttcaggtcttaatgcctccatacctcttcctcaccaactttactagtagctgagatttaatgggcacctattatgctacatatcatgttaggtaaatctgacctgacctctttccccaccctcctttgttgctgcttccctgaatgagtattaccccaggatgaggtctgccatcagcttagttagccattgatgcaaatactagggaaagactaggaggatgagccagggttgctactaaggactaagtgtcgcaccaaggtttgccttttgtatttgcataaagaaaggagttgg

SEQ ID NO: 20613 - DNA, 688 bp, Homo Sapiens
gcacgagggctaaggggctgcggggaggccgcagcaccttctggaagacttggccttccgctctgacgcagggccgaggtgggcagtccaggccgagaggccggcggccctgaaggtgagtgaggccctcggcagctgcagccggggtgtctggtacccccccggcgtggtgcttagcccaggactttcagacgcggccgctggccgggaggctttggtgggagagacgcgatcgccgatttcggtctggcgccccttctgcggccgggacccaggcctttcacatcagctctccctccatcttcattcataggtctgcgctggggccgggacgaagcacttggtaacaggcacatcttcctcccgagtgactgcctcctaggaggacatttaggggagggcagaggcctgcagtttggcttcacggctggctatgtggacagcaagagtcgttttcgcggaagccgactggcagccaggcctgtcgggccccccgacgccgccccatttcccttccagcaaactcaactcggcaatccaagcacctagataccagcacaagtcggttaatccctgtctggactgagcctccgttggcttctgaactggaattctgcagctaacccttccacgactagaaccttaggcattggggagttttagatggactaattttattaaaggattg

SEQ ID NO: 20614 - DNA, 1200 bp, Homo Sapiens
gcacgaggaaaaaacctcagtactgcatcactgtgttgggatcgtaccaggacaatagggtcattccatatgataaaactaaaggactaaatttgttttataatgatgtcttagagggactgaaaagtttaaggaggcgatcaaactaaaatgtcttaatggctgtgtgacacacgtaaggaaaggaaagggggtcacgcacatcatgtactggaatgatctgcattaaacattgacttgtcttcagaaataagactgaagggttttgttgttccttagagttttcgtgttacatcacctaaagagatttcttttaaaaactttctagactctttgcaaaatgtatattactaacatagtttggaagaaaaattgagtagtggtaagttttgttcaagcacaatgttgaatgttaagcttcctgtattaattttagttcagttaatggttcagcccatacaaaggtgctatcctagggattttatgaattcctgaaaggaaaatagaatatgatcaattccttgccctgtggaagagtgcagaactgtggttttgttttcctttgacttctgtaaaatgtgaccgtttgacatctgtggtagattgaacggaatatcacagctgctgagtttactccatagctttcaaaccttttttattttaagaaattcttgaaaaaccctatgttccatgggaacataaagttattatagtgcctcctaaggggttaatataaatcaaggaggaagtttatatttaaggaagaattggagtgacgtatcttagaaaaggaaaggctgatgtttccatatagcttgctctccaccaggcctatcatttttctttttagagacaaacgtgacaggctagtcttgtctctctcatatgctaggtagcaaatggggtgatatttttatagaagtgggcaaaaaattattttctcaattttactgagtaggcacagaagaaaagtacagataggctgatggttattgccttattttgactgcatttctcttaaatggatcatttaaattagttcctcaagtaacagtttactggttgttcattccctgaatatgcaggctatttgtacagatagggattaaagaatacagactattagagaaggatccttatatttacatctagttatatatgtggtaaggaaatgccgattcttcattgataacaagtttt

SEQ ID NO: 20615 - DNA, 831 bp, Homo Sapiens
gcacgaggcactaacaattctgtttcgatctatgtaagagcacaatttgaatatgatccagccaaggatgacctcatcccctgtaaagaagctggcattcgattcagagttggtgacatcatccagattattagtaaggatgatcataattggtggcagggtaaactggaaaactccaaaaatggaactgcaggtctcattccttctcctgaacttcaggaatggcgagtagcttgcattgccatggagaagaccaaacaggagcagcaggccagctgtacttggtttggcaagaaaaagaagcagtacaaagataaatatttggcaaagcacaatgcagtgtttgatcaattagatcttgtcacatatgaagaagtagtaaaactgccagcattcaagaggaaaacactagtcttattaggcgcacatggtgttgggagaagacacataaaaaacactctcatcacaaagcacccagaccggtttgcgtaccctattccacatacaaccagacctccaaagaaagacgaagaaaatggaaagaattattactttgtatctcatgaccaaatgatgcaagacatctctaataacgagtacttggagtacggcagccacgaggatgcgatgtatgggacaaaactggagaccatccggaagatccacgagcaggggctgattgcaatactggacgtggagcctcaggcactgaaggtcctgagaactgcagagtttgctccttttgttgttttcattgctgcaccaactattactccaggtttaaatgaggatgaatctcttcagcgtctgcagaagagtctgacatcttac

SEQ ID NO: 20616 - DNA, 872 bp, Homo Sapiens
atcccccgggctgcaggaattcggcacgagggctctttattggcatctgaaaaagaagtgcctcagccttcaaggctgggacagaagttggggaggagctgctctgccccaggctcaataccaatagaccttcttgtatttccgggtctccttgatccccatggcctccatcacctcctcctgcagtgtctttagacagggcacataggttctttctaaagcatcttccactgatgtgtctttggggccatcaatccacgtttcagggacgatgccatcagctctgggaaattcgggtttagggataattctccctgatcgtgtggagactcgtacccgctctcctgcttcagtaaatctccactcgatctcagtgggtttcctgtccataggatccacaagtttgacctggcggtggagcaagggggcttcactagggatcatggttccccggtaatccatggtcttgccaatgtagcggtaatgtgtgttcagccctcccacgaccacccagtttcgctgccggataacttgaaccactttgccctgcttcccggcatccttgccttctaggatctccaccgtgtccccacagaacagataccagtcttcatcagagatgggttccacaaccactgggcgccgcctgatccatggggggttcttcctcttgtctgcaacagagcctggggggctcatcccatagcggtaatgggggggcagagtgaccttggatgccaaggccagcagggcagaaagacgcatgcctggaggttgtaagaaatccctttgccagcaaaacgctcgaaaccttccttgtcagctctccactttccgcggcacttcggattttcagcacatgggcctcgtgc

SEQ ID NO: 20617 - DNA, 969 bp, Homo Sapiens
gcacgaggcgggcctggaggtttgcgtaccggtcgcctggtcccggcaccagcgccgcccagtgtggtttcccataaggaagctcttcttcctgcttggcttccacctttaacccttccacctgggagcgtcctctaacacattcagactacaagtccagacccaggagagcaaggcccagaaagaggtcaaaatggggtttatattttcaaaatctatgaatgaaagcatgaaaaatcaaaaggagttcatgcttatgaatgctcgacttcagggtgcacattttcaactgctaagtcttgtgactgggtaaacaagccaggggaggagtgccttgtgcttgagagctggctcaggcatggaggccctgtctcggagcagactcttcctctcatgatgtggtccctctgtgatttggtacaacttaaggatctgcgaggaagctggaaaggcagctcatcatgcagagtgaaatgagggaaagacaaatggccatgcagattgcgtggtctcgggaattcctcaaatattttggaactttttttggccttgcagccatctctttaacagctggagcgattaaaaaaaagaagccagccttcctggtcccgattgttccattaagctttatcctcacctaccagtatgacttgggctatggaacccttttagaaagaatgaaaggtgaagctgaggacatactggaaacagaaaagagtaaattgcagctgccaagaggaatgatcacttttgaaagcattgaaaaagccagaaaggaacagagtagattcttcatagacaaatgaaatcatgcttaccaatcaaatctcaaagcacagaattattgacttgaatcatggtttttacagtttttaatgctcagatttgatattaatagattttattttaaaataataaaatgcagatattttgagcaattttaaaataaaatttataacatttcaaccc

SEQ ID NO: 20618 - DNA, 1197 bp, Homo Sapiens
ccacccacgcgtccgctcttatgttggatatgtatgaactgtgtacaccagaacttcaagagaaaatggtgtcttttcgatccaaattcaaggatctagaagataaaaaagtgaatcagcagccaaatacaagtgacaaaaagagtagtccccagaaagaagttaagtatgaacccttttcttttgctgatgatattggctccaataattgtggatactatgacttacaagcagtactaacacaccagggaaggtctagttcttcaggtcattatgtatcatgggtgaaaaggaaacaagatgaatggattaagtttgatgatgacaaagtcagcatcgtaacaccagaagatatcttacggctttctggtggtggagactggcatatcgcttacgttctactctatgggcctcgcagagttgaaataatggaagaggaaagtgaacagtaatcttcattttagtatttatgcttagatgtgaaaataaatgttatttgttgatcatttctataatccagagctttagaggaagacacataggtgggtttatgtttcacctcatttggaacaaaagaggacagaagcagaccactctgtgcaccaacctaaaaaattacagagaagagaaaattatctttggattgtgctgccctatataaaggtggcagaaagacatttttaaaaagcttattatttcttgcattattttaaaaagttcagagttgaaatgcctttcaaccatttccttctgtggtcatttttcttgctgcctttttcacccaagattcagcagtcagatgtttactgcacacctattacctattatttgctgttcttgcatggttcaaaccaccattctgtagccacccatcctttgccttatctaacaaacatttttccaggaaggtggaaaaggaagtgttgctctcattgtgtgactcagtgctgctgtccatcccatggaaacatgggcacaatcaagtatttgtccagcctattgcaggcttttcctgactttaaaataaattgtgatcaataatagtacctttgattatacatttattattgtgtctctctctgatgtactgtggattgtacatttaactttggaatggctttgtaataatcagtcttaagaaaatgttgacaagctctggttgcttatttttagaaaatgaggacatttaataataat

SEQ ID NO: 20619 - DNA, 880 bp, Homo Sapiens
  misc_feature (677)..(701): n is a, c, g, or t
tttaaaaactttaacattttattttgtgtaaaaaagggcaaatttagtgaattattttcatcttgtacacaaagttataattttaatgcttttcacatccatgctgaaaatttgcaatttggtaaaaatgaaaggaacataaatttttccaaaggaatttttcacgccattatatatacacttcatgaaaaagtttcaaacactttctcaatgatcacgagttaccaagaaaataaaagattaaatttgtacagatattgatctatatatcaaatacatacagaaatgatgtaaaaaccttatgcagtttactttgacctctgtcctcaaaagatttgcccagggacagatgcttttcttttgtataaatgactgtggctttatttaaaatatgaaaatcaaaggaagaaacccagtttaatcacagtatttttaaaatcccttcccaatattaaaggatcattaccaatatatagcaccataatacaaatattgatgggagagggtattcacatcacgcaaaattaataataataataaaaacaaacaaacactgaaaacccgtgttagtatcgtagaataagaagttgataacagctttagctttcctcatacacggcaaggaaaaggttaaagagtttaaactaccaaaagtccccaaataaatcctaacaggnnnnnnnnnnnnnnnnnnnnnnnnncccaaggtcagcagtacattttgaaccgtaaaagagaatggggcgattgagttgtacaactggagttatggctaagacataaatctcctctgcattaattatttttcggttcgtcggcagtaggagttagtgtgtgaacaatgaagagggctttagggttgtgttcagactgtagaaaa

SEQ ID NO: 20620 - DNA, 1878 bp, Homo Sapiens
  misc_feature (1796)..(1816): n is a, c, g, or t
cggccatggcgtacgcctatctcttcaagtacatcataatcggcgacacaggtgttggtaaatcatgcttattgctacagtttacagacaagaggtttcagccagtgcatgaccttactattggtgtagagttcggtgctcgaatgataactattgatgggaaacagataaaacttcagatatgggatacggcagggcaagaatcctttcgttccatcacaaggtcgtattacagaggtgcagcaggagctttactagtttacgatattacacggagagatacattcaaccacttgacaacctggttagaagatgcccgccagcattccaattccaacatggtcattatgcttattggaaataaaagtgatttagaatctagaagagaagtaaaaaaagaagaaggtgaagcttttgcacgagaacatggactcatcttcatggaaacgtctgctaagactgcttccaatgtagaagaggcatttattaatacagcaaaagaaatttatgaaaaaattcaagaaggagtctttgacattaataatgaggcaaatggcattaaaattggccctcagcatgctgctaccaatgcaacacatgcaggcaatcagggaggacagcaggctgggggcggctgctgttgagtctgtttttactgtctagctgcccaacggggcctactcacttattctttcaccccctctcctcctgctcagctgagacatgaaactatttgaaatggctttatgtcacagaagactttaatccgtcaaattcttgtataactttgaataaatggttaatgttcacttaaaagacagattttggagattgtattcatatctatttgcatttgatttctaggtcaattgatgtgattatttttgttaaatgttgtcttgtgcccttaactacgaactgaattgtattaaacactacaaagtcatcttgagtattttaaatcggtttgtgtagttaggtttcccaacatctgtggttacctaatgtttaatattatagaactgtcctcagaaactttgtcaattttcacggctataaggaaacagaaggactcttttaattctgtatttatcatttactttctgtatatatagtttaataacctgcttgggtgtaatttgccaagcttgaattctttaatgcatttgcataaattctatactgtttagagcttaaagctacagaagcattgttaggaattgcttggacactgaattttaaactttttgacattgttaacaagcatgttcatcttttcttgtcactagtccaagaaaaatatgcttaatgtatattacaaaggctttgtatatgttaacctgttttaatgccaaaagtttgctttgtccacaatttccttaagacctcttcagaaagggatttgtttgccttaatgaatactgttgggaaaaaacacagtataatgagtgaaaagggcagaagcaagaaatttctacatcttagcgactccaagaagaatgagtatccacatttagatggcacattatgaggactttaatctttccttaaacacaataatgttttcttttttcctttattcacatgatttctaagtatatttttcatgcaggacagtttttcaaccttgatgtacagtgactgtgtaaaatttttctttcagtggcaacctctataatctttaaaatatggtgagcatcttgtctgttttgaagggggatatgacaataaatctatcagatgggaaatcctgttacaaagtagaaaagctttagtaatttactcagtgtggtggnnnnnnnnnnnnnnnnnnnnnctcccttggtctataatgaaattgttacagcagtgcaaaataaaggggggccccggtaccca

SEQ ID NO: 20621 - DNA, 1114 bp, Homo Sapiens
gcacgagggcgcagccatcccgggcctcgccggggacctagggacgcaggcaacgcctgcgcccgctcaccatggtcgagggacgcgtctccgagttcctgaagaaactcggcttctcgggcgggggccgccagtaccaggcgctggagaaggacgaagaggaagccttgattgatgaacagagtgagctgaaagccatcgagaaagagaagaaggtgacagccctgccccccaaggaagcgtgcaaatgccagaaagaggatttggccagagcgttttgtgtggacttacacactgggctgtcggagttctcggtgacgcagcgccggctggcccatggctggaatgagtttgttgctgacaacagcgaacctgtgtggaagaaatacctggatcagtttaagaaccccctgatcctgctgctgctgggctctgccctggtgagtgtcctcaccaaggagtatgaggacgccgtcagcatcgccacggcagtgcttgtcgtggtcactgtcgccttcatccaggagtacaggtcggagaaatctctggaagagctgaccaagctggttcctccagaatgtaactgcctaagagaaggaaaactccagcacctgcttgctcgagaactggttcctggtgatgtcgtatctctctcgatcggagaccggatccctgcagacatccgactcactgaggtcacggacctcttggtggatgaatccagtttcaccggggaagccgagccatgtagtaaaacagacagccccttgacaggcggtggggacctcaccaccctcagcaacatcgtcttcatggggaccctggtgcagtatgggaggggccagggggtcgtgattagaacaggggaaagctctcagtttgaagaaaagtgattcagtgatttcagatagactactgaaaacctttaaagggggaaaaggaaagcatatttcagttgtttaaaacccaatatctattttttaactgattgtataactctaagatttgatgaagtatattttttattgccattttgtcctttgattatattgggaagttgactaaacttgaaaaatgtttttaaaactgtgaataaatggaaggtactttgact

SEQ ID NO: 20622 - DNA, 625 bp, Homo Sapiens
gcacgaggtggaaaccaagtttcaggggacatgagttttccagcttttatacacacgtatctcatttttatcaaaacattttgtttaattcaaaaagtacatattccatgttgatttaattctaagatgaaccaataaagacataattcttgtgacttttggacagtagatttatcagtctgtgaagcgaagccagcttcaaaacatatccccaagatttgtacttatattttcaaaagggcctggccagttatataaacctgtttttgaattataatgattaattaaaattgcaagtaggtgttttttccagtgtagttagtaaaatacttgtattttacagtgttgcataaactctagtgcttaactaactttactctaaaaattactgttgaacaccttaaatatttttctatattttctactttcatagccatattttaaccttttcaacttactggtgaccaagcttttaggtgataaagaataaaagagggaagggaagagtaaggaagctataagaaaaatagatctgattctttgttcctttacctgttagacttacaaaaagtttgtttttctaataaaatttgtatcaactttggggcatattaggttgaggcct

SEQ ID NO: 20623 - DNA, 692 bp, Homo Sapiens
gcacgagggtatctggctaacaagggtgaaattggtgatgccactccatttaatgatgctgttaacgtgcagaagatttctaatcttttatctgattatggctatcatctcagaggaaatgaggtcctgtacaatgggttcactggtcgaaaaatcacatcacaaatatttattggccccacttattaccagcgtttgaagcatatggtggatgataagattcactctcgtgctaggggacctattcagatcctcaatagacagcccatggagggtagatctcgtgatggtggcctgcgttttggagaaatggaacgagattgtcagattgcccatggagcagcccagtttttaagggaaagattgtttgaggcatcagatccatatcaggttcatgtttgcaatctttgtggaataatggcgattgccaacaccaggacccatacatatgaatgcaggggctgccgcaataaaacccagatttctttggtgcgaatgccttacgcatgcaaactattgtttcaggaacttatgtctatgagtattgcaccgcgaatgatgagtgtttagctattttacaggagtcaacaagataatttaaatatcttggtgtcttgtttctattgtgtggctttttaaaaatgacaaatatgtactgtgttgtgataaaaagtattttatttgtttaatga

SEQ ID NO: 20624 - DNA, 785 bp, Homo Sapiens
gcacgaggcctgattggctcaggctgggccttcatcaagtacgtcctgtcggataaggagattttgttcctggtggacctcatctgctgtggtgccatcctgttccccgtagtctggtccatccggcatctccaggatgcgtctggcacagacgggaaggtggcagtgaacctggccaagctgaagctgttccggcattactatgtcatggtcatctgctacgtctacttcacccgcatcatcgcatccaccggctggcgctgacgggggagaagcgagcggacatccagctgaacagcttcggtttctacaccaatggctctctggaggtggagttgagcgtcctgcggctgggcctccgggaggcagaagagaagtccctgctggtggggttcagtctcagccgggttcggtctggcagagttcgctcctattcaacccgggatttccaggactgccctctccagaaaaacagtagcagtttcctggtcctgttcctcatcaacaccaaggatctgcaggtccaggtgcggaagtatggagagcagaagacgttgtttatctttcccgggctccaccctggccttcttcgtgctcacgggctacaagttccagcccacagggaacaacccgtacctgcagctgccccaggaggacgaggaggatgttcagatggagcaagtaatgacggactctgggttccgggaggcctctccaaagtcaacaaaacagccagcgggcgggaactgttatgatcactctccacatctcagaccaaaagggtc

SEQ ID NO: 20625 - DNA, 1296 bp, Homo Sapiens
  misc_feature (863)..(877): n is a, c, g, or t
gcacgaggttaaaaaggcacatttctaccttctattgtttttaaattcaagaatagggaattagttcctggtgttgtttacgagtgtattctcgtgtcaacatacagggatttagacatttaactctctgtgccttgataagaatatcatttagagtgtagatacttttgcctttttaaaaaagccattattttatgagacttagtactcacactgcaaataactagtcagctcagttttaactttataggtttattgagtttcctttgtgtgatccatgtagatgcctcaaaatgtttcttcttcttcttttttttaatcttataagatatttttctaagtatttccagaaacatttgagagtgcccatcattttcaggtctgcagaaccatagcttccacgcacctgaacgagcacagaatgaactgacggtggaagacattatgagctgtgtccaacgttttaaccaaagcgtatcgtaccaacgatctgtgaaaatgcactggaagcttctggtcccggtttcctttgtggtctatgtgggtcttgtcctcattgtaactccgtatagatggtataggtattttaatcctggaagctgttgccttattaatgattatcttaaaatttcctccattggggcagcgtgggccaaattaaaacaaacaaaaaccgcaactcctccacagaaacacaaacacagttattccatgaagtttagtatttggttgacatagtgctcttcaaattcatcccattaccctaaaagtaataactttgatgcttgctttaactttaatcccatctctgccactttgatgctatttgggttatgatgggcaagatggcagaggtattgggnnnnnnnnnnnnnnnccattcctctctacttctgtttcctagctttttctttctggagtttaagtacagtgatggttggcttgagtacctttttaaatctagcccagtataaacattagcctgcttaatatttagacatttataggtagaattctgagcactcaactcatgtttggcattttaaagtaaaaacaagtgtgacttcgaggaccaaagaaattgtcagctatacatttatctttatgaactcatttatattcctttttaatgactcgttgttctaacatttcctagaagtgttcttataaggtctaatgtatccacaggctgttgtcttattagtaaatgcaaagtaatgactttgtctgttttactctagtctttagtacttcaaattaccttttcatatccatgatcttgagtccatttggggg

SEQ ID NO: 20626 - DNA, 953 bp, Homo Sapiens
gcacgaggctccttaactccttagtatttcatagaaaaatgactgcaacattaaagctaagaggaacacttcaacatatgtggtacaaatttatattgaagatctaaataaaccacgtattttccagtcttcgttgtgtgaagctaaatggtggctaaaaggaacactttttgtgtgattattataaactttgcattgtatttgaatcttagaacttttgtacacactaaatattgatgtcacaccatttctaatctgagcatccttagccagagaatattcattatacttcctaagtgagcaataatttaaatcagaagctattttattttaatgtaattaacctttctttacatttcttatgtgttcacctctaatctgttttaggaagagagttggttattatgttgatcccataatataaatcatatcctttatattttagaatatctcaaatgtattccttttttgtatggtgggtttgcctagggacgtgtaactacaggcttttactaagccaaggaaaaagagaatttttcttttcatcttacaaattccagatatctacaaaagatgtgaaagcactaaaaataccatttttaagcagtactttacctgttttttctttagcaaaccaggttatgtggtgtaaaggtttgttatacgtgccacaatatagcatataaatattatgccatcattccttctcttgttaaaggtagaagaataaaattgtgatttttataacctgtgcttattactcaaatggtcttcaacatctttttaaacaacacatactttttgaatgttcagtttctattttgcttgaggtattttgtacatatgtgccttgtgattgctgctgctttaaaggataaagtactctttgggggatgagtctggtttgttttgttttattttttaatgaaataaacctatattcctgattaaaa

SEQ ID NO: 20627 - DNA, 1088 bp, Homo Sapiens
  misc_feature (872)..(872): n is a, c, g, or t
  misc_feature (922)..(937): n is a, c, g, or t
gcacgaggcaagtcctcgcctgagcccgtggccctcaccgagtcagagacggagtatgtcatccgctgcaccaaacacaccttcaccaaccacatggtttttcagtttgactgcacaaacacactcaatgaccagaccttggagaatgtcacagtgcagatggagcccactgaggcctatgaggtgctctgttacgtgcctgcccggagcctgccctacaaccagcccgggacctgctacacactggtggcactgcccaaagaagaccccacagctgtggcctgcacattcagctgcatgatgaagttcactgtcaaggactgtgatcccaccactggggagactgatgacgaaggctatgaggatgagtatgtgctggaagatctggaagttactgtagctgatcacattcaaaaggtcatgaaactgaacttcgaagcagcctgggatgaggtaggggatgaatttgagaaggaggaaacgttcaccttgtctaccatcaagacacttgaagaggctgtgggtaatattgtgaagttcttgggaatgcacccttgtgagaggtcagacaaagtgccggataacaagaacacccacacgttgctcctggctggtgtgttccggggtggtcatgacatcctggtgcgctcccggctgctgcttttggacacagtgacaatgcaggtgacagccagaagtttggaggagctgccagtagacatcatcttggcatctgtgggataagaggccagcctgcataggacctcatacccttccccaacactacctggaagttgtgccttcctcatgaaactggcagaaaccccttcccaagcttctgtattgaaaaacaattaggaatcattgcaganttttttttattctgctcccacctcccacccgggactacttgctggtgacnnnnnnnnnnnnnnnnaaataggggatgattttagcttgtcctaaatcttgctgtccacccttccaggaaagggacattgtaaatgaataaaacattctcaactcctcttgaatctatcccccaagaaaccatcttatccctgtaataaatcagcatgtatttattg

SEQ ID NO: 20628 - DNA, 833 bp, Homo Sapiens
gcacgaggctgcatttggggatgtttcaaaaccggaaagatatagtggcgacaacataatctacaaaccaccagggcattctgctccggatatggtgtacttgggagctatgacaaattttgatgtgacttacaattggattcaagataaatgtgttcctcttgtccgagaaataacatttgaaaatggagaggaattgacagaagaaggactgccttttctcatactctttcacatgaaagaagatacagaaagtttagaaatattccagaatgaagtagctcggcaattaataagtgaaaaaggtacaataaactttttacatgccgattgtgacaaatttagacatcctcttctgcacatacagaaaactccagcagattgtcctgtaatcgctattgacagctttaggcatatgtatgtgtttggagacttcaaagatgtattaattcctggaaaactcaagcaattcgtatttgacttacattctggaaaactgcacagagaattccatcatggacctgacccaactgatacagccccaggagagcaagcccaagatgtagcaagcagtccacctgagagctccttccagaaactagcacccagtgaatataggtatactctattgagggatcgagatgagctttaaaaacttgaaaaacagtttgtaagcctttcaacagcagcatcaacctacgtggtggaaatagtaaacctatattttcataattctatgtgtatttttattttgaataaacagaaagaaattttgggttttaatttttttctccccgactcaaaatgcattgtcattaatatagtagcctctt

SEQ ID NO: 20629 - DNA, 723 bp, Homo Sapiens
ccgggctgcaggaattcggcacgaggctcggagggagcccggcggcttcggccttgcagctggagcagaaggagaaagacctgctgttggccgcggagctcggcaagatgcttctggagcgaaatgaagagctgcggcggcagctggagacgctgagcgcccagcacttggagcgtgaggaacggctccagcaggagaaccatgagctccggcgaggcctggcagcccgaggagccgagtgggaggcccgggccgtggagctggagggggacgtggaggccctgcgggcccagcttggggagcagcgctcagagcagcaggacagtgggcgagaacgggcacgggccctcagcgagctcagcgagcagaacctccggctcagccagcagctggctcaggcctcccagactgagcaggaacttcagagggaactggacgcccttcggggacagtgccaggctcaggcactggctggagcagagctgaggacgcggctggagagtctgcagggggaaaaccagatgctgcagagccgccggcaggacctggaggcccagatccgaggcctgcgtgaggaggtggagaagggtgagggcagactgcagaccacccacgaggagttgctgctgctgaggcgggagcggcgggagcacagcccggagctggaacgcgcacggtcagaggctggtgaggcgctgagtgcgctgcggaggctgctgcggc

SEQ ID NO: 20630 - DNA, 794 bp, Homo Sapiens
acaccagtgtttaaacttttatttcacaccatgcaaggtcaattataacacattaaaaagtgacaacagctataagctgcaattttacatttgtaaatcggaaacgtccattttcaaaagctgaacataactatcaaattgtaatagctaagcttcaatccaactgcttatacagatgaaattttctatgaacaacaatgattttatatctgtccacattctgtgatagttattcttcgacaaacagaccctttgggagaaccaaatgattcaatctttttcacagtatccatgccatccttaacaaacccaaatactacatgcttaaagtccaaatgttctgctttcttcagtgttataacaaattgagaattattggtattctggccttgattggccatggatagtaaaccaggaccagtatgtttcacatcaaaattttcatcttcaaatttgtctccataaatgtgtagttgattgaagattcttccgttggaaaggaagcaaagagatttttgactttgctatctgaagactgttcgatatcagagttctttgacagttcacattttttaggttccactttgctttcagatccactctgggctactgaactagtttcactattgttacttttcaaaggtgcattaaaactaaatccaaacaaagacccagtggctgaactgttgccgaatgcaaatggttttgatttttcactactaaaaatgcttttaacagactctgaaccaaatacaaactttggaggagaaaccctgcttttggtgttggggggg

SEQ ID NO: 20631 - DNA, 1991 bp, Homo Sapiens
  misc_feature (1935)..(1949): n is a, c, g, or t
cccacgcgtccgacgcagtcgccctacagccgctgattccccccgcatcgcctcccgtggaagcccaggcccgcttcgcagctttctccctttgtctcataaccatgtccaccaacgagaatgctaatacaccagctgcccgtcttcacagattcaagaacaagggaaaagacagtacagaaatgaggcgtcgcagaatagaggtcaatgtggagctgaggaaagctaagaaggatgaccagatgctgaagaggagaaatgtaagctcatttcctgatgatgctacttctccgctgcaggaaaaccgcaacaaccagggcactgtaaattggtctgttgatgacattgtcaaaggcataaatagcagcaatgtggaaaatcagctccaagctactcaagctgccaggaaactactttccagagaaaaacagccccccatagacaacataatccgggctggtttgattccgaaatttgtgtccttcttgggcagaactgattgtagtcccattcagtttgaatctgcttgggcactcactaacattgcttctgggacatcagaacaaaccaaggctgtggtagatggaggtgccatcccagcattcatttctctgttggcatctccccatgctcacatcagtgaacaagctgtctgggctctaggaaacattgcaggtgatggctcagtgttccgagacttggttattaagtacggtgcagttgacccactgttggctctccttgcagttcctgatatgtcatctttagcatgtggctacttacgtaatcttacctggacactttctaatctttgccgcaacaagaatcctgcacccccgatagatgctgttgagcagattcttcctaccttagttcggctcctgcatcatgatgatccagaagtgttagcagatacctgctgggctatttcctaccttactgatggtccaaatgaacgaattggcatggtggtgaaaacaggagttgtgccccaacttgtgaagcttctaggagcttctgaattgccaattgtgactcctgccctaagagccatagggaatattgtcactggtacagatgaacagactcaggttgtgattgatgcaggagcactcgccgtctttcccagcctgctcaccaaccccaaaactaacattcagaaggaagctacgtggacaatgtcaaacatcacagccggccgccaggaccagatacagcaagttgtgaatcatggattagtcccattccttgtcagtgttctctctaaggcagattttaagacacaaaaggaagctgtgtgggccgtgaccaactataccagtggtggaacagttgaacagattgtgtaccttgttcactgtggcataatagaaccgttgatgaacctcttaactgcaaaagataccaagattattctggttatcctggatgccatttcaaatatctttcaggctgctgagaaactaggtgaaactgagaaacttagtataatgattgaagaatgtggaggcttagacaaaattgaagctctacaaaaccatgaaaatgagtctgtgtataaggcttcgttaagcttaattgagaagtatttctctgtagaggaagaggaagatcaaaacgttgtaccagaaactacctctgaaggctacactttccaagttcaggatggggctcctgggacctttaacttttagatcatgtagctgagacataaatttgttgtgtactacgtttggtattttgtcttattgtttctctactaagaactctttcttaaatgtggtttgttactgtagcactttttacactgaaactatacttgaacagttccaactgtacatacatactgtatgaagcttgtcctctgactaggtttctaatttctatgtggaatttcctatcttgcagcatcctgtaaataaacattcaagtccnnnnnnnnnnnnnnngggcggccgctcgcgatctagaactagtccggacgcgtgggg

SEQ ID NO: 20632 - DNA, 1846 bp, Homo Sapiens
gcacgaggagaaggcctaaaacaaagattagaaaagaaacagaaaagagaaccaggtacaaagacaaagaaacaaactacattggcatttaagccaatcaaaaaaggaaagaagagaaatccctggtctgattcagaatcagataggagcagtgacgaaagtaattttgatgtccctccacgagaaacagagccacggagagcagcaacaaaaacaaaattcacaatggatttggattcagatgaagatttctcagattttgatgaaaaaactgatgatgaagattttgtcccatcagatgctagtccacctaagaccaaaacttccccaaaacttagtaacaaagaactgaaaccacagaaaagtgtcgtgtcagaccttgaagctgatgatgttaagggcagtgtaccactgtcttcaagccctcctgctacacatttcccagatgaaactgaaattacaaacccagttcctaaaaagaatgtgacagtgaagaagacagcagcaaaaagtcagtcttccacctccactaccggtgccaaaaaaagggctgccccaaaaggaactaaaagggatccagctttgaattctggtgtctctcaaaagcctgatcctgccaaaaccaagaatcgccgcaaaaggaagccatccacttctgatgattctgactctaattttgagaaaattgtttcgaaagcagtcacaagcaagaaatccaagggggagagtgatgacttccatatggactttgactcagctgtggctcctcgggcaaaatctgtacgggcaaagaaacctataaagtacctggaagagtcagatgaagatgatctgttttaaaatgtgaggcgattattttaagtaattatcttaccaagcccaagactggttttaaagttacctgaagctcttaacttcctcccctctgaatttagtttggggaaggtgtttttagtacaagacatcaaagtgaagtaaagcccaagtgttctttagctttttataatactgtctaaatagtgaccatctcatgggcattgttttcttctctgctttgtctgtgttttgagtctgctttcttttgtctttaaaacctgatttttaagttcttctgaactgtagaaatagctatctgatcacttcagcgtaaagcagtgtgtttattaaccatccactaagctaaaactagagcagtttgatttaaaagtgtcactcttcctccttttctactttcagtagatatgagatagagcataattatctgttttatcttagttttatacataatttaccatcagatagaactttatggttctagtacagatactctactacactcagcctcttatgtgccaagtttttctttaagcaatgagaaattgctcatgttcttcatcttctcaaatcatcagaggccgaagaaaaacactttggctgtgtctataacttgacacagtcaatagaatgaagaaaattagagtagttatgtgattatttcagctcttgacctgtcccctctggctgcctctgagtctgaatctcccaaagagagaaaccaatttctaagaggactggattgcagaagactcggggacaacatttgatccaagatcttaaatgttatattgataaccatgctcagcaatgagctattagattcattttgggaaatctccataatttcaatttgtaaactttgttaagacctgtctacattgttatatgtgtgtgacttgagtaatgttatcaacgtttttgtaaatatttactatgtttttctattagctaaattcccacaattttgtactttaataaaatgttctaaacattgcaaaaaaatataaaa

SEQ ID NO: 20633 - DNA, 1464 bp, Homo Sapiens
gcacgagggcggcaacatggcggggtccaggtggaggtcttgaggctatcagatcggtatggcattggcgtccgggcccgcaaggcgggcgctagctggctccgggcagctcggccttgggggcttcggggccccgagacgcggggcgtatgagtggggcgtgcgctccacgcggaagtcggagcctcctcccctggatagggtgtacgagatccctggactggagcccatcacctttgcggggaagatgcacttcgtgccctggctggcgcggccgatctttccgccctgggaccgcggctacaaggacccaaggttctaccgctcgccccctcttcacgagcatccgctgtacaaagaccaggcctgctatatctttcaccaccgttgccgccttctcgagggtgtaaagcaggccctctggctcaccaagaccaagttaatagaaggccttcccgagaaagtgcttagccttgttgatgatccaaggaaccacatagagaaccaagacgagtgcgttctgaatgtgatctctcacgcccgtctctggcagaccactgaggaaatccccaagagagagacctactgcccggtcatcgtggacaacctaatacagctgtgtaaatctcagattctcaagcatccttctctggccaggaggatctgtgtccaaaactccacgttttctgctacctggaaccgagagtctcttctccttcaagtccgtggttctggtggagcccgactgagcactaaggatcctctgcccaccatcgcctccagagaggagattgaagctactaagaatcatgttctagagaccttctaccccatatcacccatcatcgatcttcatgaatgcaatatttatgatgtgaaaaatgacacaggattccaggaaggctatccttacccctatccccataccctgtacttactggacaaagccaatttacgaccacaccgccttcaaccagatcagctgcgggccaagatgatcctgtttgcttttggcagtgccctggctcaggcccggctcctctatgggaatgatgccaaggtcttggagcagcccgtggtggtgcagagcgtgggcacggatggacgtgtcttccatttcctagtgtttcaactgaataccacagacctggactgtaacgagggtgtcaagaatttggcctgggtggactcagaccagctcctctatcagcatttttggtgtctcccagtgatcaaaaagagagtggttgtggaacctgttgggccagttggtttcaagccagagacattcagaaagtttttagctctatatttgcatggtgctgcgtgagcagaggacccctctgaatcctgaaacccctcttgcctctcttccacggaagagggcctggggccccgtggagcctcagtgcccgtttggcctgctgcttctcgctgacataaagagccctttgcgttgcactg

SEQ ID NO: 20634 - DNA, 1601 bp, Homo Sapiens
gcacgaggaattcttacaacagcattattttctgtgtctatgcttagtaaaaaattgggtgtataccagtggctgtccctagtaattttgatgacaggagttgcttttgtacagtggccctcagattctcagcttgattctaaggaactttcagctggttctcaatttgtaggactcatggcagttctcacagcatgtttttcaagtggctttgctggggtttactttgagaaaatcttaaaagaaacaaaacaatcagtgtggataagaaatattcagcttggtttctttggaagtatatttggattaatgggtgtatacatttatgatggagaactggtatcaaagaatggattttttcagggatataaccgactgacctggatagtagttgttcttcaggcacttggaggccttgtaatagctgctgttattaagtatgcagataatattttaaaaggatttgcaacctctttatcgataatattatcaacattgatctcctatttttggcttcaagattttgtgccaaccagtgtctttttccttggagccatccttgtaataacagctacttttttgtatggttatgatcccaaacctgcaggaaatcccactaaagcatagttgtatactatctttaactggtttttcacgatggggcactaggaatctcgacattaatcttgcacagaggacttctacagagtctgagaagatatcatcatgctgaatctgatcatactgttttttaaaagtttaaggataagacatgtgtatatgtaacaaaacacattgcatctagaaatcaaaacttgaaagtatttccagggattaggattagaaggaatattagaggaaacttgaaatctgagtttaaaaagattttacctttttgattgctgcagaaatgtcctatgcactctttgcaagagcacacaacaaatgtcagataccaatttttgcaaattagatttaatcttattaaatgtttttatcttactctttctgtacagatatatcaaatcacatgaaatatttaaagtttgaaaattataattacctataaagctgtgaaaaatagaagtataatttgaaaaaacatttcacttatcagagatttttatatttatacaaaagattactaaatgaaggattgctaaatgtttttggttcaattacataaaaattaatattctgggtctgatctgtcagagaataaatatcaaatctaaatttaatgtagagatacatactatttctccatatgaattttaagatattttagtgcttcaagactgctgaaagcaatccagttgctcctgtgctagatggtagccagagaattttatagtaatggaggttagcccttaatctcttcattgcatttcatttctgtaaatcagattaagtccttaatattattttaaattaaaatttgtgtgtaattgccattaaattttcaaaatgtaatttaaaaggattaaatactcatttaataatttaaaataattattgtataatatctacatttggagaattttgaactatcaagcatatactgtatacagttagaaagttattaaatgaacattttactc

SEQ ID NO: 20635 - DNA, 880 bp, Homo Sapiens
gcacgaggcgaagtggtagagcacgaggtcacagggaatttgaattctgaccccttgcttgaactctgccagtgtcccctctgccagctagactgcgggagccgggagcagttgattgctcacgtgtaccagcacactgcagcagtggtgagcgccaagagctacatgtgtcctgtctgtggccgggcccttagctccccggggtcattgggtcgccacctcttaatccactcggaggaccagcgatctaactgtgctgtgtgtggagcccggttcaccagccatgccacttttaacagtgagaaacttcctgaagtactaaatatggaatccctacccacagtccacaatgagggtccctccagtgctgaggggaaggatattgcctttagtcctccagtgtaccctgctggaattctgcttgtgtgcaacaactgtgctgcctaccgtaaactgctggaagcccagactcccagtgtacgcaagtgggctctacgtcgacagaatgagcctttggaagtacggctgcagcggctggaacgagagcgcacggccaagaagagccggcgggacaatgagacccccgaggagcgggaggtgaggcgcatgagggaccgtgaagccaagcgcttgcagcgcatgcaggagacagacgagcagcgggcacgccggctgcagcgggatcgggaggccatgaggctgaagcgggccaatgaaactccggaaaagcggcaggcccggctcatccgagagcgagaggccaagcggctcaagaggaggctggagaaaatggacatgatgttgcgagctcagtttggccaggacccttctgccatggcagccttagcagctgaaatgaacttcttccagctgcctgtaa

SEQ ID NO: 20636 - DNA, 631 bp, Homo Sapiens
gaggcagcctcgtataacggaactgtcattgaactagaaggagtctagggatgtgagttcttgtcctgaagctgctgctgagtggatgggtgttttggagctatccatttaatctctctgggcttcagttttcttgttaattacattaatggatgcgacagacgactgagggtctttcaggcctaagatccaatgaactgtgttcattcacatggagcttacatggaatcgtttcactcagcatatagtaggtacatggaaagtaagatttttgcttttatgttttgaaacaggtgacaaccaaagccaagcaactgaaggattcagtgacctgctccccaggaatggttagactctccgaactcaaatcgacagttcagaattccaggcccatcaaaacggccaccaccttgcccgatgacatgatcacccagcgagaggacgcagagggggtggcagcggaggaggagcaggagggagactccggtgagcaggagaccggggccactgatgcccggcctcggaggcggaagccagccaggctgctggaggctacagcaaagccggagccagaggagaagttcagagccaagcggcagaaggactttgacatagcattcaaaacgagtcc

SEQ ID NO: 20637 - DNA, 1461 bp, Homo Sapiens
  misc_feature (487)..(521): n is a, c, g, or t
  misc_feature (1131)..(1151): n is a, c, g, or t
cccccgggctgcaggaattcggcacgagggccacatattggaaaaatgattctttttggagcactgttctgctgcttagacccagtactcactattgctgctagtctcagtttcaaagatccatttgtcattccactgggaaaagaaaagattgcagatgcaagaagaaaggaattggcaaaggatactagaagtgatcacttaacagttgtgaatgcgtttgagggctgggaagaggctaggcgacgtggtttcagatacgaaaaggactattgctgggaatattttctgtcttcaaacacactgcagatgctgcataacatgaaaggacagtttgctgagcatcttcttggagctggatttgtaagcagtagaaatcctaaagatccagaatctaatataaattcagataatgagaagataattaaagctgtcatctgtgctggtttatatcccaaagttgctaaaattcgactaaatttgggtnnnnnnnnnnnnnnnnnnnnnnnnnnnnnnnnnnnccgatggcctggttgctgttcatcctaaatctgttaatgtggagcaaacagactttcactacaactggcttatctatcacctaaagatgagaacaagcagtatatacttgtatgactgcacagaggtttcctcatactgtctcttgttttttggaggtgacatttccatccagaaggataacgatcaggaaactattgctgtagatgagtggattgtatttcagtctccagcaagaattgcccatcttgttaaggaattaagaaaggaactagatattcttctgcaagagaagattgaaagtcctcatcctgtagactggaatgacactaaatccagagactgtgcagtactgtcagctattatagacttgatcaaaacacaggaaaaggcaactcccaggaactttccgccacgattccaggatggatattacagctgacagcttttcaggggtggtctgaaaagccagtttgacagccattcttcatcattgtttaaattttggctggatgccaaaccctgggacatgaacaattttcatgtgtaaggtagaagccttcagtaggtagtaaagacttaatgtgcatgacttgatgttatatgtagagnnnnnnnnnnnnnnnnnnnnnccataaaagcaatatgttctctgatcatatactctgctgtggtcatgcccactctttgggagtatattccctttatatatattgagtattgtaccacttgagaaattcctttgttctgttatacaaaattaatctttctgctcataatgattgatgataccaccagtaaaaataggatgtttaccccaaaacaagtgtcaattaagaatttgaacacaaccacattttttaaaatgaaacttctatcggaagtaaattaatttgttgtaataaagtccagtatttaataaaatgtacaatgttaaatctc

SEQ ID NO: 20638 - DNA, 874 bp, Homo Sapiens
ccccgggctgcaggaagtggaggcacttggatggaaggagctgccccttctttgttgtatccaaccctctccccaccccagatgcctggtaacccacttgctgcctgattgacttgtcttacttttagcttataggctttatactgtggtgcctcgcctggtcaagtttgtagatattctgaccaattggtatgttagaatgaaccgcagaagattaaagggtgaaaatgggatggaggattgtgtcatggccctagaaaccttgtttagtgttctgctttctctttgcagacttatggctccctacacaccttttctcactgaattgatgtaccagaatctaaaggtgctgattgaccctgtttctgttcaggacaaggacacactcagcattcactacctcatgctgccccgtgttcgagaagaattgattgacaagaaaacagagagtgcagtatctcagatgcagtctgtgattgaacttggaagagtgatcagagaccgaaaaactattcccataaagtatcctttgaaagaaattgtggttatccatcaagatccagaagctcttaaagatatcaagtctttggagaagtatatcattgaggaactcaatgttcgaaaagttacactgtctacagataaaaacaagtatggcattcggctaagggcagaaccagatcacatggtcctggggaagcgtctgaagggagcctttaaggcagtgatgacgtccatcaagcagttgagcagtgaggagctggagcagttccagaagactgggaccattgttgtggaaaggcatgaattgcacgatgaagacatccgcctcatgtacacctttgatcaggccacaggtggggactgcgcaatt

SEQ ID NO: 20639 - DNA, 1557 bp, Homo Sapiens
cccgggctgcaggcagcctctctgagccagcacctctcactttggacacgagcgggaagaatctgacggagcagaacagctacagcaacattcctcacgaagggaagcacacgccgctgtatgagcggtcctcgcccatcaacccggcccagagcggcagccccaaccacgtggattccgcctacttccctggctcttctacatcgtcatcttccgacaacgacgagggcagcggaggggcgacaaagcctttccaactctacttgcaaaaaaactttgtgtttcacaaagagaattccatcgtgctctgctccaggatcctgaggcatggccatatcagcgggaacaagattggctgggagaagacgggaagccactcagagcctcaggcacgaggagacccaggagaccaaacaaaggcagaaggctcgtccactgcctcttcaggaagccaactagccgaaggcaagggaagccagatgggcactgtccagccaatcccgtgcctcctgtcgatgcccaccaggaaccacatggacatcaccacacctcccctgccccccgtcgcacctgaggtgctgagagtggccgagcacaggcacaagaaggggctgatgtacccctacatcttccatgtcctgacgaagggtgaaatcaaaattgctgtttctattgaagatgaagccaacaaggacctgcctccggccgctctgctctataggccagttcgtcagtatgtttacggagtcctgtttagtttggcagaaagcagaaagaaactgagagacttgcttttagaaagaacagacttccaccagaattttcaccagtgatcattaaagaatgggcagcttacaaaggaaagtctcctcaaaccccggaactggttgaagctcttgccttcagggagtggacctgccccaacctgaagaggctgtggttgggtaaggcggtagaggacaagaaccgcaggatgagggccttcctggcctgcatgaggtcggacaccccagccatgctcaaccctgccaacgtgcccactcacctcatggtgctctgctgcgtcttacggtacatggtgcagtggccgggagcacgcatccttcggcgtcaggagctagatgccttcctggctcaggcgctgtcccccaaactctacgagcctgatcagctccaggagctcaagattgagaacctagatccccgaggaattcagctatcagctctcttcatgagtggagtagacatggccttgtttgcaaatgatgcatgcggacagccaatcccctgggaacactgttgtccttggatgtattttgatgggaagctcttccaatccaaactcctcaaagccagccgggaaaagaccccactcattgacctctgtgatggtcaggctgatcaggctgccaaggtagagaagatgcgccagagcgtcctcgaggggctcaacttctccaggcagagccacacgctccctttcccgccgccacctgccctgcccttctaccctgccttctgcgtacccccgggcactttgggcctgtccaccctctc

SEQ ID NO: 20640 - DNA, 731 bp, Homo Sapiens
gcacgaggtttctctccaaggccctatcccccaatgttgtcagcagatgcctggacagcacagccacccatctcccattcacatggcccacctcctgcttcccagaggactggccctacgtgctctctctcgtcctacctatcaatgcccagcatggcagaacctgcagcccttggccactgcagatggaaacctctcagtgtcttgacatcaccctacccaggcggtgggtctccaccacagccactttgagtctgtggtccctggagggtggcttctcctgactggcaggatgaccttagccaagatattcctctgttccctctgctgagataaagaattcccttaacatgatataatccacccatgcaaatagctactggcccagctaccatttaccatttgcctacagaatttcattcagtctacactttggcattctctctggcgatggagtgtggctgggctgaccgcaaaaggtgccttacacactgcccccaccctcagccgttgccccatcagaggctgcctcctccttctgattaccccccatgttgcatatcagggtgctcaaggattggagaggagacaaaaccaggagcagcacagtggggacatctcccgtctcaacagccccaggcctatgggggctctggaaggatgggccagcttgcaggggttggggagggagacatccagcttgggctttcccctttggaataaaccattgg

SEQ ID NO: 20641 - DNA, 1213 bp, Homo Sapiens
  misc_feature (981)..(989): n is a, c, g, or t
gcacgagggtcaaatccgaaccaattgggccactcgtaaaccacctgcacctaaaagtacacaagaaaacaacactaagcagttgagatttgaagatgtagtaaaccagtcaagtccaaaaaattgtactgtgtactgtggaggaattgcgtctgggttaacagatcagcttatgagacagacattctcaccatttggacaaattatggaaataagagttttcccagaaaagggctattcatttgtcagattttcaacccatgaaagtgcagcccatgccattgtttcggtgaacggtactacgattgaaggacatgtggttaaatgctattggggtaaagaatctcctgatatgactaaaaacttccaacaggtaattcgatttttcatagcattctttaaggtttccatcttacatgtcacataaaagctttggaaactctgtaaaatgaacaataaaataaagcatatagctactttcagttgattgtatttcaaaattgattatttgcggtattaactgaatcttaatactttcttttcacaggtgtcaccaccccaataaacttagacaatgataaataacagagtcctattcacataagggtgcttacttagtttttctcttccttgtctcccactctttcttcatatacggtgtttcttatgtgttccctaaaacaatactttgctttttcctaggttgactatagtcagtggggccaatggagccaagtgtatggaaacccacaacagtatggacagtatatggcaaatgggtggcaagtaccgccttatggagtatacgggcaaccatggaatcaacaaggatttggagtagatcaatcaccttctgctgcttggatgggtggatttggtgctcagcctccccaaggacaagctcctccccctgtaatacctcctcctaaccaagccggatatggtatggcaagttaccaaacacagtgagccgggactctnnnnnnnnnttgtaattcatgataggcttcgatttcctgtgacactctgaagacatgaaagtagacatcggaaaatgaaaatatttattttaaaaattgaaatgtttggaacctttagcacagatttgctttggtgaaggacacgtgtcttctagttctgcctttttaagtttttgttcatgatggatatgaacatgatttttctttatgtacaaaaactaaaataaagtcag

SEQ ID NO: 20642 - DNA, 1049 bp, Homo Sapiens
gcacgaggggaggcaccttggataagctggagtctattcctggattcaatgtcatccagagcccagagcagatgcaagtgctgctggaccaggcgggctgctgtatcgtgggtcagagtgagcagctggttcctgcggacggaatcctatatgcagccagagatgtgacagccaccgtggacagcctgccactcatcacagcctccattctcagtaagaaactcgtggaggggctgtccgctctggtggtggacgttaagttcggaggggccgccgtcttccccaaccaggagcaggcccgggagctggcaaagacgctggttggcgtgggagccagcctagggcttcgggtcgcggcagcgctgaccgccatggacaagcccctgggtcgctgcgtgggccacgccctggaggtggaggaggcgctgctctgcatggacggcgcaggcccgccagacttaagggacctggtcaccacgctcgggggcgccctgctctggctcagcggacacgcggggactcaggctcagggcgctgcccgggtggccgcggcgctggacgacggctcggcccttggccgcttcgagcggatgctggcggcgcagggcgtggatcccggtctggcccgagccctgtgctcgggaagtcccgcagaacgccggcagctgctgcctcgcgcccgggagcaggaggagctgctggcgcccgcagatggcaccgtggagctggtccgggcgctgccgctggcgctggtgctgcacgagctcggggccgggcgcagccgcgctggggagccgctccgcctgggggtgggcgcagagctgctggtcgacgtgggtcagaggctgcgccgtgggaccccctggctccgcgtgcaccgggacggccccgcgctcagcggcccgcagagccgcgccctgcaggaggcgctcgtactctccgaccgcgcgccattcgccgccccctcgcccttcgcagagctcgttctgccgccgcagcaataaagctcctttgccgcgaaagcaagctatcattaaacatgtctgttt

SEQ ID NO: 20643 - DNA, 1320 bp, Homo Sapiens
gcacgaggctcaccacctcacagactctggaaacagtgcccctaatcccagaggtagtggagcttccaccgtcactgcccaggagctctccttgtgtacatcatcatggttccccaggagtggatttaccagttaccataccagaagtttcttcagtccctgatcagatcagaggagagcccagaggctcatcaggacttgtaaacagcagacagaagagctatgaccactcaaggcaccatcatgggagcagcattgctggaggactggtgaagggggctttgtctgttgctgcctctgcatacaaggccctgtttgctgggccaccagtcactgcacagccaataatttctgaagatcagacagcagccctgatggcccgtctctttgaaatgggattctgtgacaggcagctgaacctacggctgctgaagaaacacaattacaatatcctgcaggttgtgacagaacttcttcagttaaacaacaacgactggtacagccaacgctattgaggagtgaccttgtattaaataactgcctgctgctcagagatgatctttattctgtcattggggtatgggatagaagcccttgcttatttttaatctgatgaatctgtatagagcccatcgttgagttaccaagacaatacctgctacagtattttggggagcaaactaaagaccagaagttaaattttcactttagacattggatgaatagtatgaagacagtttttcagttgatttggataaaactattttagtgcattgacaagtgtaacttcaacttcatatagaaccatttttctttctgcttttattgaaactgagtatttttctttggctaatgtggattttttatggggatatctgttaattttcaggttttgaaagacattaacctcggaagttgtttttaagaattattctcataattcttattctcataatttctgtaatccacctcaagcttcatagttatttgggcattgaaataacacccagagcatgatagaaatgttgttactcttccctctctcaaggagaaagtaattttcctgccatacttaataattggcaccgttgctttctaaagactcccatggtgcattcaagagtatcccaactttcaagggatctccgcatttcaatgaaaggaggagagtgtgctgataaacctacagcactattgagcaatgtctattatagtattttgcataccttttatagtaagggaaaaaataaggtattgtgaaattttggctaatctatagaaaaggaaaaatctcgttattaaagagaagtaaatttaaca

SEQ ID NO: 20644 - DNA, 762 bp, Homo Sapiens
gcacgaggcgcagctcagctacagcacagatcagcaccatgaagcttctcacgggcctggttttctgctccttggtcctgagtgtcagcagccgaagcttcttttcgttccttggcgaggcttttgatggggctcgggacatgtggagagcctactctgacatgagagaagccaattacatcggctcagacaaatacttccatgctcgggggaactatgatgctgccaaaaggggacctgggggtgcctgggccgcagaagtgatcaggtaactggagctcctgggacgttagggctgggtgagcagagcttgcctgccttggacagtcaggagggagacgagctccttgtagagaagttagaggctgtggtccctcctcttcttgccctcctcttcttgccctcccttggaacagggagaatgggagggtgagctgttgctcactggcctgatgattaatctccttcttgcctgcctggactacagcaatgccagagagaatatccagagactcacaggccatggtgcggaggactcgctggccgatcaggctgccaataaatggggcaggagtggcagagaccccaatcacttccgacctgctggcctgcctgagaaatactgagcttcctcttcactctgctctcaggagacctggctatgaggccctcggggcagggatacaaagttagtgaggtctatgtccagagaagctgagatatggcatataataggcatctaataaatgcttaagaggtggg

SEQ ID NO: 20645 - DNA, 882 bp, Homo Sapiens
gcacgaggctggcagttccttccccagaaggagagattcctctgccatggagtcctacgatgtgatcgccaaccagcctgtcgtgatcgacaacggatccggtgtgattaaagctggttttgctggtgatcagatccccaaatactgctttccaaactatgtgggccgacccaagcacgttcgtgtcatggcaggagcccttgaaggcgacatcttcattggccccaaagctgaggagcaccgagggctgctttcaatccgctatcccatggagcatggcatcgtcaaggattggaacgacatggaacgcatttggcaatatgtctattctaaggaccagctgcagactttctcagaggagcatcctgtgctcctgactgaggcgcctttaaacccacgaaaaaaccgggaacgagctgccgaagttttcttcgagaccttcaatgtgcccgctcttttcatctccatgcaagctgtactcagcctttacgctacaggcaggaccacaggggtggtgctggattctggggatggagtcacccatgctgtgcccatctatgagggctttgccatgccccactccatcatgcgcatcgacatcgcgggccgggacgtctctcgcttcctgcgcctctacctgcgtaaggagggctacgacttccactcatcctctgagtttgagattgtcaaggccataaaagaaagagcctgttacctatccctaaacccccaaaaggatgagacgctagagacagagaaagctcagtactacctgcctgatggcagcaccattgagattggtcctttcccgattcccggcccctgagttgctcttcaggccagatttgattggagaggagagtgaaggcatccccgaggtcc

SEQ ID NO: 20646 - DNA, 1295 bp, Homo Sapiens
  misc_feature (115)..(162): n is a, c, g, or t
  misc_feature (948)..(958): n is a, c, g, or t
ccacgcgtccgcaagaagtacaactaaaacagcagctttctctttatatggataagtttgaagaattccagactaccatggcaaaaagcaatgaactgtttacaaccttcagacnnnnnnnnnnnnnnnnnnnnnnnnnnnnnnnnnnnnnnnnnnnnnnnncaataatttggcgtaccaaatgggaaaacaataataaagcacttctgcaaatggctgaagagaaaacagtccgtgataaagagtacaaggcccttcaaataaaactggaacggttagagaagctgtgcagggctcttcagacagaaaggaatgagctcaatgagaaggtggaagtcctgaaagagcaggtatccatcaaagcggccatcaaagcggcgaacagggatttagcaacacctgtgatgcagccctgtactgccctggattctcacaaggagctgaacacttcctcgaaaagagccctgggagcgcacctggaggctgagcccaagagtcagagaagcgctgtgcaaaagcccccgtccacaggctctgctccggccatcgagtcggttgactaagatgaggtgtgatcactgtattgagagatatattttgtgtataactttctctgttagtagttaactattggttttgtggtgaaaattttcttactttttctaccatatctgtattttcttagaactactggacttatgtggtacaggaggctgcttagcagttttgaatagtttaatctataaattttcctcagctgtgttgcacatcagcctcgttctccctccactggaatgcatgtgttcattgccttgtcctttctctccctgctccttgcacattatcatcctaatgaaaatttcactgacagggccgaccattacaagggaactttgttctgacgatggttccttgatgtgaaaacaatattaatttaaacgtcttagnnnnnnnnnnnataatattattcagaaaaacaaaataccaaggcgattagttttgtctaataacccatttaaatgccaagtaaaaataaaactcctagtgttgggtcagaagcatatttgattgaaattagctttttgaaaacatttatatctcgggacaaattgagatggccacatgcctagaatcctaagtttcggcagaatatgtatataaagatgtcacttgtggacaaaatagtacatagaggcaaatcactagacaaataagcttagtgtttacgtgactgaacagtcatcctgctttggtttcaggtgtgggatttggacatgaggggctcccgtagagga

SEQ ID NO: 20647 - DNA, 1227 bp, Homo Sapiens
tatttctcttctcccgttaaaggctaagaaagcctctgactgaacagaatagcttggaaatcaacttcaaatcactgataccaatatcaatcccaatattttataatccttcttccccctacattttgcttctctttattcaaattcaggttcaatctaaaccaatctggggatatttccaaagggtaagggccataagctccatctttgcttgggttttgttgagctttattggcttggaccatgtactctgtaggtgccgtgtctgctacatgcatcactgtagcttgtggagggagggaggatggaagagatgctcatgccagaaatcacctcttttgaaattcagagtccttcctagtcttcccaggaaaaactacagcatcaaaagaacctcattatccttttctctcttttcgtgtgggacaaccctttcaggcgtgtccaagttattgaagtgaaaactgcaggagagctccttgagaaaggtgatcatttcctatttatcctcatacttccagcatctcgttcaatgcaaatcacagatcacaaatgtttattaaatggacagttttttaagggactcaataaacagtcgaaaacgtttgttgagagaattctcctctgtgccaaataagaaacaatactcaagaactggcagcaaacaacatccagaaagatgttagtcccaagaggctgccactgtctccaagctaatgtgcccacaaccacactggtcttggatgacacggcctggaagcgctggcaatcccgtcaaatccctgaactccgcccccaagcactttctttccaccttttcttccaactcaaagcctcttgcccaaagccaatttatgacacaggtttctaagcaatgcccagatattccatgaagtacataacctagaaacagaagtggcaaaaagcatgccagatgccctctcttttcagccctttcttggtaaggaggatctaggcagggtcaagccctcaagcgtcccaccctgcagctcccactggcgtccgatccagactccaagccttagcagggcctcttcaaaacgccgaaggtggtggggaaaacaggaagcaccttcgcatcgctccactcgggggtcacccaacccagcatcgacccagcggacgctcggcagctcggggaggatgcgcggacaccgaacggaagcgtccgctcctctccgccaccctcccggggtcgcctcgtgc

SEQ ID NO: 20648 - DNA, 1527 bp, Homo Sapiens
gcacgaggggtggttatttgtacataatcggaggtgcagaatcttggaattgtctgaacacagtagaacgatacaatcctgaaaataatacctggactttaattgcacccatgaatgtggctaggcgaggagctggagtggctgttcttaatggaaaactgtttgtatgtggtggctttgatggttctcatgccatcagttgtgtggaaatgtatgatccaactagaaatgaatggaagatgatgggaaatatgacttcaccaaggagcaatgctgggattgcaactgtagggaacaccatttatgcagtgggaggattcgatggcaatgaatttctgaatacggtggaagtctataaccttgagtcaaatgaatggagcccctatacaaagattttccagttttaacaaatttaagaccctctcaaactaacaggcttagtgatgtaattatggttagtagaggtacacttgtgaataaagagggtgggtgggtatagatgttgctaacagcaacacaaagcttttgcatattgcatactattaaacatgctgtacatactttttgggtttatttggaaaggaatgcaaagatgaaggtctgttttgtgtacttttaagactttggttattttactttttggaaaagaataaaccaagaattgattgggcacatcatttcaagaagtcccctctcctccacatttgttttgccaatttgcacattaaatgactcttccctcaaatgtgtactatggggtaaaaggggtagggtttaaagatgtagacagttgggttttttaagggccctttttcaataactgggacactctataacaaaggatacttatttaaatagatgacattgactatttttgtttttattaaaaggaagcttacatgcctaccaatatttaatcttttatgattgcctttttataactttttatattctcagcagagtgctttaccaattgaagtaaaatgtggcaggctggagttattgaagcagagtggcagtcttcagtttgcagagtaggggtctgtcttttaaactctgagtgcaaacttcagagttcttgccttggctgcagtttttttccttcaagaatgcagtactaacatttatttgagtggagttactgaacagtaacatagctgtgatttttggtatttgaaacactggttttaaatattttgacttgttgagggtatgttttatatagcaagacattatatagcagtaaaaaatggtgttttatcttctatataattcctgtttttattattaacaaaacagtcctaaatagcagccctcaattgtgaaaaaatttacttttaaactacattaggttgtgaatgcaggttttatcagaactatgtttttgttcagtttatctgttcatatggataaatattggtttgggatgacttggtgtctaatgtgtagtgctacacacctaacttatggggccaaaatagcatgtcctaatgcttgctgctgattaaacacattaaaggtactttg

SEQ ID NO: 20649 - DNA, 1319 bp, Homo Sapiens
gcacgagggccggagcgcagcgcctgcggccgcccgtgccccgccgtcctccttcccgcggccgtgagggagaccgcggctcggccgtagcggagctgcgagttacagaatgtctgaaggggacagtgtgggagaatccgtccatgggaaaccttcggtggtgtacagatttttcacaagacttggacagatttatcagtcctggctagacaagtccacaccctacacggctgtgcgatgggtcgtgacactgggcctgagctttgtctacatgattcgagtttacctgctgcagggttggtacattgtgacctatgccttggggatctaccatctaaatcttttcatagcttttctttctcccaaagtggatccttccttaatggaagactcagatgacggtccttcgctacccaccaaacagaacgaggaattccgccccttcattcgaaggctcccagagtttaaattttggcatgcggctaccaagggcatccttgtggctatggtctgtactttcttcgacgctttcaacgtcccggtgttctggccgattctggtgatgtacttcatcatgctcttctgtatcacgatgaagaggcaaatcaagcacatgattaagtaccggtacatcccgttcacacatgggaagagaaggtacagaggcaaggaggatgccggcaaggccttcgccagctagaagcgggactgaggctgcctcacgtgttgcaagaacagttttgagccattgttaacaatgccttttttcttcacataaagtagttgattacgagggagtcaaattttctttttaaaaaggagcttcaatgatttgtaactgaaatatcaggttctagaagaaactggcgcttaaaccaaatcgcatggatttctttttcagtgacgttcaagtgtttctcacggatggaattctagtcagctgcaggcgggaagccaggcgggtggagcccatgggagcaagggcgagtggccggtccccgctgtgccaggtgggcaggcaggagcaaggcctgcgagggaggaacgggccgctccccgccagccgccttccccagcagccgcaggtggtgccagccactccacagagcccgagggatgatctagcctgattcctgcgtgtccgaaagaacttatcgttttaaaggtgattgtcaagtaactgtgtggggttctaatgccagttttcctaatttccatctcactggagatgtttaaagttggcctctatcctaatgactcaaaacttgggtttcttaactatcatgattgcttttgaggggctcggaattataatatat

SEQ ID NO: 20650 - DNA, 829 bp, Homo Sapiens
  misc_feature (337)..(495): n is a, c, g, or t
gcacgaggtccccccctttttttgtacttcaaatattgaatttttattcaaaattctttataactttattacaatatagattttgtgttggatagttttgcccactgtaggctaatgtaagtgttctgagcatgtttaaggcaggctaggctaagctatgatgtttggtaggttaggtatattaaatacatttttgacttatgatcatattttcaacttatgatcatattttcaacttatgatgggtttatcaggatgcaaacccatcacataaatggaggggtgtctataaaacattgttagacctataattttgctgttgattattgggaggtgnnnnnnnnnnnnnnnnnnnnnnnnnnnnnnnnnnnnnnnnnnnnnnnnnnnnnnnnnnnnnnnnnnnnnnnnnnnnnnnnnnnnnnnnnnnnnnnnnnnnnnnnnnnnnnnnnnnnnnnnnnnnnnnnnnnnnnnnnnnnnnnnnnnnnnnnnnnnnnntgcaaaatgtctcaagctaagtttagtattctccctccaccccgaccctgcttctgttcctcttccaggctgccccatctcagtaaatggcccatcagccacccagaaggtcaagccagattcatccttcacatcgaatctaccttctaaacacatccacaatccattcccctttctccatccccactgtccccgctccagtccatgccatcaagacttttcatttgcactttgccgcagagctgttaaaatacttttacaaactacaaatttgattgagtcactctgaaaaggtgaatgtggcccctgacctctgcatggtttggtcctggtc

SEQ ID NO: 20651 - DNA, 554 bp, Homo Sapiens
  misc_feature (354)..(420): n is a, c, g, or t
ccgggctgcaggtttgagaatataaacacacctgttttgtttttcttaagttcaacatacttttgtagaatttgtaaaataaatgttcgtatcataattgagaatttatagccaaggatcctcaaaacagaagtttcatcttaggatagtgtttgatatatctaagaaagtccagtaacagagaagaaatgtctcaaatgtctcgtatcagttttagtgtttttcagtattagggaaaggtaatataaaaacaggtaaaatgtataaaaatagacctgatcaacatcataggagataaatattcattatatagcataggatattattacttgaatgttctcagggaggcagcannnnnnnnnnnnnnnnnnnnnnnnnnnnnnnnnnnnnnnnnnnnnnnnnnnnnnnnnnnnnnnnnnntagccttgttctcctcactaacagtaggaaagtaacacctaccctgcctacctctcagggctgttgttagggttcttttggtatatgtgaatattctttcaaaattgtaaaatgctatatgacttgtaaggaat

SEQ ID NO: 20652 - DNA, 918 bp, Homo Sapiens
gcacgagggggaataccaagagcagagagagcatccaggaacctagatctgattactacaatcatgaagttcctgatattgacctcagtgattgtgaattcccacatgtcattgaaatttatgactttccccaagaatttcgtactgaagaccttctacgggttttctgcagttatcaaaagaaaggatttgatattaaatgggtggatgatacacatgccctaggagtattctccagtccaattacagctcgtgatgcgttgggtattaaacacaccatggtgaagattcgtcccttgtcacaggccacaagagcagccaaggccaaagctagagcttatgctgagttcctccagccagcaaaggagcgtcctgagacttcagcagccctagccagaaggttagtcatcagtgcccttggggttcgaagtaagcagagcaaaaccgaacgagaagcagagctcaagaaactgcaagaagccagagagagaaagcggttggaagccaagcaacgggaagacatctgggaaggcagagaccagtctacagtttgaacatcactcaatgaaagggataattccatgaatcagaaaatgtttccatagccttcagataagatgatccttccagagctctatgtacatgcagatgtgcatgttaaagagataaagtgatcgagacaaggactgactgggtatagaaggaagacagactcctgtcttcactcctaaatgcagttctttggaatcaccctactgtggtgggcgtagtagggagccatcagctaggaagaaacgtgggagatgtgaattccaagagttgcctggacagggcaagtcatgttagcgtgggtcacacttccaagatatttaaagcaaatacaaaacagaacagaggattcaaaccgcaagtatggga

SEQ ID NO: 20653 - DNA, 973 bp, Homo Sapiens
gcacgaggcaaaaatatattcatgtacctgtgatccagcaagaagggagttccagtcaagagtcactacaactgattagttgtttagagaatgagaaatggaacagtgaggaatggaggccatatttccatgacttcccttgtaaacagaagcaacagaagggacaagaggctggcctctacatcactctcaccttccaaatcttgtggaagtgcatctacttgccagaaccaaattaacttacttccaagttctggctgcttgcaggtggaactccagctgcaagggagttagggaaatgaaggtctttttttaaaagcttctcagccttcctagggaacagaaattgggtgagccaatctgcaatttctactacaggcattgagaccagttagattattgaaatattatagagagttatgaacacttaaattatgatagtggtatgacattggatagaacatgggatactttagaagtagaattgacagggcatattagttgatgaaatggagtcatttgagtctcttaatagccatgtatcataattaccaagtgaagctggtggaacatatggtctccattttacagttaaggaatataatggacagattaatattgttctctgtcatgcccacaatccctttctaaggaagactgccctactatagcagtttttatatttgtcaatttatgaatataatgaatgagagttctggtacctcctgtctttacaaatattggtgttgtcagtatttttcctttttaaccattccaatcggtgtgtagtgatgtttcattttggttttaatttgtatatccctgatagctataattgggtcataaaattctttatacattctagatgcagtctcttgtcggatatatgtattgagatatacacctagtctgtgcttgactgttttctttatgtcttttgatgaatagagtttaaatttgacacgtcaaatta

SEQ ID NO: 20654 - DNA, 1111 bp, Homo Sapiens
gcacgagggcggatcacttgaggtggaccggtatcggttgaagaatgggcgccgcatcatcctgctggccgagggtcggctggtcaacctgggttgtgccatgggccaccccagcttcgtgatgagtaactccttcaccaaccaggtgatggcgcagatcgagctgtggacccatccagacaagtaccccgttggggttcatttcctgcccaagaagctggatgaggcagtggctgaagcccacctgggcaagctgaatgtgaagttgaccaagctaactgagaagcaagcccagtacctgggcatgtcctgtgatggccccttcaagccggatcactaccgctactgagagccaggtctgcgtttcaccctccagctgctgtccttgcccaggccccacctctcctccctaagagctaatggcaccaactttgtgattggtttgtcagtgtcccccatcgactctctggggctgatcacttagtttttggcctctgctgcagccgtcatactgttccaaatgtggcagcgggaacagagtaccctcttcaagccccggtcatgatggaggtcccagccacagggaaccatgagctcagtggtcttggaacagctcactaagtcagtccttccttagcctggaagtcagtagtggagtcacaaagcccatgtgttttgccatctaggccttcacctggtctgtggacttatacctgtgtgcttggtttacaggtccagtggttcttcagcccatgacagatgagaaggggctatattgaagggcaaagaggaactgttgtttgaattttcctgagagcctggcttagtgctgggccttctcttaaacctcattacaatgaggttagtacttttagtccctgttttacaggggttagaatagactgttaaggggcaactgagaaagaacagagaagtgacagctaggggttgagaggggccagaaaaacatgaatgcaggcagatttcgtgaaatctgccaccactttataaccagatggttcctttcacaaccctgggtcaaaaagagaataatttggcctataatgttaaaagaaagcagaagtgggtaaataaaatcttggtgcctggg

SEQ ID NO: 20655 - DNA, 866 bp, Homo Sapiens
tcgaattggcaactcctacttcaaagaagaaaagtacaaggatgccatccatttctataacaagtctctggcagagcaccgaaccccagatgtgctcaagaaatgccagcaggcagagaaaatcctgaaggagcaagagcggctggcctacataaaccccgacctggctttggaggagaagaacaaaggcaacgagtgttttcagaaaggggactatccccaggccatgaagcattatacagaagccatcaaaaggaacccgaaagatgccaaattatacagcaatcgagctgcctgctacaccaaactcctggagttccagctggcactcaaggactgtgaggaatgtatccagctggagccgaccttcatcaagggttatacacggaaagccgctgcgctggaagcgatgaaggactacaccaaagccatggatgtgtaccagaaggcgctagacctggactccagctgtaaggaggcggcagacggctaccagcgctgtatgatggcgcagtacaaccggcacgacagccccgaagatgtgaagcgacgagccatggccgaccctgaggtgcagcagatcatgagtgacccagccatgcgccttatcctggaacagatgcagaaggacccccaggcactcagcgagtacgtagagtcagagaggcggccttgctggaaatggagaacaaaagcaggcagatgagtgcacgcggctggggggtggtatgctcagtctgcgaggaagaggaatctgtcattcttcctaaacttaaggagattggcagtgggtggcgagctggaaggctttgttagtcgtgatagcttaacagtcatttggaaaggcccttttagctgggagaaag

SEQ ID NO: 20656 - DNA, 918 bp, Homo Sapiens
gcacgagggggtgtggcagctcccatcaggtctggaggtggtctataagcacagttgacagttgtgcattgggatgggtggagaaagacaagagagcagagaatctgctgatgtggctgcgcttacttttagtgactttatgtacttatattaacagctggaaataggttgttgggttttgagcaggctgttatagtgaggaatgttcatttttaaatgttcctaacagattttgcttttgaaaaatgcttgttacatgaataatttgtggaccagggattgcttttctgaaggcagtatagggaacatgaatattcaagatgaaatacaaaaattatgtttaagggtcatagtgtataagtagcttcctaggaaaccctttgtgtatcttttctgactgggatgggggctgagcatgcttgtgcagaaagaagccatagccagaaaggacagaatctctcccccactcccttgccccataaccaaacataagctagctagtcttgtctaatagatgggatttactataggtgaagatagccctcatattcaaggacagaagctctggcaggagtaaattagcaaagcagaaatagtaccctttcattcttggaggtgctttgaaattttaggtagaatataatcgaaattatggaggttccttagtgctcaataatataagacctgttgttattagaacgagtctttcttataaactaacagagcaggtatatgcctgttagatcttagctgtggggttcctttactattgggtgaatcattaggtataaaaaataatcatcaaccaggccaaatactttgcttcctagctgatgtcatcccacattggtacagtgttattcattactgggtggttcaacagggaagccagtgggaccagtgtgtctgtcatgaaac

SEQ ID NO: 20657 - DNA, 1291 bp, Homo Sapiens
gcacgaggctgtacataatttacaaataaaacattttattttaattgttacttattatttagatatttctcaacacttaaattcataaaattaagaccatgtaagggtatgtttttagagaaatggaagtttgagtaacccacagaacatctgtgatctttctacagcagcttcagttttgtgccaacattccatgtattttgaatatgagcaaaaactgatcttaagagcagacttaaagtagctttgtacgccttaatgttcattttgatttattttaaatctttacattcagaaatgagatactgtattatcagaccaggaggcattgctgtgaaagataatttcctattctaaaatatcaaatttaaaataaagataatgaaagaaaacataagagaactattggactctaattgctttgaactagttttgcagtttgactttacgtcttatacatcttagttacaagtctttggaaactcttgtttacttatgagcataatcattccttggagttatactaactaataatgaatattaaatgatttttcttcagtcacagtgagagcatcttgctttgtggttgaaataggtagtgtatgtcagtctttgctttaggctgtttctcatctaagtgtttgaattaaagatgttaaatttttctaattgtgaaaaatatgttttctgtatcgacacattttattaaacttggcttgattgcttctttatagtagtccctgtaagtggacataaatgtggctatttgatgttaatgcaactatgtcaaggctgcaatcactttaatagtttctttttagcaaataaatgttcattgatgaagtgcctgggtattttcccgtcccatttgcagagctctactacttcatttccacagtaagcatatatataatgatcacttctgagtttatcaccagtaacattgatacctattttggggtataaacatggtgtttttcagaaataaaaattatttcattaacctttactattactgtgataatacccaggcactcaatattcatcctgaaattttttataatatatgtaatttgtctagtcttaaagacatttggagcatggccaacaggaaggtcagcttcttactgatgtgtgtggattcttacagaatgttagtacaaatttttataaatatttggtgatccctggggggaaatatcatttcttactatggttagaaagtgaattagaaatttcagctcagtttctatttactattcaagttgtgtactttaaacaaatataaaaa

SEQ ID NO: 20658 - DNA, 2224 bp, Homo Sapiens
gcacgaggggccgtcggccattttgtgtctgcttcctgtgggacgtggtggtagccgttgggttgggaaagtgagggatttttggcctcgtttctcctgcttcttttctcctcccttttactttgccggtagaacacagttatgggtcgcaagaagaagaagcagctgaagccgtggtgctggtattgtaatagagattttgatgatgagaagatccttattcagcaccaaaaagcaaagcattttaaatgccatatatgtcacaagaaattgtatacaggacctggcttagctattcattgcatgcaggtacataaagaaacaatagatgccgtaccaaatgcaatacctggaagaacagacatagagttggaaatatatggtatggaaggtattccagaaaaagacatggatgaaagacgacgacttcttgaacagaaaacacaagaaagtcaaaaaaagaagcaacaagatgattctgatgaatatgatgatgacgactctgcagcctcaacttcatttcagccacagcctgttcaacctcagcaaggttatattcctccaatggcacagccaggactgccaccagtaccaggagcaccaggaatgcctccaggcatacctccattaatgccaggtgttcctcctctgatgccaggaatgcaaccagttatgccaggcatgccacctgggattgcatcatcagagaaaatacacccagtcattttgcggtgaaaacataatgatgccaatgggtggaatgatgccacctggaccaggaataccacctctgatgcctggaatgccaccaggtatgcccccacctgttccacgtcctggaattcctccaatgactcaatcacaggctgtttcagcgccaggtattcttaatagaccacctgcaccaacagcaactgtacctgccccacagcctccagttactaagcctcttttccccagtgctggacaggctcaggcagctgtccaaggacctgttggtacagatttcaaacccttaaatagtacccctgcaacaactacagaacccccaaagcctacattccctgcttatacacagtctacagcttcaacaactagtacaacaaatagtactgcagctaaaccagcggcttcaataacaagtaagcctgctacacttacaacaactagtgcaaccagtaagttgatccatccagatgaggatatatccctggaagagagaagggcacagttacctaagtatcaacgtaatcttcctcggccaggacaggcccccatcggtaatccaccagttggaccaattggaggtatgatgccaccacagccaggcatcccacagcaaacaaggaatgagacccccaatgccacctcatggtcagtatggtggtcatcatcaaggcatgccaggataccttcctggtgctatgcccccgtatgggcagggaccgccaatggtgcccccttaccagggtgggcctcctcgacctccgatgggaatgagacctcctgtaatgtcgcaaggtggccgttactgatcttacttcatccagtctaataggtttggagattaaaccttttctcaacttgtgctgtttatatagccaagcttccgtcaataaggcttcattgtgactttaacaaacattatcttcccacataccaggaactattggacatttattttacatgggaaaaattatttggaataataaagcaggaacttttcctgaagttgcaatttatactgtatggcttctttttcatgtttcatctaggtttttagaagtgaagtatagtaaatttggttcgttaaattgtgaaggcgctggaattacatgaacataccaccctagtaaaggcaagttctgtaagcttacattgctatttgtaaagtttgccttcacagcatttcagatgctgttggacttcatgtccccaacctagcttggtgagggctgtaactgtttccaagtacttgtacattggaagtctgaatgtgtaacaatatttaatgtatttagagttcctcatgttgcagggtttaagaaatctgacccaccaaggtcatgtgacttttctgtactgttaaacttcattgtaataaaatgagagaaaaatttatgcctttttattcataacccagctgtggaccactgcctgaaaggtttgtacagatgcatgccacagtagatgtccacataataaaattcatagttaccaatgc

SEQ ID NO: 20659 - DNA, 1650 bp, Homo Sapiens
  misc_feature (328)..(347): n is a, c, g, or t
gcacgaggatgagccactgcgcccagtctacacactaattcttgttagcccaacagctgttctgttctatctacccctcatttcacgctcaaggagtcatacctagaatagttacacacaagagggaaactggaagccaaacactgtacagtattgtgtagaaagtcacctccctactccttttattttacatgagtgctgatgtgttttggcagatgagctttcagctgaggcctgatggaaattgagataacctgcaaagacataacagtatttatgagttatatcttagttcttgaaattgtggaatgcatgattgacaatatannnnnnnnnnnnnnnnnnnncaagtaataccagtactgtttaactatagccagaactggctaaaatttttatattttcagagttgaagttggtgaagacattcatgatttaaacaccagatcctgaaaggggttaaatctactttgaaatgaatctgcaatcagtatttcaaagcttttctggtaattttagtgatcttatttgattagactttttcagaagtactaaataaggaattttaacaggtttttattaatgcacagataaatagaagtacagtgaggtctatagccattttattaaaatagcttaaaagtttgtaaaaaaatgaatctttgtaattacttaatatgttagttaagaacccgtcaagcttatatttgctagacttacaaattattttaaatgcatttatcttttttgacactattcagtggaatgtgtaagctagctaattcttgttttctgatttaaagcacttttaaatcttatcctgccccctaaaaacaaaaggttttgatcacaaggggaaatttaagattgttaaccctgtttttcagaagggctactgttaattgcacataaacatgaaagtgttttcccctgtgtactaacacattctaggcaaaattcaaacttatagtggtaaagaaaacaggttgttcacttgctgaggtgcaaaaattcttaagacttctgtttgaaaattgctcaatgactaggaaaagatgtagtagtttactaaaattgtttttctaccatatcaaattaaacaattcatgcctttatagggtcaggcctacaatgaataggtatggtggtttcacagaattttaaaatagagttaaagggaagtgatgtacatttcgggggcattagggtagggagatgaatcaaaaaatacccctagtaatgctttatattttaatactgcaaaagctttacaaatggaaaccatgcaattacctgccttagttcttttgtcataaaaacaatcacttggttggttgtattgtagctattacttatacagcaacatttcttcaattagcagtctagacattttataaacagaaatcttggaccaattgataatatttctgactgtattaatattttagtgctataaaatactatgtgaatctcttaaaaatctgacattttacagtctgtattagacatactgtttttataatgttttacttctgccttaagatttaggttttttaaatgtatttttgccctgaattaagtgttaatttgatggaaactctgcttttaaaatcatcatttactgggttctaataaattaaaacctcgtgc

SEQ ID NO: 20660 - DNA, 790 bp, Homo Sapiens
gtccgaaaaagttgacaaatttatgattgagctacatgggaccgagaataagtccaagtttggggccaatgccatcctgggcgtgtccttggccgtgtgtaaggcgggagcagctgagaagggggtccccctgtaccgccacatcgcagatctcgctgggaaccctgacctcatactcccagtgccagccttcaatgtgatcaacgggggctcccatgctggaaacaagctggccatgcaggagttcatgattctgcctgtgggagccagctccttcaaggaagccatgcgcattggcgccgaggtctaccaccacctcaagggggtcatcaaggccaagtatgggaaggatgccaccaatgtgggtgatgaaggtggcttcgcacccaacatcctggagaacaatgaggccctggagctgctgaagacggccatccaggcggctggttacccagacaaggtggtgatcggcatggatgtggcagcatctgagttctatcgcaatgggaagtacgatcttgacttcaagtcgcctgatgatcccgcacggcacatcactggggagaagctcggagagctgtataaaagctttatcaagaactatcctggtgaggcgttcgggtgtcccagtgttcctgcccgaatcccgtgcagctgcctaatatactgatttcagtgacctgctttgccatcgacttggatccttccaattcttagccccattaaaatccccatttaagctcttctgccctgtcacccctccatgaggctccttctgacctctagccgt

SEQ ID NO: 20661 - DNA, 1189 bp, Homo Sapiens
gcacgaggggaacaatagttttaatgggaacatacgatgatggagcaaccaaactcaatgatgaggcacggcggctcattgctgatttggggagcacatctattactaatcttggttttagagacaactgggtcttctgtggtgggaagggcattaagacaaaaagcccttttgaacagcacataaagaacaataaggatacaaacaaatatgaaggatggcctgaagttgtagaaatggaaggatgcatcccccagaagcaagactaatggaaatgtggagagaattgaagaaagcgcactttcactcttaatgggagagctataaatggcagagctatgtgtaaatattttaagagcatgcagccatcttggtgtgtgcatgagtattgtctcttttgatatcaggattatttattgctaacgtaaatagatagcattgtaaataatcatcacaatgatcaaatcactgaaccatgtctccgcacatttccctaaaagtacaatgtttagactgctatggtaatacatattttaaattctaaaagcatacacaatgtgtaactgaatggtttgtgaaaaatatattgatatatatactagttgctatgaaaatatcatggaataatagggattttagggtggatactttattttcttttatgtttctatatgttgcgttgtgatgacattatcttttaaattaaaaagagatttggctagttgtgtgtgtaatgttactttacagtccgactctcctgatgtacctcttttcatgatctttttctttccttcccaagaaactgaggaatgtttaatatgaaaacatacatcggatatgtgaaaagcacaacaaaattcttaatgtacacagtaaaaaagtaaatatataaatgtagatggcatttaggaccacagcttgctggatttgtgttagctatgggaataacttgattttgtataagctatttagagtgaggctggaggtggcagcttcacagaactggagaaccaggccaagtcccctccccaacctaattaggtcattcaggacagctaagtcagtatatttagagcaatactagcatacgtttttcttaattgttatcagcattgaccaagtggtttggaaggaggcatgctttaatatcacaataattttgatttgtaaaccaagaattaatcctgtg

SEQ ID NO: 20662 - DNA, 833 bp, Homo Sapiens
  misc_feature (335)..(373): n is a, c, g, or t
gcacgaggttttttcttatattctactttatttggtaaaactcagaaactaacaattcacatcctcccaccttcttctttccgaagaaggcagtttgcagagacaaaagggctgtggcgtggggatcatccaccatctccaggttttacacccaggctacccatggcttggcagtcaggcctctaggcctgatgctctcagaggcaatagaagaaaagtaaaaggaaggtctcacttcacagacaatgaaaccctcctaaccctcttccccactacccacaactccctacactgccaatctaaataaaaagaggacaatgcatgagtgtgagatnnnnnnnnnnnnnnnnnnnnnnnnnnnnnnnnnnnnnnngcttcctttcagccaaagaactgcaaaatccttccccggaaggaggacaactggcaacaccaatcaaggcttggtggtctaaggtgatggctggaatcatgtgagactggtaaaaatccagggagaaaatgtttcaccttcagctcattcccaagtctctatgaagcccgccccacttccacataggggaactgtggctctgggggcagctggcttagggaaaggcctcccatggccaagaagacgatggtggagaggagggggagggcagcagggcaaagcctttggggagggtcagcaaaggggccccctgcccttggctaatggatccgagttagctcctccacaaccttgatgaggtcgtctgcagtggcctctcgcttcataccgctgccatcgtcatactgtaggtttgccaccacctcctgcatcttggggcggctaatatccagcctcgtgc

SEQ ID NO: 20663 - DNA, 808 bp, Homo Sapiens
gcacgaggggcctgcctggtcagagaggagagagaggcttccctggtcttcctggcccctctggtgaacctggcaaacaaggtccctctggagcaagtggtgaacgtggtccccctggtcccatgggcccccctggattggctggaccccctggtgaatctggacgtgagggggctcctggtgccgaaggttcccctggacgagacggttctcctggcgccaagggtgaccgtggtgagaccggccccgctggaccccctggtgctcctggtgctcctggtgcccctggccccgttggccctgctggcaagagtggtgatcgtggtgagactggtcctgctggtcccgccggtcctgtcggccctgttggcgcccgtggccccgccggaccccaaggcccccgtggtgacaagggtgagacaggcgaacagggcgacagaggcataaagggtcaccgtggcttctctggcctccagggtccccctggccctcctggctctcctggtgaacaaggtccctctggagcctctggtcctgctggtccccgaggtccccctggctctgctggtgctcctggcaaagatggactcaacggtctccctggccccattgggccccctggtcctcgcggtcgcactggtgatgctggtcctgttggtccccccggccctcctggacctcctggtccccctggtcctcccagcgctggtttcgacttcagcttcctgccccagccacctcaagagaagctcacgatggtgggccgctactaccgggctgatgatgccaatgtggttcgtgaccgtga

SEQ ID NO: 20664 - DNA, 1322 bp, Homo Sapiens
gcacgaggctgccatcggcattccatattttactgcttatcgagctctgatccacagtgcctgtgtgaaagctggagagagtgttctggttcatggggcaagtggaggagttggattagcagcatgccaaattgctagagcttatggcttaaagattttgggcactgctggtactgaggaaggacaaaagattgttttgcaaaatggagcccatgaagtgttcaatcacagagaagtgaattacattgataaaattaagaagtatgttggtgagaaaggaattgatataattattgaaatgttagctaatgtaaatcttagtaaagacttgagtcttctgtcacatggaggacgagtgatagttgttggcagcagaggtactattgaaataaacccacgagacaccatggcaaaggagtcgagtataattggagttactctcttttcctcaaccaaggaggaatttcagcaatatgcagcagcccttcaagctggaatggaaattggctggttgaaacctgtgataggttctcaatatccattggagaaggtggccgaggctcatgaaaatatcattcatggtagtggggctactggaaaaatgattcttctcttatgatgattaattctttcatggatttcctatgtaattagaggtactgtctttcccccagttgtacttaccctatcttttctttaattaacattcgattccatgagcttcttatgtgaaaaaataagatttttctttagagagcagaagcagaagagtaaaatttattgtatagctagcaatatttttttatgccatctgtctcaaatcaaagagtcatcatagtaggaaatagcatgttagttgtcatttggcatgagtgtgcattccagtaattcttaattgatatttgattaattccatacctttgattaaaacatgctagttcaaaataagactgctcagtttccaagggttttcaagcctacttacctttataaaggttctctagtctctgattagccatgactgtattggactttgaacattttctgaactaaaaacctctattctaaactaatctcatttggatgtgtaagtcttttgtaaaggcaagaataaataatatccagggacaatttattagttttctcagtattttcccaaatattagaatatttacttcattattgggttggctgccaatgaccccatatgttctgtgagaatagtagctttatctttgatatatacatagtctccaaataggtaatacttcgcaattgattagattttcagagtagatttagagttatctgttttttctggt

SEQ ID NO: 20665 - DNA, 1441 bp, Homo Sapiens
gcacgaggcagacctcatcagattattatgccatcagccattgagagaagtgtacggaaacagaacgtacaattcatgcataaccgaatgcagtacagtatggagtattttcagtttatgaaaaaactgcttacatgtaatggcgtttacttaaaccctcctcccgggcaagatcacctgttgcctgaagcagaagaaatcactatgatcagtattcaacttgctgctaggttcctctttactacaggatttcacacaaagaaagtagtccgtggctctgccagtgattggtatgatgcattgtgtattctccttcgtcacagcaagaatgtacgtttttggtttgctcataacgtcctttttaatgtttcaaatcgcttctccgaataccttctggagtgccctagtgcagaagtgaggggtgcgtttgcaaaacttatagtctttattgcacatttttccttgcaagatgggccatgtccttcaccttttgcctctcctggaccttctagtcaggcttatgacaacttaagcttgagtgatcacttactaagagcagtactaaatctcttgagaagggaagtttcagagcatgggggtcatttacagcagtatttcaacctgtttgtaatgtatgccaatttaggtgtggcagagaagacacagcttctgaaattgagtgtacctgctacttttatgcttgtgtctttagatgaaggtccaggtcctccaatcaaataccagtatgctgaattaggcaaattatactcagtagtgtcacagctgatccgctgttgcaatgtctcttcaagaatgcagtcttcaatcaatggtaatcctcctcttcccaatccttttggtgatcctaatttatcacaacctataatgccaattcagcagaatgtggcagacattttatttgtgagaacaagttatgtgaagaaaatcattgaagactgcagtaattcagaggaaaccgtcaaattgcttcgtttttgctgctgggagaatcctcagttctcatctactgtcctcagtgaacttctctggcaggttgcatattcctatacctatgaactgcggccctatttggatctgcttttgcaaatcttactgattgaggactcctggcaaactcacagaattcataatgcactgaaaggaattccagatgaccgagatgggctgtttgacacaatccagcgctctaagaatcactatcaaaaaagagcataccagtgtataaaatgtatggtagctctatttagtaactgtcctgttgcttaccaaatcctgcagggcaatggagatcttaaaagaaagtggacctgggcagtggaatggcttggagatgaacttgaaagaagaccatatactggcaatcctcagtacacttacaacaatgggtctcccccagtgcaaagcaatgaaacgtccaatg

SEQ ID NO: 20666 - DNA, 820 bp, Homo Sapiens
cattcaccagccagttttatttactcacaaaaacaaatccaaagcccagtgcagcagctctgagctcaggcctgccgtgccccgttttgtgggcctgtacttgaaacactgaacgtgatgtgtccttcactcacccgcggcactttaatccccacaacagccctgtgaggtaggaatcaccaccattccccccgactcatattacagatggggaaaccgagacacacattcaacaaagcgcgcatcacatggggagttcagggttagcctggagtacaaacacacgttctccccatggcccagtcagcggcccacctggcctcttcccctccctttagtaaccccatcagcagcagcataaaaatctaacccttcattttgctgaaagcccctgcaaatgacagtttccttcctatcatgtctgcaaagctccaaggctgggggcgatgttgaggccaaagccagccacagtgcctcagctgtgcctttcctggagagcgggtggccgcccccagcacatccctggcacacgggcttgcataacagactcttgtaccgccatctctagcacaagaccatggccacatctccccaaccactcagcccgcacagcgtgcaaaggtggggagttcactttaatggcattcctccaacgacttattgtaaaagaaacaaggcatctcgtcctgggtcgcaacacccagcagcatccgtttagaccaccaagggtaggctgcgccgggtgcacagggatcccgctgcggctcggcgaaagccggagtcctgggatccagagcagcccggggagccctggagtctg

SEQ ID NO: 20667 - DNA, 959 bp, Homo Sapiens
  misc_feature (109)..(123): n is a, c, g, or t
  misc_feature (199)..(221): n is a, c, g, or t
  misc_feature (549)..(565): n is a, c, g, or t
aggggtccattcccgctgattttttttccttcccaaaaaaagttatttacagaagggatatatcaacaatctgacagggagggaacttgacatgattaactgggatgannnnnnnnnnnnnnncccccaaacattgtttttgtggccttgaattttaaaacaaatattccacccggcatattgcccaggagggatggcnnnnnnnnnnnnnnnnnnnnnnncccttaacggaactgccttaaaaaggcagacgtcctagtgcctgtcatgttatattaaacatacatacacacaatctttttgcttattataatacagacttaaatgtacaaagatgttttccacttttttcaatttttaaacacaacagctataaacctgaacacatatgctatcatcatgccataagactaaaacaattatatttagcgacaagtagaaaggattaaatagtcaaatacaagaatgaaaaacgcagtacatagtgtcgcgaactcaaatcggcatttagatagatccagtggtttaaacggcacgtttttgcttatnnnnnnnnnnnnnnnnngatgtggtttacaagttaaagctacagaatccctttttgctgtaattgcaccagttttaaagcctctggacagagcagtatttcgtttaaaactttgtttttcttaaaagcttacagtgtttggctaattctcctcccctttttacaagacgggggccggagggtggacactggtggcaggttaagggatactgtcactttaagaagcctgcagattgaagtgtaaacatggagaaattaggggctgattttttaaactgtgtgagatattaaccagccgccctgttataaaatcaggaaatccaaacagcgatttacaccgattaacaccccctttatatattttttacaaaaatacactgagaaaataatcaaacgttttcatctctcttgt

SEQ ID NO: 20668 - DNA, 804 bp, Homo Sapiens
gcacgaggtgatgactgtctgctatcagtttttaaggaaaaatcagccgtagaattgttgattagtcttgcagaaggctatagttctcgctgtcatccggtttttcagcttaaaaaacaggtgctgagctgtgaggagagcatcagggtttgggctctgctgcctttccccgaagaactcactcggcaagccgtcagattagaagataattctgaaacaaatgcctgccactctttgattacaaaaatgacggatgagctgtatcaccatatgcctgagaatcgttgtgtgttaaaggacttggatcgtcttcctactgagacgtggccccagcttctccgtgagctctgcagcacacctgttcccaccctgttctgccccaggattgtgctggaagtgctggttgtgctccgaagcatcagcgaacagtgccgccgtgtgtccagccaggtcaccgttgcctcagagctgagacacaggcagtgggtggaaaggacgctgcggtctcgccagcggcagaactacctgcgtatgtggagtagtatcagactactgtcccctgtgctcagcctgatactgttactcattgcgctggagttggtcaacattcatgctgtttgtgggaagaatgcgcatgagtatcagcagtacctaaagtttgtaaagtcgatcttgcagtacacggagaacctggtggcttacaccagttacgaaaagaacaagtggaatgaaactatcaatcttacacatacagctttgttgaaatgtggactttagtgagaagaaacaaatgttaatacattt

SEQ ID NO: 20669 - DNA, 914 bp, Homo Sapiens
gcacgaggaacactagtaattttatttcaaaatataaatatttcacattaataaagaagttacatcagtaggttgtcaaagcaagttagctaagaaacagcatttgtgtgagaacagagggtatttattgtattcgaatattcttttttacttttgaattgcctccttcacctgagaacccagggatgatacattttcaaagagttatgtaagcaattacaactctatatcaaatcttagttcaaaatcaaattgtactggaaatacacttcagttacctaaataagtggcactgcaaagggcaaagaagggttttctttgggatggctacaatgagagttacatctgctgggtctctgcaataaaaaataaatgatatttgataataagccaaaattatcaggatttgcttccatacttttcactgtaaaataaaaagctagcaaaaagctagtaagaaaccagatgtctagtaaagaactctggacttggagtcagaagttctgcaactaaattctggctccatcattttgtggtataaacttaggggaatatcaccaaaaacttttcaaagcctccagagcccccccatctgtacaataaggataatattgtctgtctcacagggctgttacaaaaggtgtctgaaaactataaagtgccatacaaaagcattattaaaatgtaatatcaatatatcaccactgtatttgcacattagttgatccttgaaaaacctgcaaaattaaacacaatactgattttacacaccacaggtggaaaagaatctctataccttaagtatagctctaaacagcaaatatacttgctttctggactttcaagatttattacacactacctgggtaccacagtaatagatctgccattcagtatttccattagggatgtct

SEQ ID NO: 20670 - DNA, 1685 bp, Homo Sapiens
cccccgggctgcaggaattcggcaagaggcgtgtatatattgcatcttcctctggctctacagcgattaagaagaaacaacaagatgtgcttggtttcctagaagccaacaaaataggatttgaagaaaaagatattgcagccaatgaagagaatcggaagtggatgagagaaaatgtacctgaaaatagtcgaccagccacaggttaccccctgccacctcagattttcaatgaaagccagtatcgcggggactatgatgccttctttgaagccagagaaaataatgcagtgtatgccttcttaggcttgacagccccacctggttcaaaggaagcagaagtgcaagcaaagcagcaagcatgaaccttaagcactgtgctttaagcatcctgaaaaatgagtctccattgcttttataaaatagcagaattagctttgcttcaaaagaaataggcttaatgttgaaataatagattagttgggttttcacatgcaaacattcaaaatgaatacaaaattaaaatttgaacattatggtgattatggtgaggagaatgggatattaacataaaattatattaataagtagatatcgtagaaatagtgttgttacctgccaagccatcctgtatacaccaatgattttacaaagaaaacacccttcccctccttctgccattactatggcaacttaagtgtatctgcagctctacattaaaaaggagaaagagaaataacctgtctctcattcctaagttgcctcattaattttcatgaacaagaatatgtacctttttgatgctatattactgcgattaaaaaagttcttgcaggtaatgtttatgatatgttaaacgttgtaatttcctatcgtaattataacattcccattcttttgtagatgaaacttctacatattgaaccacagattttctgagcttctaaatgtagcctttcattgcacatttcagtgatcagaatagatatccttttacacgcacaaaagcaatagattcattcagtggacaagttccttgtttaactacacagctatgatggaatgatatatccaagttccttgcctcagtgaaatatgcatatgtatatcatgaaagtgggatgccaagtaagcttaaaatggcattctctagcaaagagattagacttttaaataactcttataaaacaggttggcgatcatttcccaagattggtttcccttgagtttttgctaaaacaaatcttagtagttttgcccgtttaaaacaactcacaatcgtaaatgctactattcctaagatatcttacctttttatttcagtttagccatgtattgtatgagtgtattagtctaagcagtgagaatcttttctatgcctctattccagcaaaaagtagaagtatcaaataaaaagggcaacttttaaaatattaagcctgaagacttctaaaagacaagaaacatggcctaaataaccaacatagatttacatagtaagtttcacactaccttattaccaaaagcaaacacctcttactttaaactacattatcatgtatatctattgtatgctggtctttactttttgcccaaatcaaaatataatgaagagatgccttttgtttatgagattcaaacctggatgctatgctttaaataaactcagtacttttagaaacctt

SEQ ID NO: 20671 - DNA, 1058 bp, Homo Sapiens
  misc_feature (617)..(663): n is a, c, g, or t
gcacgaggggactgctgcccccatgacatcctggctgggacgcgcatggatttaggagaatgtaccaaaatccacgacttggccctccgagcagattatgagattgcaagtaaagaaagagacctgttttttgaattagatgcaatggatcacttggagtcctttattgctgaatgtgatcggagaactgagctcgccaagaagcggctggcagaaacacaggaggaaatcagtgcggaagtttctgcaaaggcagaaaaagtacatgagttaaatgaagaaataggaaaactccttgctaaagccgaacagctaggggctgaaggtaatgtggatgaatcccagaagattcttatggaagtggaaaaagttcgtgcgaagaaaaaagaagctgaggaagaatacagaaattccatgcctgcatccagttttcagcagcaaaagctgcgtgtctgcgaggtctgttcagcctaccttggtctccatgacaatgaccgtcgcctggcagaccacttcggtggcaagttacacttggggttcattcagatccgagagaagcttgatcagttgaggaaaactgtcgctgaaaagcaggagaagagaaatcaggatcgctnnnnnnnnnnnnnnnnnnnnnnnnnnnnnnnnnnnnnnnnnnnnnnntcgggatcaagaaccagagatcgcaggaggtcacgctcccgggatcggcgtcggaggcggtcaagatctacctcccgagagcgacggaaattgtcccggtcccggtcccgagatagacatcggcgccaccgcagccgttcccggagccacagccggggacatcgtcgggcttcccgggaccgaagtgcgaaatacaagttctccagagagcgggcatccagagaggagtcctgggagagcgggcggagcgagcgagggcccccggactggaggcttgagagctccaacgggaagatggcttcacggaggtcagagagaaggagccggcgagatctgaccggtctccgggtgctgtaaatagtctgataacgttcacacagtctaaattacccttt

SEQ ID NO: 20672 - DNA, 1587 bp, Homo Sapiens
  misc_feature (546)..(596): n is a, c, g, or t
gcacgaggtttaattgtatctttgaaggtaaacaatatatggagctggatcacaacccctgaggatgccagagctatgggtccagaacatggtgtggtattatcaacagagttcagaagggtctgaactctacgtgttaccagagaacataatgcaattcatgcattccacttagcaattttgtaaaataccagaaacagaccccaagagtctttcaagatgaggaaaattcaactcctggttttagagataaatgaatgaagagtaccaaaatatttgttgacttctcttcatttttctcatacaatctgaagcctgagctgactatcatatccccaactcacagcagcgaaagctgcagttcagatttgagatcagtctccattcacttccacgtagcaccacagcaagagtgaccggaggcagagagctcttgttgggtcagctttctaataagcatgtcaagtgaaaaagaaccctctagcagcacactgatttagtttgtaagattttaatttacaaattaaaaaagctatttaatacatnnnnnnnnnnnnnnnnnnnnnnnnnnnnnnnnnnnnnnnnnnnnnnnnnnnatctttatctttctccttgtcctctttcctatcctttttgctctcttctttctcctgcccttctttcttctctgcatcccggttggcaatcttgttgttgatgaggttgtgcagggcgaccacggaacggatcagcgaggccaagtacactaccaccatctggtcattggtcttcaggtaaaaggccttgacgaactcctgcaggctgacatctggcagcaggttgaagacgtcctgcagctggtagatgatctggtggttgatgggcagcttgcctgtggcgactttttccaggtagctcctgatatccagaaagcttggagttcagtcccttcaaaccatggacctggtttgtgatccgctgggacagagtgcccaccgtcgtgtctttgatatctcgtaacaagtgttcaactccaacttcctcagcttcctctgctccaatttcactggtcacgtgttcaaatgttttcgaggttggagttccatcatcatggacttcttccactgaaatgtacgcttctgtaggcagccctaggtccttcggcttcacatcaatgatgaccaatccggaattaggacagtatcttttcatgagttcgttgatggcaatgtcattcttgtgtagtttagggcctgtgtggtaccagccaactattctttccctggcattgactttcttaaacattccatacatgttttccaaataatcatggtctaaaaaccatacagaatcgtctttgtcatcttcatcaaaaggaactgcaaaactgttcgatacatcaagtactttcttttgccatgaccccaaaagcacaccaacaacacgcttctggtttccaaccttgccgattcggttgaaatgatccaccacactgagcagcaccagggggtggaccaccaccttctgcactgccagctccggcatcgcgacacaccccgctcgccaggcctggctccctgccacacgcaaacaccggcagcagtagcg

SEQ ID NO: 20673 - DNA, 863 bp, Homo Sapiens
gcacgaggccttcaagacaaagaactcccaaaataaacatgatgctggcaaacctgtacaagaaggctggtcaggagcgcccttcagtcaccagctataaggaggtgctgaggcagtgcccattagcccttgatgccattctaggcttgttgtccctttctgtaaaaggggcagaggtggcatccatgacaatgaatgtgatccaaaccgtgcctaacttggactggctctctgtgtggatcaaagcgtatgcttttgtgcacactggtgacaactcaagagcaatcagtaccatctgttcactagagaaaaaatccttattgcgagataacgtggacctattgggaagcttggcagatctgtacttcagagctggagacaataaaaactctgtcctcaagtttgaacaggcacagatgttggatccttatctgataaaaggaatggatgtatatggctacctactggcacgagaagggcggctagaggatgttgagaaccttggatgccgccttttcaatatctctgatcagcatgcagaaccgtgggtggtttctggctgtcacagcttctatagcaaacgctactcccgggccctctatttaggagccaaggccattcagctgaacagtaatagtgttcaagctctgctacttaagggagcagcacttaggaacatgggcagagtccaagaagcaataatccactttcgggaggccatacggctcgcaccttgtcgcttagattgttatgaaggtcttatcgaatgttacttagcctccaacagtattcgagaagcaatggtaatggctaacaacgtttacaaaactctgggagcaaatgcacagacccttaccctttta

SEQ ID NO: 20674 - DNA, 1055 bp, Homo Sapiens
gcacgaggcagcggcaggcggagcaggaggccacagtggcgccggcagagcaggagtggctggaggagctgtggttggagcaggaggtggcacggcagggcctggagggctccctatgagtggcggagcaggcccaggaggcgctggagcaacagctccccacactgcaccatgagctcagttggctgcaggagcagctagcacaggccttgtctctgaaggagtctgagaagatggcgctgtcagagaagttgatgggtacacggcacagcctggccaccatctccctggagatggagcggcagaaaccagatgcccagagccggcaggagcaggaccgggtaggcctgccgtcgtagggaggcttgcggagcaggagcgccctctctccaccgagctatcccgcggtttccagcatcccatctggcggacttcttcctctctcttctcctactctgggtcttctatcctggtgttccttgaatgcctatcttccttttgtgcctcggaacctctcacgcctgccacaagttactcttttccttggtagttctgaactttaaataaggtaatgcctgtaagaatgccataaatgctcaataattgtcatctgttattattttcatcagtaacatcatctgaatcatcagtattgtctgcttttaacagctgcatttttcattgtccaaatatagtcacatacatttgaccattttataattattgaataataaatttgttctgctattttacaatgaaaaataatgctgcagagagcatttttgcacatgtatcgtggcagatgtaggccagaggctcttcttttatccatcctatggccaacctatgaatgtatatacgtttaatgagattttgccagcaatcaaagccttcagggaaaatgtccctagctctttactacatcagatcaaggactctggataattggcataacatcctggaatagctgaaacagagatattattctctgctctcctctgttgtctttgtctttttcacgtcttaataaaagtgctggtgacaagagtgtaact

SEQ ID NO: 20675 - DNA, 1714 bp, Homo Sapiens
gcacgaggccaagaaggaggagggggtcgggcctccgaggaaggcctagccgctgctgctgccaggaattccaggttggaggggcggcaacctcctgccagccttcaggccactctcctgtgcctgccagaagagacagagcttgaggagagcttgaggagagcaggaaagggcggcagtaagtcttcagcatcaggcattttggggtgactcagtaaatggtagatcttgctaccagtggaacagccactaaggattctgcagtgagagcagagggccagctaagtggtactctcccagagactgtctgactcacgccaccccctccaccttggacacaggacgctgtggtttctgagccaggtacaatgactcctttcgcagcctcccccgttgcccctctggatccactgcttaaatacggacgaggacagggccctgtctcctcagcttcaggcaccaccactgacctgggacagtgaatcgacaatgccgtcttctgtctcgtggggcatcctcctgctggcaggcctgtgctgcctggtccctgtctccctggctgaggatccccagggagatgctgcccagaagacagatacatcccaccatgatcaggatcacccaaccttcaacaagatcacccccaacctggctgagttcgccttcagcctataccgccagctggcacaccagtccaacagcaccaatatcttcttctccccagtgagcatcgctacagcctttgcaatgctctccctggggaccaaggctgacactcacgatgaaatcctggagggcctgaatttcaacctcacggagattccggaggctcagatccatgaaggcttccaggaactcctccgtaccctcaaccagccagacagccagctccagctgaccaccggcaatggcctgttcctcagcgagggcctgaagctagtggataagtttttggaggatgttaaaaagttgtaccactcagaagccttcactgtcaacttcggggacaccgaagaggccaagaaacagatcaacgattacgtggagaagggtactcaagggaaaattgtggatttggtcaaggagcttgacagagacacagtttttgctctggtgaattacatcttctttaaaggcaaatgggagagaccctttgaagtcaaggacaccgaggaagaggacttccacgtggaccaggtgaccaccgtgaaggtgcctatgatgaagcgtttaggcatgtttaacatccagcactgtaagaagctgtccagctgggtgctgctgatgaaatacctgggcaatgccaccgccatcttcttcctgcctgatgaggggaaactacagcacctggaaaatgaactcacccccgatatcctcaccaagttcctggaaaatgaagacagaaggtctgcccgcttacatttacccaaactgtccattactggaacctatgatctgaagagcgtcctgggtcaactgggcatcactaaggtcttcagcaatggggctgacctctctcggggtcacagaggaggcacctctgaagctctccaaggctgtgcataaggctgtgctgaccatcgacgagaaaggactgaagctgctggggccatgtttttagaggccatacccatgtctatctctctcgagtcagttcaacaaaccctttgtcttcttaatgattgaacaaataccaagtctcccctcttcatgg

SEQ ID NO: 20676 - DNA, 1124 bp, Homo Sapiens
  misc_feature (55)..(87): n is a, c, g, or t
  misc_feature (815)..(840): n is a, c, g, or t
gcacgaggtttccaataatatatttaataggtaagatctcattcatcaatatacnnnnnnnnnnnnnnnnnnnnnnnnnnnnnnnnnctaactttgattaagacatgtgcccttagtaagggcacttacaattagaaaggtttatcggtagcactttgaggtagcatattttgtaaagtcacagggctgctctgcagtttctcctggatacaaaggtagaggccatcagcctttgcccctggaagaggaaagtgaaattatctgtactcattgccagtgtcagcctgaacacactttctaccacccacccttggccatccctcctctacactttatgcgtcgggggtttagaacaacgtaaaggcattttgctgcttctttcctcttggtacggcagcatcccaggctgtggagccagttgcctcttgccgcatgtgattcaccagcaggagacgcatgcaccctgtggaaagggaagctgggcatcacagcatgctttttaattggctttaacatttcattaagtaagagtgactcattcctgcaaggctttaaagaggttcatttctgagtattctctccacgattctgaccctagaaagcgctcctttttttcctccctgggtgtaatcattttggggtatcattaagctttctgggattttcctggcaggagggtgaacagaaaagctttaaaaaatccacacaaaacaataacaaaaaacccaagtgcaagagcaataccaagaacagacttcctttgtgcaagttaaaatgatacaagtttacggttcaggaaaacaacctacttcttnnnnnnnnnnnnnnnnnnnnnnnnnnggaaatattcagttgagctctgcattttaaacacaaatatacagtcaaaagaggctaaggattaaagctgcaaaaatggtcccaacagcctcagacttttgctgcaggaaaattttttgcccaatggtcacagattaaagggatatctaatccccaagagcccttttgtcccaatatacttcctgtttgaaagtttaacccttacaagtaattgatatataagtgaataaaaatagcacatgtccaggcaaaaaagggcatgagctgggcggggagcctcgtgc

SEQ ID NO: 20677 - DNA, 1921 bp, Homo Sapiens
  misc_feature (1734)..(1743): n is a, c, g, or t
cgcgtccgacggaaacggggaagtcaggtggccgctgccgccgccgccgccgcggtttgtcgccagaaggaagatggcggatctggaggagcagttgtctgatgaagagaaggtgcgtatagcagcaaaattcatcattcatgcccctcctggagaatttaatgaggttttcaatgatgttcggttactgcttaataatgacaatcttctcagggaaggagcagcccatgcatttgcacagtataacttggaccagtttactccagtaaaaattgaaggttatgaagatcaggtattgataacagaacatggcgacttgggaaatggaaagtttttggatccaaagaacagaatctgttttaaatttgatcacttaaggaaggaggcaactgatccaagaccctgtgaagtagaaaatgcagttgaatcatggagaacttcagtagaaactgctctgagagcttacgtaaaagaacattacccgaatggagtctgcactgtgtatggcaaaaaaatagatggacagcaaaccattattgcatgcatagaaagccatcagttccaagcaaaaaatttttggaatggtcgttggaggtcagaatggaagtttacaatcactccttcaaccactcaagtggttggcatcttgaaaattcaggttcattattatgaagatggtaatgttcagctagtgagtcataaagatatacaagattccctaacagtgtctaatgaagtgcaaacagcaaaagaatttataaagattgtagaagctgcagaaaatgaataccagactgccatcagtgagaattatcagacatgtcggacactactttcaaagccttacgtcgacagttgccagttacacgcactaagattgattggaacaagatccttagctacaagattggcaaagagatgcagaatgcataagatgaacattgcatgaccggatcattttagtgtctttgcgttaaaaaatcattgcaaaagtattctgaactgtcaagctgcccagtcagatgggctgttgccatttaaaatcactgtaattaattagtttgattagagcacaaagcttagctaatcaaccattatttttcattttgtttgttctaagaggattgaaaatcagtttagtttaaatgtctttctgttaggcctttctttcttacaatgaagagatgattcttctagtttatggttaaaagtttttgaagtgtctcaaaaatattttactaactgtaaccctaaaattgatgtcttttggtttatgaaatcagtaatttttgatatttccccagttctttttaatggggtcaataatggacattctagtttaaggtggttgatggatttagccatatatgctgctaaagaaattgtctaccttttcttcctcacctgttccatttatgtaaagttgagattagagggaaagcattttctatatcaattgtgtttaaacctttcaagaaggttatttagctagcttagtgttgaactaaattttttttaaacaaggcaaggtctaatgctgttttgagattctgaaattaatgaaaatacttatttcagaaatgcatttaatgctttttttcttgtgacagttacgcaaatcagcttgaattccatatgtccctgagttatttttatcataaagccacaaatgtattataacaaggcaaattgtaatatatataatcctgaactcatgaccatgtctcagtttannnnnnnnnncttggattgaaaagtactgaaattccatgtgacattaaaatgcaaattttcctatttatttgagtagaaaatcacttaccagtgagcatatatattttaaaatactttctttgatatggtattccttaactgggtgtaattagaaaagctgggattacatatggtgtgcggttacagt

SEQ ID NO: 20678 - DNA, 1395 bp, Homo Sapiens
  misc_feature (517)..(527): n is a, c, g, or t
  misc_feature (896)..(905): n is a, c, g, or t
gcacgaggcttgcagctgtgacttataatggagttgataacaacaagaataaagggcagctgactaagagccctctggcacaaatggaagaagaaagaagggagcatgtagctaaaatgaagaagatggagatggagatggagcaggtgtttgagatgaaggtcaaagaaaaagttcaaaaactgaaggactctgaagctgagctccagcggcgccattagcaaatgaaaaagaatttggaagcacagcacaaagaattggaggaaaaacgtcgtcagttcgaggatgagaaagcaaactgggaagctcaacaacgtattttagaacaacagaactcttcaagaaccttggaaaagaacaagaagaaagggaagatcttttaaactctctattgaccaccagttaacgtattagttgccaatatgccagcttggacatcagtgtttgttggatccgtttgaccaatttgcaccagttttatccataatgatggatttaacagcatgacaaaaattannnnnnnnnnngttcttgatggagattaagatgccttgaattgtctagggtgttctgtacttagaaagtaagagctctaagtacctttcctacattttctttttttattaaacagatatcttcagtttaatgcaagagaacattttactgttgtacaatcatgttctggtggtttgattgtttacaggatattccaaaataaaaggactctggaagattttcattgaggataaattgccataatatgatgcaaactgtgcttctctatgataattacaatacaaaggttccattcagtgcagcatatacaataatgtaatttagtctaacacagttgaccctattttttgacacttccattgtttaaaaatacacatggnnnnnnnnnnccctatatgcttactgtgcacctagagcttttttataacaacgtctttttgtttgtttgttttggattctttaaatatatattattctcatttagtgccctctttagccagaatctcattactgcttcatttttgtaataacatttaatttagatattttccatatattggcactgctaaaatagaatatagcatctttcatggtaggaaccaacaaggaaactttcctttaactccctttttacactttatggtaagtagcagggggggaaatgcatttatagatcatttctaggcaaaattgtgaagctaatgaccaacctgtttctacctatatgcagtctctttattttactagaaatgggaatcatggcctcttgaagagaaaaaagtcaccattctgcatttagctgtattcatatattgcatttctgtattttttgtttgtattgtaaaaaattcacataataaacgatgttgtgcctcgtgc

SEQ ID NO: 20679 - DNA, 638 bp, Homo Sapiens
gcacgaggcagacctttaagaaaaggtggctacctgggggtgtcccagggactctgtcagtgccttcagcccaccagcaggagcttggagtttggggagtggggatgagtccgtcaagcacaactgttctctgagtggaaccaaagaagcaaggagctaggacccccagtcctgccccccaggagcacaagcagggtcccctcagtcaaggcagtgggatgggcggctgaggaacggggcaggcaaggtcactgctcagtcacgtccacgggggacgagccgtgggttctgctgagtaggtggagctcattgctttctccaagcttggaactgttttgaaagataacacagagggaaagggagagccacctggtacttgtccaccctgcctcctctgttctgaaattccatccccctcagcttaggggaatgcacctttttccctttccttctcacttttgcatgtttttactgatcattcgatatgctaaccgttctcagccctgagccttggagaggagggctgtaacgccttcagtcagtctctggggatgaaactcttaaatgctttgtatattttctcaattagatctcttttcagaagtgtctatagaacaataaaaatcttttacttctga

SEQ ID NO: 20680 - DNA, 1729 bp, Homo Sapiens
  misc_feature (810)..(822): n is a, c, g, or t
  misc_feature (835)..(891): n is a, c, g, or t
ccccgggctgcaggaattcggcacgaggcgcccacctatggtgacctgaaccacctggtgtctgctaccatgagtggggtcaccacctgcctgcgcttcccaggccagctcaatgctgacctgcggaagctggctgtgaacatggtcccgtttccccggctgcacttcttcatgcccggctttgccccactgaccagccggggcagccagcagtaccgggcgctgaccgtgcccgagctcacccagcagatgtttgatgccaagaacatgatggctgcctgcgacccccgccatggccgctacctgacggttgccgccgtgttcaggggccgcatgtccatgaaggaggtggatgagcaaatgcttaatgtccaaaacaaaaacagcagctattttgttgagtggatccccaacaatgtgaaaacggctgtctgtgacatcccacctcgggggctaaaaatgtccgccaccttcattggcaacagcacggccatccaggagctgttcaagcgcatctccgagcagttcacggccatgttccggcacaaggccttcctgcactggtacacgggcgagggcatggacgagatggagttcaccgaggctgagagcaacatgaatgacctggtgtctgagtatcagcagtaccaggatgccaccgcagaagaggaggaggatttcggtgaggaggccgaagaggaggcctaaggcagagcccccatcacctcaggcttctcagttcccttagccgtcttactcaactgcccctttcctctccctcagaatttgtgtttgctgcctctatcttgnnnnnnnnnnnnncttctgggggggnnnnnnnnnnnnnnnnnnnnnnnnnnnnnnnnnnnnnnnnnnnnnnnnnnnnnnnnntctcctctctctttccactctgggaaacctaggtttctgccattctgggtgaccctgtatttctttctggtgcccattccatttgtccagttaatacttcctcttaaaaatctccaagaagctgggtctccagatcccatttagaaccaaccaggtgctgaaaacacatgtagataatggccatcatcctaagctcaaagtagaaaatggtagaaggtagtgggtagaagtcactatataaggaaggggatgggattttccattctaaaagttttggagagggaaatccaggctattaaagtcactaaatttctaagtatgtccatttcccatctcagcttcaagggaggtgtcagcagtattatctccactttcaatctccctccaagctctactgtttggaggagtctgtcccactctgtcaagtggaatccttccctttccaactctacctccctcactcgagctcctttcccctgatcagagaaagggatcagggggttgggaggggggaaagagaccagccttggtccctaagcctccagaaacgtcttcttaatccccaccttttcttactcccaaaaaagaatgaacacccctgactctggaatggtgtatactgccacatcagtgtttgagtcagtccccagaagagaggggaaccctcctccatcttttttgcaacatctcatttcttccttttgctgttgcttcccccctcacacacttggttttgttctatcctacatttgagatttctattttgtgttgaacttgctgctttttttcatattgaaaagatgacatcgccccaagagccaaaaataaatgggaattg

SEQ ID NO: 20681 - DNA, 1233 bp, Homo Sapiens
gcacgaggcttttctaaatccttgttaatcaacgttagtataacttactgctgacctttttatcttgagtgttatgtgaatttgagtttgctgttttaaattgcatttctatgccatttttagtttaaaatcttgcatggcattaattgttccttgcttttatagttgtattttgtacattttggatttctttatataaggtcatagattcttgagctgttgtggtttttagtgcacttaatattagcttgcttaaggcatacttttaatcaagtagaacaaaaactattatcaccaggatttatacatacagagattgtagtatttagtatatgaaatattttgaatacacatctctgtcagtgtgaaaattcagcggcagtgtgtccatcatattaaaaatatacaagctacagttgtccagatcactgaattggaacttttctcctgcatgtgtatatatgtcaaattgtcagcatgacaaaagtgacagatgttatttttgtatttttaaaaaacaattggttgtatataaagtttttttatttcttttgtgcagatcactttttaaactcacataggtaggtatctttatagttgtagactatggaatgtcagtgttcagccaaacagtatgatggaacagtgaaagtcaattcagtgatggcaacactgaaggaacagttaccctgctttgcctcgaaagtgtcatcaatttgtaattttagtattaactctgtaaaagtgtctgtaggtacgttttatattatataaggacagaccaaaaatcaacctatcaaagcttcaaaaactttgggaaagggtgggattaagtacaagcacatttggcttacagtaaatgaactgatttttattaactgcttttgcccatataaaatgctgatatttactggaaacctagccagcttcacgattatgactaaagtaccagattataatgccagaatataatgtgcaggcaatcgtggatgtctctgacaaagtgtgtctcaaaaataatatacttttacattaaagaaatttaatgtttctctggagttggggctcttggctttcagagtttggttaatcagtgttgattctagatgatcaacataatggaccactcctgaatgaaacttaattttgtctttcaatttactgtcttaaatcagtttatttaatctgaattttaaacatgctgtttatgacacaatgacacatttgttgcac

SEQ ID NO: 20682 - DNA, 1645 bp, Homo Sapiens
  misc_feature (1386)..(1394): n is a, c, g, or t
gcacgaggaaaaaaaagtgtcggggtagcctgctgtcccctaagagtaacagacacttgcctttgcaaatagattacaaaaaaaaggtctttcctctcttcatttatcattttaatatgcaagctgttaatattgaagtagatgtttgttttccacattctaaaattactgagatttctgtttaacgtttcactttgcctttcttcttcacttaccaattggaagctttcctgataaatggatgagagccaagcagtttatataacctgaagatgattgaatttcagctttgtgagaatgaggaaacatgcatgtgttacaggccaggccttaaaaggatgcttataaaccaaaataattctatgctggaaaaacctgttggctttggtgctttaagttctttgtaaaatgattacttatctgcaagttctcttggatacttagacataaagttcagcgaagctaagataaaaaaataactcagggatatttcattgttttatttattcagacaggcctgtcttcacttcttattatactgaagttatgtaccatttgcaaatgtaagagtacctttggattcttcagctaccttaataaatatttgttagacaccagacctattttattcaaagcttattttaatatttgctctttctttttacagcaattttccagattattcaaagtatcaggatgggcatgtgaagtgactgaccttaagatgtttccattctcctgtgaattttaacttgaactcattcctgatgtttgataccctggttgaaaacaattcagtaaagcatcctgcctcagaatgactttcctatcatgcttcatgtgtcattccaaggtttcttcatgagtcattccaagttttctagtccataccacagtgccttgcaaaaaacaccacatgaataaagcaataaaatttgattgttaagatacagtagtggaccctacttattcagtcaattaagagtaagtttttttatgtggttattaaaacagtatgaacaattagtctaactctgcatagacagggtctagattttgttaacccaaatgtataactgcagttagcttaaattacaatttgaagtcttgtggtttttatatagctaggcactttattactcttttgaactgaaagcacactcccttataggttcatgtaactgtcctgtaataaggtgcttataaatggaacaactacacagcctagttttgccacaacctttagcatctaaaaagttttaaaagcttctaaatgtctaatataaagggagatgcttatagccacaacatctattttaccaatattgtttccattacactaccttggattttgcatgagtgagtatagtaacccaagatgccatnnnnnnnnncttgatcgttttctgacttaatcagttactgtggtttcactaaaagctaccgtggtggagtgaagtcagtcagggaaggtttgtttatgttacatttatttcaccagaactattttaatatatcaaaggggttactatgccaaacaaaattctagggaaaaatactgctaaaatggatgcctcatcagaaacatgctgttgagtccaatgtgccataagacattttagcatgttaaatagcacttttaata

SEQ ID NO: 20683 - DNA, 2188 bp, Homo Sapiens
  misc_feature (1542)..(1576): n is a, c, g, or t
  misc_feature (2006)..(2018): n is a, c, g, or t
ccaaaattgcattgagccaaacttgccaccaagagcccaacaatcaccatgatgctgagcacggaaggcagggaggggttcgtggtgaaggtcaggggcctaccctggtcctgctcagccgatgaagtgatgcgcttcttctctgattgcaagatccaaaatggcacatcaggtattcgtttcatctacaccagagaaggcagaccaagtggtgaagcatttgttgaacttgaatctgaagaggaagtgaaattggctttgaagaaggacagagaaaccatgggacacagatacgttgaagtattcaagtctaacagtgttgaaatggattgggtgttgaagcatacaggtccgaatagccctgatactgccaacgatggcttcgtccggcttagaggactcccatttggctgtagcaaggaagagattgttcagttcttttcagggttggaaattgtgccaaatgggatgacactgccagtggactttcaggggcgaagcacaggggaagcctttgtgcagtttgcttcacaggagatagctgagaaggccttaaagaaacacaaggaaagaatagggcacaggtacattgagatcttcaagagtagccgagctgaagttcgaacccactatgatccccctcgaaagctcatggctatgcagcggccaggtccctatgataggccgggggctggcagagggtataatagcattggcagaggagctgggtttgaaaggatgaggcgtggtgcctatggtggagggtatggaggctatgatgactatggtggctataatgatggatatggctttgggtctgatagatttggaagagacctcaattactgtttttcaggaatgtctgatcatagatacggagatggtgggtccagtttccagagcaccacagggcactgtgtacacatgagggggttaccttacagagccactgagaatgatatttataatttcttctcacctcttaatcccatgagagtacatattgaaattggacccgatggcagagttaccggtgaggcagatgttgaatttgctactcatgaagatgctgtggcagctatggcaaaagacaaagctaatatgcaacacagatatgtggagctcttcttaaattctactgcaggaacaagtgggggtgcttacgatcacagctatgtagaactttttttgaattctacagcaggggcaagtggtggcgcttatggtagccaaatgatgggagggatgggcttatccaaccagtctagttatggaggtcctgctagccagcagctgagtggtggttatggaggtggttatggtggtcagagcagtatgagtggatatgaccaagttctgcaggaaaactccagtgactatcagtcaaaccttgcttaggtagagaaggagcactaaatagctactccagatataaaagctgtacatttgtgggagttgaatagaatgggagggatgtttagtatatccagtatgattgggtaaatggggaaatataattgattctgatcactcttggtcagnnnnnnnnnnnnnnnnnnnnnnnnnnnnnnnnnnnaagaaaacgagttaagtttaacagttttgcattacaggcttgtgattcatgcttactgtaaagtggaagttgagattattttaaaacttcaagctcagtaattttgaacactgaaacattcatttaggacataataacaaagttcagtattgaccataactgttaaaacaatttttagctttcctcaagttagttatgttgtaggagtgtacctaagcagtaagcgtatttaggttaatgcagtttcacttatgttaaatgttgcttttataccacaaatacattgaaaacttcggatgcatgttgagaaacatgcctttctgtaaaactcaaatataggagctgtgtttacgattcaaagtgaaaacatttggctttgttaattctagctttttggtttaatatcctgtaaggcacgtgagtgtacacnnnnnnnnnnnnnaaggatacgggacaattttaagatgtaataccaatactttagaagtttggtcgtgtcgtttgtatgaaaatttgaggctttggtttaaatctttccttgtattgtgatttccatttagatgtattgtactaagtgaaacttgttaaataaattttccttttaaaaactgg

SEQ ID NO: 20684 - DNA, 757 bp, Homo Sapiens
  misc_feature (552)..(572): n is a, c, g, or t
gcctttgcaaagcttttatttcatgtctgcggcatggaatccacctgcacatggcatcttagctgtgaaggagaaagcagtgcacgagaaggaatgagtgggcggaaccaacggcctccacaagctgccttccagcagcctgccaaggccatggcagagagagactgcaaacaaacaaacacaagcaaacagagtctcttcacagctggagtctgaaagctcatagtggcatgtgtgaatctgacaaaattaaaagtgtgcatagtccattacatgcataaaacactaataataatcctgtttacacgtgactgcagcaggcaggtccagctccaccactgccctcctgccacatcacatcaagtgccatggtttagagggtttttcatatgtaattcttttattctgtaaaaggtaacaaaatatacagaacaaaactttccctttttaaaactaatgttacaaatctgtattatcacttgtatataaatagtatatagctgatcattaataaggtgtataagtacaatgtattctaaaactgttaagccnnnnnnnnnnnnnnnnnnnnntatccaagtgtcctcctccaccactaacgctggtgatcactgtgctctctgccagctgcgtggagtgacgggaggagggaatcactgtgtgtgcgagagtgcttcaaactcaatttccaaaataattttcacccctctaagcatgtaaatatacaagatggatccttcatagaaatttaaaaaat

SEQ ID NO: 20685 - DNA, 1719 bp, Homo Sapiens
  misc_feature (283)..(291): n is a, c, g, or t
gcacgaggctttattaattattttattaaatcataaatgtacaacagcttcttaactctacacacgcacttaaatttttttaaaggaaaaacgttatgtcttattacaccatgatcctggctaatagcttttcaaaactttgagaaaaatcttaaaaaaggtttcacatgtcacctgaaacttacaaatttaacattatcaaagaaggaatgcttctacactcttacaaagaccactagaaagaaacaacaattaaaaagctaagaaactgtctcaaaggcannnnnnnnnacaatccttcctccacagtaaggtaatgttattaaataatccaatccattcacaaaatggctctctgcatctgctctggtgtcttctgccatatcactgcatatttatgcatgactgagataagagtttccttaacattgttatttcgataacctgaagctgttctgttacctctgggctctcatcctctcctatttatacagtgaagcccatggcaaataggaagaagctcagtatcggctcctcccaccataacccccacttcctccactgcctcctggaccatagtttcctccaccatatggtccccccatgttcctgctaccaccaaagtttccactcttcattggaccgtagttagaaggttgctggttataatttccaaaatcattgtaatttccacttccataatttcctcctccatagttgtcataaccacctccgtagcccccaccctggttgccatatccaggtcctccaccaccatatcctcctcttcctcctccataaccggggctacctccaaaattgccacctccaggtcctcctccatacccattatagccatccccaaatccacgtccactgccatatccatcagatcctcctctaaagttacttcctggtcctggtccgaaatttccaccgccaccacgtgaatccccaaagccaaagttgcctcctcttccactcctagaactctgaacttcctgcatttcttgtctagacaaagcctttcttacttctgcattatgaccattgatggtatggtatttctgcaatacgattttatccacaggatcatggtcatcaaaagtaacaaagccaaagcctcttttctttccagactgcctatcagtaattatctcaatggtatcaatttttccatattcctcaaagtaatctctaaggtgatgttcctcagtatcttctttaattccgccaacaaacagcttcttcacagttacatgagcccctggttttccagattcctctcttgctacagcacgttttggctcaactactctcccatcaattgaatgaggtcttgcagccatggcagcatcaacctcagccatggatgaaaaagttacaaaaccaaatcctcttgatcttttgcttgcaggatccctcattaccacacagtctgtaagctttccccattgttcgtagtagttcctcaaactttcttctgtggtttcaaagcttaagccaccaataaagagcttacggaactgttccttttctctctccatcgcggactcagtcgcttcagcccgatttcccgcagccgagcgagatgagagagatctccgcggacgaacacgaaccggactcgtcctggcgctgtagtgagaactgccgctgctcgagaaacaactctgcgaggagcacctccgcacgggacccggcgctgctgcctcgtgc

SEQ ID NO: 20686 - DNA, 1723 bp, Homo Sapiens
  misc_feature (601)..(643): n is a, c, g, or t
  misc_feature (712)..(727): n is a, c, g, or t
  misc_feature (1407)..(1419): n is a, c, g, or t
tggcagaacctcggctctcaggaggtccttgttccagggaacagctgcttctctggggctgggctctactccctgcagcccctcgcactacccagctggaaccagggacaacgcctgagtccaaccctcgtgtctattttccagaaaacgggcaatgctgtgagagccattggaagactgtcctctatggcaatgatctcagggctcagtggcaggaaatcctcaacagggtcaccaaccagcccgctcaatgcagaaaaactagaatctgaagaagatgtgtcccaagctttccttgaggctgttgctgaggaaaagcctcatgtaaaaccctatttctttaagaccattcgcgatttagaagttgtggagggaagtgctgctagatttgactgcaagattgaaggatacccagaccccgaggttgtctggttcaaagatgaccagtcaatcagggagtcccgccacttccagatagactacgatgaggacgggaactgctctttaattattagtgatgtttgcggggatgacgatgccaagtacacctgcaaggctgtcaacagtcttggagaagccacctgcacagcagagctcattnnnnnnnnnnnnnnnnnnnnnnnnnnnnnnnnnnnnnnnnnnnaagagtgaaacaaagccagagaaaagcagtttctaagtcatattaaaaggactatttctctaaaactcnnnnnnnnnnnnnnnnctcaagatagtaaaagcacctagtgtgatagattatcggttaggtcatttgtgggttgattcttcagaaacagcagttgatacctagcagcgttattgatgggcattaatctatgttagttggcaccttaagatactagtgcagctagatttcatttagggaaatcaccagtaacttgactgaccaattgattttagagagaaagtaaccaaaccaaatatttatctgggcaaagtcataaattctccacttgaatgcgctcatgaaaaataaggccaaaacaagagttctgggccacagctcagcccagagggttcctggggatgggaggcctctctctccccaccccctgactctagagaactgggttttctcccagtactccagcaattcatttctgaaagcagttgagccactttattccaaagtacactgcagatgttcaaactctccatttctctttccccttccacctgccagttttgctgactctcaacttgtcatgagtgtaagcattaaggacattatgcttcttagattctgaagacaggtccctgctcatggatgactctggcttccttaggaaaatatttttcttccaaaatcagtaggaaatctaaacttatcccctctttgcagatgtctagcagcttcagacatttggttaagaacccatgggnnnnnnnnnnnnntccttgctaatgtggtttcctttgtaaaccaggattcttatttgtgctgttatagaatatcagctctgaacgtgtggtaaagatttttgtgtttgaatataggagaaatcagtttgctgaaagttagtcttaattatctattggccacgatgaaacagatttcaactgataaagagctggagaactccatgtactttggaatctcctccaagatagccagagtttaatacatcttcattctcaacactctctaaagacttgacctaccttatgggttccatatttttcttcttaaatgtgcatc

SEQ ID NO: 20687 - DNA, 1448 bp, Homo Sapiens
  misc_feature (963)..(977): n is a, c, g, or t
gcacgagggtgaagcgttagttgacaagcgggttgctccggcccttgttaccttgtccagtgatcctgaattctctgtcaggattgccacaattccagcctttggcactattatggaaacagtaattcaaagagagttgctggaaagagtgaaaatgcagttggcttctttcctggaagatcctcagtatcaagaccaacattctttgcatacagagatcataaaaacatttggtagagttggccctaacgcagaacccaggttccgagatgagtttgttataccacatttgcataagttagccttggtgaacaacttacagattgtggattctaaaagactggacattgctacgcatctttttgaagcctacagtgcactttcctgttgtttcatttcagaggatttaatggttaatcactttttacctggtctcagatgtttacggactgacatggaacatctctctccagagcatgaggttattttaagttccatgataaaagaatgtgaacaaaaagttgaaaacaagaccgtccaagagcctcaaggctcaatgtcaattgctgcaagcttagtgagtgaagatacaaagaccaagtttttgaacaaaatgggccagttgacaacatcaggtgccatgttggccaatgtatttcagagaaagaagtagaagcaggaaagaagcccccagtaaacactaagatggacctcaagccgactggttccttgtacttgaagtacttgccttttttgtttcctcagttttatgttcttgcattataattttatcctaacctccaaagatatttgcactgcttttaattactgctgtatatttgttgattttggagttacaactgtggtgatagaaaattgagttgatggtctgtaccaagtcccttgtctatgttcttgtctttcagaataatttttatataaatatatatatagtgaagaagnnnnnnnnnnnnnnnggatgggatattcgcaaatatctgtattatacactaagctattacaatggtacttaaaataatgtaaatttgaagtcattgttataaaataataaagtggagattacttaagtatttaaattatgaaagaataatgcagactttttattgtttcttaactgactagaaagagccaccagcattactctgtgccttttggacatcagtttgtgtgttctgtaggaattgtgtgcattccattcacacagtatttctttaggatgctgtgatgatttgaattacaaatcctacagtcaatagctaaagacgaaaccttcatttcagactctcatgaatattctttaagtgctatttaaacctccccagcacttagatgcatataatgacttacctgagaaagacagcacataggcatggggagaggtaacaaggtgattttacaactggtgtatagtagattaaatgctcaaa

SEQ ID NO: 20688 - DNA, 1372 bp, Homo Sapiens
  misc_feature (63)..(107): n is a, c, g, or t
gcacgaggcattacttcatgtatatcaagcacagcagtaaaacaaaaacccatgtatttaacnnnnnnnnnnnnnnnnnnnnnnnnnnnnnnnnnnnnnnnnnnnnngatacttgcctaacatgcatgtgctgtaaaaatagttaacagggaaataacttgagatgatggctagctttgtttaatgtcttatgaaattttcatgaacaatccaagcataattgttaagaacacgtgtattaaattcatgtaagtggaataaaagttttatgaatggacttttcaactactttctctacagcttttcatgtaaattagtcttggttctgaaacttctctaaaggaaattgtacattttttgaaatttattccttattccctcttggcagctaatgggctcttaccaagtttaaacacaaaatttatcataacaaaaatactactaatataactactgtttccatgtcccatgatcccctctcttcctccccaccctgaaaaaaatgagttcctattttttctgggagagggggggattgattagaaaaaaatgtagtgtgttccatttaaaattttggcatatggcattttctaacttaggaagccacaatgttcttggcccatcatgacattgggtagcattaactgtaagttttgtgcttccaaatcactttttggtttttaagaatttcttgatactcttatagcctgccttcaattttgatcctttattctttctatttgtcaggtgcacaagattaccttcctgttttagccttctgtcttgtcaccaaccattcttacttggtggccatgtacttggaaaaaggccgcatgatctttctggctccactcagtgtctaaggcaccctgcttcctttgcttgcatcccacagactatttccctcatcctatttactgcagcaaatctctccttagttgatgagactgtgtttatctccctttaaaaccctacctatcctgaatggtctgtcattgtctgcctttaaaatccttcctctttcttcctcctctattctctaaataatgatggggctaagttatacccaaagctcactttacaaaatatttcctcagtactttgcagaaaacaccaaacaaaaatgccattttaaaaaaggtgtattttttcttttagaatgtaagctcctcaagagcagggacaatgttttctgtatgttctattgtgcctagtacactgtaaatgctcaataaatattgatgatgggaggcagtgagtcttgatgataagggtgagaaactgaaatcccaaacactgttttgttgcttgttttattatgacctcagattaaattgggaaatattggcccttttgaataattgcctcgtgc

SEQ ID NO: 20689 - DNA, 408 bp, Homo Sapiens
  misc_feature (320)..(332): n is a, c, g, or t
tcccccgggctgcaggaattcggcacgaggctgcctcttcccttctcgcttgggaactctagtctcgcctcgggttgcaatggaccccaactgctcctgtgccgctggtgtctcctgcacctgcgccagctcctgcaagtgcaaagagtgcaaatgcacctcctgcaagaagagctgctgctcctgctgccctgtgggctgtgccaagtgtgcccagggctgcatctgcaaaggggcatcggagaagtgcagctgctgcgcctgatgtcgggacagccctgctcccaagtacaaatagagtgacccgtaaaatccaggannnnnnnnnnnnngctacaatcttgacccctttgctacattcctttttttctgtgaaatatgtgaataataattaaacacttagacttg

SEQ ID NO: 20690 - DNA, 2637 bp, Homo Sapiens
  misc_feature (199)..(210): n is a, c, g, or t
  misc_feature (1265)..(1273): n is a, c, g, or t
  misc_feature (1568)..(1582): n is a, c, g, or t
gcacgaggggcacaccttaggttgacattcagaaaacttcaagacatcaccatcagcaggctccagttgaacactagtctgtgtaactttaaacatctagcagtaaatacttgcagttgtgatataaaggaccctgtttctgtagaaaagaaaacatttaacataatggttgtgaaatgtaacatgaagcaaactaacnnnnnnnnnnnnaacatctttgtttttaaaatagaatgatagaactttgccagtctttaagatcttggcttaatttaatgtattaatctgtttgtgcaaacataataccaccatttaaaaatgttagggagatgagttgcagtttttataatagattttttttaaagtttggtattgtaaaacattcacacctctgtccctcaaaattgataattacgtttaaagtgcagtcatttgtggttagaatcttgttttgtttgcttccattattgagttcctcctaaggaaattgaggagagggactgaatagaagcccaaattcatataaaagttgcgtttaagttgtattaaaaatagatatataagaaaaaattctttcacttgatgtttgttagaccagaaagtgtgtgtgttctgtagctcagttcccagacagctttttaggtagtggaggaggtggcttcatgtggcacttgggcatttatattccacttgggagggtcaggctgtggccttctggagcaggtggcttgttaaggaacgctagcagggcatggcacgtgagctccggaatagatgtcttcatcacttcttccactgtgtgttgacactgttttccttacctatttcctcagatccccagctttctcctctgctatgcattttcttcacagtgcagcttgcagtccgttgctgaaaatgattataagccctgcataatgttaagctttattgtgattacgtgtatgtttcttctttcttttaagcagacccatacctttccagggtcaaagtacagaatagaatacattgatacaaagtacagaaaaatactttgatttttatccatttcttttactctgtgtaaagactttagaagtctaattcacaggcaaaccaatacagaattgactgcagttgaacagactagaagtatttgtgggaggagtgacatgaagcatgagttatctgattttttttgtagctgctatatattttaagccttcatttgcaattcatgtaacagttgtgtcataaattacacaataaagcagtcctgttcaaannnnnnnnnaacgtggcttgtagaatttttaaaaaagtgatcttaggtttgttttttcatgcgggatgcagatgggtgctatcagagcctctcccacaccactatagtgtaataatgttattattactctacactgaaacgtattcagagttagatattattttagcttcagttgttctttagaggctttcaaatgtaccgatgatactgtttcttgcactgaatatataaacactccacagtgtttatattgggaagatattgggaaggaaatatatttgtaaaagatgaaggctgtatctannnnnnnnnnnnnnnaaactggttcacttaaattcttttgaggatgggatgtatttttcttgctgttcagtgctttttccttttcatctgttgttctgtggtcacagtgaccttagctacatagcagactttcccaaatgtattgattacaaataaacagttgttacttagcaagacctgaaaatatgtctgcaggtttctccttgaagcaaatgtgtgggatcattgcatttccagaaatctgcctccttcaccctccgttgacagtatatgtcatgcctcactttcttctagctgagctttaaatcattagagcttaaattgtcagatcgttcattgcctttccagggttatttagtaaagtttgttgaaaacaaaaacgccttttcttggttcttttttcagttattttgaaggtccagcatcctgattaaatgtctgacacattaatgaatgaccagcagcagctttcagctcttaaaaagacacttatattttgattttacatgctggttacctgttccattgttgtcaaatgcccactctccatcagatgtgttcctccattttcttatccacaaagtactcctcacttttcaatttgtcatgttactaaatggtgttacattaaagccctgtgttaagtgtctgcttttgactgaatttcttcatagtaaccttcagtgtgtgtgtgtgactatgttcaattagtgggttgatcttcgtataattggccactatgtgagagttcactactaggcagaaactattatggacagtgaaataatgacttttatctcaccacgtgagtttgatgcagtcttttctgtctagcccttgcctcttcctgcccatgtgattgcggtgcagtagtttctgttgtataatagtgtggacagcagctcagaaaaggagggaatgctactgatatttgtagataatattctttaagacttaggggaaccattgaactttgaaattttatagaaaattatttggtcagaatcagactccttatttacatatacttaaatactttaggggtatttttgaaagtagcccagttttta

SEQ ID NO: 20691 - DNA, 1043 bp, Homo Sapiens
  misc_feature (393)..(443): n is a, c, g, or t
gcacgagggaaaaattcaactataagaaaattgtatttatataacatttactatttttgaagactagtgagatttctgtaataattttaattctttaaaaagtgaaagcttgttgtaaagatattttctttttgttattagaaggaaatacaaagagaaaaatttctttctttcatgggcatttgataatttcagtctttgactgatttgtaagcctagaatatactaagctgaataacagctctttggcctcagaattttcagtagccagtatttctgattaactaagttgaaactcttattagaaactttcagttggtgatattgtattctagaagatataaatgagaggtttggcttcatctcagtttagaaatttattcaaagctaaannnnnnnnnnnnnnnnnnnnnnnnnnnnnnnnnnnnnnnnnnnnnnnnnnngcagtttgtcaggttatatatagaatttctattaaggattttttaaatggacaagcaatagggggttgaagtgtttatctgatttgtttaaaattttgtatatcaccaaatttttaaaaagtgatagtcacagtgctaagttatctagttggctactattacaccttaaaaattgagtttacacacacacaattacctgtttatatggtgctcatttgttattctcaaatataatgtgtgaccgtgatatagtgagaaagattctaccaaccactgtttcactactttttagttaaaattgggtatgttcttaatattcattagtgagaatcacaaagtattttgtagaaggcccaaatcacagaataaaggactaagagtggatttgctgacattccatactaatatacattgtttatgctttctttaaaataactagaagaacataaaagaaagagaatctcagaagtagtttgctgctaatatatacatatattgtataaaaaggtatattttggttttgttaaaacccttgttgacttttctacactgaacattttttttaacttgatttaataaaaatgttaattttggaagtgc

SEQ ID NO: 20692 - DNA, 897 bp, Homo Sapiens
  misc_feature (98)..(107): n is a, c, g, or t
gcacgaggctttcagtaagatttctctcaaaacacgtgaaaaccttggtaaattgcaattctttctggggatatattggtacaacatgacttaaaacnnnnnnnnnnctattaaaacttaaaggggaacaaaacttgaaaaagccctgttcttcagaaggtgagtgggttgagggaggcagtaatatgaagtgactgctgtgtattttaactaccagattttttatatttgccactgttaaatagttggaaaggggaaattctgattaagcgaaagtggtatcatcctaggtaagcttatttcagaacaagtctaatatttcagattctttcttttcgactttatactctgagttattacttactgtaagtggtgtatatgaaacctccatgcattttccagtatggatctgctaatatgcacagtaaatccatgtctttgtttgtttttctattaaaaagcaatcaagaaagataatgtgaaaaagaaaggaatttagaggtagggaaaagatgaatgtcagacatttgaagaactatagtaaaatgataaacactaaatatacttgagaaaactttcttaatatgccaatgaggtaggcctgatctttgaaatagtgaataggaatacaatgcatttcctcagtgatcactgattagaatgagttggtgggatccttgggaagccaaacggagcggagttctggatcatgtcccatccagtccagtgaatccacgacccgcagacctgcccccccgcaacagcttataccatggaatgaggacaaggtgatactctgagctgtggactgaactggcagacacaacctgtacagattgaaatttcaccttgtaaggaggaagtgaatgaaataaaggatccccctaagcctcgtgc

SEQ ID NO: 20693 - DNA, 795 bp, Homo Sapiens
acaaactagcatagaaacctttatttcacaactttatcatcattcacattctaaaaagacacggactgggggacacagctgaaaacagtgggaggccagatgctggcatcttccagacgggagcatagccatggtcactctagccgatgtctcctggggctctcaggcggcaaggaccagatgcaccactactgtccaatcccagttttacttagagccacctccttttttggggccattagtccttatttcatgccagattttcactagcggctccctgttcttccaaatcagttcatgaccgtaagtaacataccatattccaaaaagagctcccccaagatgtgccgcatgatcaaaaaatttccatcccaggatcattcctgctgtatccatggcgataatggctttcagggcattccctgctgtgaacgtgaacatcggaaggaaaataatggcaagcctcccttctgggatcttagtgcagacagctgcgaggactgtcatgatggcaccagatgcaccaagtgatggtccatatcttcctgtggcaactttacccaggtaactgacaaaattggaaataacacttgaggctggattcgatgtgaaatatctgatcattgtccgctgcagagaaggtactctccataaacagaatacaaggacatttgcagctataatacctgtcacagtccgctggccatcacttaggttattcaaccacttgttaatctcctttctgagtctccttctttttgtggtctaatgctatccaaccaatcagcttttata

SEQ ID NO: 20694 - DNA, 2038 bp, Homo Sapiens
gcacgagggggactcttggcgggtgaaggtgtgtgtcagcttttgcgtcactcgagccctgggcgctgcttgctaaagagccgagcacgcgggtctgtcatcatgtcgcgttacgggcggtacggaggagaaaccaaggtgtatgttggtaacctgggaactggcgctggcaaaggagagttagaaagggctttcagttattatggtcctttaagaactgtatggattgcgagaaatcctccaggatttgcctttgtggaattcgaagatcctagagatgcagaagatgcagtacgaggactggatggaaaggtgatttgtggctcccgagtgagggttgaactatcgacaggcatgcctcggagatcacgttttgatagaccacctgcccgacgtccctttgatccaaatgatagatgctatgagtgtggcgaaaagggacattatgcttatgattgtcatcgttacagccggcgaagaagaagcaggtcacggtctagatcacattctcgatccagaggaaggcgatactctcgctcacgcagcaggagcaggggacgaaggtcaaggtcagcatctcctcgacgatcaagatctatctctcttcgtagatcaagatcagcttcactcagaagatctaggtctggttctataaaaggatcgaggtatttcaatccccgtcgaggtcaagatcaagatccaggtctatttcacgaccaagaagcagccgatcaaagtccagatctccatctccaaaaagaagtcgttccccatcaggaagtcctcgcagaagtgcaagtcctgaaagaatggactgaagctctcaagttcaccctttagggaaaagttattttgtttacattattataagggatttgtgatgtctgtaaagtgtaacctaggaaagataattcaaccatctaatcaaaatggatctggattactatgtaaattcacagcagtaagataatataaattttgttgaatgtattaacatcatatggtctgaaaatgtgggtttttatttggcacatttaaataaaatgtttctaactagatttttgatttgtgttcaatattaacacttcttaatttgatatatttgagagtcagacattataattgttaaccttattcatacatacctacattcagaattgaaaggtgttggttaagtcttgaacatcactattctatgcataaaacttggccaggatcttaagggactttgaaaattccatcttacccttgtagctctgggtaagatgacctgagtcccttatgatacagcctgaatgcatcatgacagatccttaagttagctaatccgtttgaagttggtgttagtaggtattgtatgatcagtggtgaagcaagtaggaccactgatgtgtctaaatgagcatgacaggaactaaacgaaactgattaaatgtatgagaaatagaaacatttctggatgatctttatactaattgcagctttcaggctactaggtggcatagtgttaattaggactccccaagatatggggagttctactctcaatggtcttgtttctttgctttctacattagttaaccagttttataccaaaaaatgcatgtttgaggaattgtctgaaattgggacaaaacaccttcatgtaaaccagctttgcaaaattttccagcccagatactcttcatctattcaaatggattgtcttattctgagcaaagacctgttgttaatcttcaagctaggttttgcagttcccaaccacaacattcttctattttgccaggctggtgcaaagtaattaaagatgtcaatcagaaatgtcaatgagactaaagtggttttgtaaatctcagctatatttagcaacactccatgtagctaatattttttggtagcatctggtagaccttaaaatgttacatagcccgtaagttctttattcaaattttaagtatcttaaaatagtagggcagtaacagtttacttttgaaattttctgggtcaagcttttacccagcattctctagccttggta

SEQ ID NO: 20695 - DNA, 902 bp, Homo Sapiens
cgcacgaggagcagtggtatgaaattggcctgattcctttctaagtgtgttgttcttgttcacagttggacatgatataggtcgtggatgtatggggaatctaagagagctgccatcgctgtgatgctgggagttctaacaaaacaagttggatgcggccattcaaggggagccaaaatctcaagaaattcccagcaggttacctggaggcggatcatctaattctctgtggaatgaatacacacatatatattacaagggataatttagaccccatacaagtttataaagagtcattgttattttctggttggtgtattattttttctgtggtcttactgatctttgtatattacatacatgctttgaagtttctggaaagtagatcttttcttgacctagtatatcagtgacagttgcagcccttgtgatgtgattagtgtctcatgtggaaccatggcatggttattgatgagtttcttaaccctttccagagtcctcctttgcctgatcctccaacagctgtcacaacttgtgttgagcaagcagtagcatttgcttcctcccaacaagcagctgggttaggaaaaccatgggtaaggacggactcacttctctttttagttgaggccttctagttaccacattactctgcctctgtatataggtggttttctttaagtggggtgggaaggggagcacaatttcccttcatactccttttaagcagtgagttatgggtggtggtctcatgaaaaaaagaccttttggcccaatctctgccatatcagtgaacctttaaaactcaaaactgagaaattactacagtagttagaattatatcacttcactgttctctacttgcagcctcaaagagagaaggttcggtatattaaaacact

SEQ ID NO: 20696 - DNA, 2731 bp, Homo Sapiens
  misc_feature (24)..(36): n is a, c, g, or t
  misc_feature (268)..(328): n is a, c, g, or t
  misc_feature (2362)..(2410): n is a, c, g, or t
  misc_feature (2483)..(2526): n is a, c, g, or t
tccgcgtctcccccgccggagacnnnnnnnnnnnnncttcctcttttataaaataacccggtgaagcagccgagaccgacccgcccgcccgcggccccgcagcagctccaagaaggaaccaagagaccgaggccttcccgctgcccggacccgacaccgccaccctcgctccccgccggcagccggcagccagcggcagtggatcgaccccgttctgcggccgttgagtagttttcaattccggttgatttttgtccctctgcgcttnnnnnnnnnnnnnnnnnnnnnnnnnnnnnnnnnnnnnnnnnnnnnnnnnnnnnnnnnnnnnacggaaaggtcgcggcctgtggccctgcgggcagccgtgccgagatgaaccccagtgcccccagctaccccatggcctcgctctacgtgggggacctccaccccgacgtgaccgaggcgatgctctacgagaagttcagcccggccgggcccatcctctccatccgggtctgcagggacatgatcacccgccgctccttgggctacgcgtatgtgaacttccagcagccggcggacgcggagcgtgctttggacaccatgaattttgatgttataaagggcaagccagtacgcatcatgtggtctcagcgtgatccatcacttcgcaaaagtggagtaggcaacatattcattaaaaatctggacaaatccattgataataaagcactgtatgatacattttctgcttttggtaacatcctttcatgtaaggtggtttgtgatgaaaatggttccaagggctatggatttgtacactttgagacgcaggaagcagctgaaagagctattgaaaaaatgaatggaatgctcctaaatgatcgcaaagtatttgttggacgatttaagtctcgtaaagaacgagaagctgaacttggagctagggcaaaagaattcaccaatgtttacatcaagaattttggagaagacatggatgatgagcgccttaaggatctctttggcaagtttgggcctgccttaagtgtgaaagtaatgactgatgaaagtggaaaatccaaaggatttggatttgtaagctttgaaaggcatgaagatgcacagaaagctgtggatgagatgaacggaaaggagctcaatggaaaacaaatttatgttggtcgagctcagaaaaaggtggaacggcagacggaacttaagcgcaaatttgaacagatgaaacaagataggatcaccagataccagggtgttaatctttatgtgaaaaatcttgatgatggtattgatgatgaacgtctccggaaagagttttctccatttggtacaatcactagtgcaaaggttatgatggagggtggtcgcagcaaagggtttggttttgtatgtttctcctccccagaagaagccactaaagcagttacagaaatgaacggtagaattgtggccacaaagccattgtatgtagctttagctcagcgcaaagaagagcgccaggctcacctcactaaccagtatatgcagagaatggcaagtgtacgagctgttcccaaccctgtaatcaacccctaccagccagcacctccttcaggttacttcatggcagctatcccacagactcagaaccgtgctgcatactatcctcctagccaaattgctcaactaagaccaagtcctcgctggactgctcagggtgccagacctcatccattccaaaatatgcccggtgctatccgcccagctgctcctagaccaccatttagtactatgagaccagcttcttcacaggttccacgagtcatgtcaacacagcgtgttgctaacacatcaacacagacaatgggtccacgtcctgcagctgcagccgctgcagctactcctgctgtccgcaccgttccacagtataaatatgctgcaggagttcgcaatcctcagcaacatcttaatgcacagccacaagttacaatgcaacagcctgctgttcatgtacaaggtcaggaacctttgactgcttccatgttggcatctgcccctcctcaagagcaaaagcaaatgttgggtgaacggctgtttcctcttattcaagccatgcaccctactcttgctggtaaaatcactggcatgttgttggagattgataattcagaacttcttcatatgctcgagtctccagagtcactccgttctaaggttgatgaagctgtagctgtactacaagcccaccaagctaaagaggctgcccagaaagcagttaacagtgccaccggtgttccaactgtttaaaattgatcagggaccatgaaaagaaacttgtgcttcaccgaagaaaaatatctaaacatcgaaaaacttaaatattatnnnnnnnnnnnnnnnnnnnnnnnnnnnnnnnnnnnnnnnnnnnnnnnnnctttgaaccttatgtaccgagcaaatgccaggtctagcaaacataatgctagtcctagattacttattgattnnnnnnnnnnnnnnnnnnnnnnnnnnnnnnnnnnnnnnnnnnnnttattgttttatagaccctgggaaaaagaattttcagcaaagtacaaaaatttaaagcattcctttctttaattttgtaattctttactgtggaatagctcagaatgtcagttctgttttaaggtaacagaattgataactgagcaaggaaaacgtaatttggattataaaattcttgcctttaataaaaattccttaaacagtg

SEQ ID NO: 20697 - DNA, 1071 bp, Homo Sapiens
gagaaagggacagagaaagctctgttgtctcttcctcttagaatgatactagtctctacggtagaaaagaaagttcatagttaacatttataagattatttaatgtacttacaaaattgtaataaaaactcttactttattagagcattagtttggatgaattcaagtcattttgccattttacaacccacttggaagactttgctattgccatgcagatgttcagtttagctcatcgtcctgtcagactagcggagtttaagagagctgtgaaagtagcaacaggacaagaactctcaaacaatattttggacactgtctttaagatctttgatttggatggtgatgaatgtcttagtcatgaagagtttcttggggtgttaaaaaacagaatgcatcgaggtttatgggtaccacaacatcagagtatacaagaatactggaagtgtgtgaagaaagaaagcattaaaggagtaaaagaagtctggaaacaagctggaaaaggtcttttttaataaaagatataatagtatggcaattatattgttccaaatgtcaaaatttgtgattttttagaagtacttgctatttatcttcttaagtcttcattgatattctgtgtgaaataagcatgtcttgtacttgctttctgattcataattttatgaaagaacttagtagaaagaaaagtaagtataaaaatagatattggattctgtcagaaggcctagatttgaaataatgttttgtacttcggtaagatggaaaacttagtgattcactgatttcttagacactctaatatgatatgctttctggaaggataaaacaaatacatatgggaaaaagtacttgagaccaaggccagcatcaattccagacatcttcatgttcctaataggctaaatgaagttaaaaacttatttcagattttctcatctgtaccttatatctcataaatttattgcatattttatgtcagtagcttagctgtttattgtctttaaataacatgtaaacttcaatgttctatcgggaagcagaataaaatatttacttagatacaaaaaa

SEQ ID NO: 20698 - DNA, 998 bp, Homo Sapiens
  misc_feature (384)..(447): n is a, c, g, or t
  misc_feature (883)..(907): n is a, c, g, or t
gcacgaggtatatatataaatctatttttagtctggaaagactttgtttaaatgaaaggtgcgctatcccttttgattctgttttaaaattatctcgttaaagatctccaaatttgttccgatgacaagtgaaatttaaatgtgagattgaactgaacaaaccctcatctcatgaaggacggggtgtgtgtgtggcgttgatctttagcctgtctcacaccagttcagaaaacactagacccaggattgaaaaagcaaaccacagcagaaccatccttttgtcattaatttgtctcaaagtgggaaggttttgggggagggggaaatacagggatggtccatgttttcaagagtaggggaatgatgtttaaacacaaaaataannnnnnnnnnnnnnnnnnnnnnnnnnnnnnnnnnnnnnnnnnnnnnnnnnnnnnnnnnnnnnnngggggggaaattggcagatgcctgaggtcatagctgtgtcctgggtcactgtggctggtgaggacctcaaggaccccatcaagtgtacacagcagcagcaaaatcaagggatgaccctcctctggggccccctgtcctcagcacattccaggcagctgtgccctgacccacagggacccgtggggatgggaggaggtccaggcctgtgttgccagagctggcagtgtgagctgtaggcagggacggggagggactgtcgctgtgatcagagtgggttaagctgaccaggaacacccatttaacccctttttctttttgctttcatttttataaaggaaaagaggacctgtcagataggcagccccatgctacgtgattctttatgttgtgttgttttgttttgtaaattgtataatttttaaatatctgagttttnnnnnnnnnnnnnnnnnnnnnnnnntcttgttatggccttaagaaggggttagtgcatctttcaggggtcactctgccatggggataaaatagctgtttcacaaacagttttattt

SEQ ID NO: 20699 - DNA, 2161 bp, Homo Sapiens
  misc_feature (1920)..(1933): n is a, c, g, or t
gcacgaggcaccaccagaccttcaagatagacattgaccccgaggagacggtgaaagcactgaaagagaagattgaatctgaaaaggggaaagatgcctttccagtagcaggtcaaaaattaatttatgcaggcaaaatcctcaatgatgatactgctctcaaagaatataaaattgatgagaaaaactttgtggtggttatggtgaccaaacccaaagcagtgtccacaccagcaccagctacaactcagcagtcagctcctgccagcactacagcagttacttcctccaccaccacaactgtggctcaggctccaacccctgtccctgccttggcccccacttccacacctgcatccatcactccagcatcagcgacagcatcttctgaacctgcacctgctagtgcagctaaacaagagaagcctgcagaaaagccagcagagacaccagtggctactagcccaacagcaactgacagtacatcgggtgattcttctcggtcaaacctttttgaagatgcaacgagtgcacttgtgacgggtcagtcttacgagaatatggtaactgagatcatgtcaatgggctatgaacgagagcaagtaattgcagccctgagagccagtttcaacaaccctgacagagcagtggagtatcttttaatgggaatccctggagatagagaaagtcaggctgtggttgacccccctcaagcagctagtactggggctcctcagtcttcagcagtggctgcagctgcagcaactacgacagcaacaactacaacaacaagttctggaggacatccccttgaatttttacggaatcagcctcagtttcaacagatgagacaaattattcagcagaatccttccttgcttccagcgttactacagcagataggtcgagagaatcctcaattacttcagcaaattagccaacaccaggagcattttattcagatgttaaatgaaccagttcaagaagctggtggtcaaggaggaggaggtggaggtggcagtggaggaattgcagaagctggaagtggtcatatgaactacattcaagtaacacctcaggaaaaagaagctatagaaaggttaaaggcattaggatttcctgaaggacttgtgatacaagcgtattttgcttgtgagaagaatgagaatttggctgccaattttcttctacagcagaactttgatgaagattgaaagggacttttttatatctcacacttcacaccagtgcattacactaacttgttcactggattgtctgggatgacttgggctcatatccacaatacttggtataaggtagtagattgttgggggtggggagggagggatctaggatagagggcagggataaatacagtgcatgtctgcttcaattagcagatgccgcaactccacacagtgtgtaaaatatatacaaccaaaaatcagcttttgcaggtctttatttcttctgtaaaacagtaggtaacttttcctaggtttcactctttttagtgtactagatccagaaacttagtgtaatgccctgctttatatttctttgacttaacattggtttcagaaagaatcttatctacctagaatttacagtctctgtttcatggcaacactggataatggctttgtgaaatttaaaaaatttttgtagcgactgtaaacagaaatgccaaattgatggttaattgttgctgcttcaaaaataagtataaaattaatatgtaaggaagcccattctttcatgttaaatacttggggtgggaggggagaaagggaaccttttcttaaaatgaaaataattactgctattttaaaatttcttgatcattgaatgtgagacccttctaacatgatttgagaagctgtacaagtataggcagagttattttcctgtttacannnnnnnnnnnnnnggggaaaaaattggtaggtgtctaattactgtttacttcattgttatattgcagtaaaagttttaaaaccaccattgcatgtttgcttttgatgtatccctttgtgaaattagcacttttggggcccatggagaaatgcagcattcactctccctgtcttttccccttccctcagcagaaacgtgtttatcagcaagtcgtgagtcaaactgctgccttttaaaaacc

SEQ ID NO: 20700 - DNA, 1486 bp, Homo Sapiens
  misc_feature (81)..(101): n is a, c, g, or t
  misc_feature (702)..(723): n is a, c, g, or t
  misc_feature (989)..(1019): n is a, c, g, or t
gcacgaggccccaccacaccagccctgttcgcgctctcggcagtgccggggggcgccgcctcccccatgccgccctccggnnnnnnnnnnnnnnnnnnnnntcggaggtacccccgccgtcgcagcccccgcgctggtgcagccaccctcgctccctctgctcttcctcccttcgctcgcaccatggctgatcagctgaccgaagaacagattgctgaattcaaggaagccttctccctatttgataaagatggcgatggcaccatcacaacaaaggaacttggaactgtcatgaggtcactgggtcagaacccaacagaagctgaattgcaggatatgatcaatgaagtggatgctgatggtaatggcaccattgacttccccgaatttttgactatgatggctagaaaaatgaaagatacagatagtgaagaagaaatccgtgaggcattccgagtctttgacaaggatggcaatggttatatcagtgcagcagaactacgtcacgtcatgacaaacttaggagaaaaactaacagatgaagaagtagatgaaatgatcagagaagcagatattgatggagacggacaagtcaactatgaagaattcgtacagatgatgactgcaaaatgaagacctactttcaactcctttttcccccctctagaagaatcaaattgaatcttttacttacctcttgcnnnnnnnnnnnnnnnnnnnnnngttcatttattcattctgtttctatatagcaaaactgaatgtcaaaagtaccttctgtccacacacacaaaatctgcatgtattggttggtggtcctgtcccctaaagatcaagctacacatcagttttacaatataaatacttgtactaccttaatgataaggactccttaaagttccatttgctaatgattaatacactgtttgggctggccagtttttcatgcatgcagcttgacgattgagcacagtcaggcctttgtattnnnnnnnnnnnnnnnnnnnnnnnnnnnnnnncctattcaaatgggttctagttcaatttgtttagtataaattgtcatagctggtttactgaaaacaaacacatttaaaattggtttacctcaggatgacgtgcagaaaaatgggtgaaggataaaccgttgagacgtggccccactggtaggatggtcctcttgtacttcgtgtgctccgacccatggtgacgatgacacaccctggtggcatgcccgtgtatgttggtttagcgttgtctgcattgttctagagtgaaacaggtgtcaggctgtcactgttcacacaaatttttaataagaaacatttaccaagggagcatctttggactctctgtttttaaaaccttctgaaccatgacttggagccggcagagtaggctgtggctgtggacttcagcacaaccatcaacattgctgttcaaagaaattacagtttacgtccattccaagttgtaaatgctagtc

SEQ ID NO: 20701 - DNA, 2198 bp, Homo Sapiens
  misc_feature (1549)..(1573): n is a, c, g, or t
gcacgaggcacaggtcctaaactacattcagttgagtctgcaagactgggaggaactggggtgataagaaatctattcactgtcaaggtttattgaagtcaaaatgtccaaaaaaatcagtggcggttctgtggtagagatgcaaggagatgaaatgacacgaatcatttgggaattgattaaagagaaactcatttttccctacgtggaattggatctacatagctatgatttaggcatagagaatcgtgatgccaccaacgaccaagtcaccaaggatgctgcagaagctataaagaagcataatgttggcgtcaaatgtgccactatcactcctgatgagaagagggttgaggagttcaagttgaaacaaatgtggaaatcaccaaatggcaccatacgaaatattctgggtggcacggtcttcagagaagccattatctgcaaaaatatcccccggcttgtgagtggatgggtaaaacctatcatcataggtcgtcatgcttatggggatcaatacagagcaactgattttgttgttcctgggcctggaaaagtagaggataacctacacaccaagtgacggaacccaaaaggtgacatacctggtacataactttgaagaaggtggtggtgttgccatggggatgtataatcaagataagtcaattgaagattttgcacacagttccttccaaatggctctgtctaagggttggcctttgtatctgagcaccaaaaacactattctgaagaaatatgatgggcgttttaaagacatctttcaggagatatatgacaagcagtacaagtcccagtttgaagctcaaaagatctggtatgagcataggctcatcgacgacatggtggcccaagctatgaaatcagagggaggcttcatctgggcctgtaaaaactatgatggtgacgtgcagtcggactctgtggcccaagggtatggctctctcggcatgatgaccagcgtgctggtttgtccagatggcaagacagtagaagcagaggctgcccacgggactgtaacccgtcactaccgcatgtaccagaaaggacaggagacgtccaccaatcccattgcttccatttttgcctggaccagagggttagcccacagagcaaagcttgataacaataaagagcttgccttctttgcaaatgctttggaagaagtctctattgagacaattgaggctggcttcatgaccaaggacttggctgcttgcattaaaggtttacccaatgtgcaacgttctgactacttgaatacatttgagttcatggataaacttggagaaaacttgaagatcaaactagctcaggccaaactttaagttcatacctgagctaagaaggataattgtcttttggtaactaggtctacaggtttacatttttctgtgttacactcaaggataaaggcaaaatcaattttgtaatttgtttagaagccagagtttatcttttctataagtttacagcctttttcttatatatacagttattgccacctttgtgaacatggcaagggacnnnnnnnnnnnnnnnnnnnnnnnnnctagtaccagcctaggaattcggttagtactcatttgtattcactgtcactttttctcatgttctaattataaatgaccaaaatcaagattgctcaaaagggtaaatgatagccacagtattgctccctaaaatatgcataaagtagaaattcactgccttcccctcctgtccatgaccttgggcacagggaagttctggtgtcatagatatcccgttttgtgaggtagagctgtgcattaaacttgcacatgactggaaggaagtatgagtgcaactcaaatgtgttgaagatacggcagtcatttttgtaaagaccttgctgaatgtttccaatagaataaatactgtttaggccgcaggagagtttggaatccggaataaatactacctggaggtttgtcctctccatttttttctttctcctcctggcctggcctgaatattatactactttaaatagcatatttcatccaagtgcaataatgtaagctgaatcttttttggacttctgctggcctgttttatttcttttatataaatgtgatttttcagaaattgatattaaacactatcttattttctcctgaactgttgattttaattaaaattaagtgctaattacc

SEQ ID NO: 20702 - DNA, 1230 bp, Homo Sapiens
  misc_feature (855)..(905): n is a, c, g, or t
  misc_feature (1012)..(1055): n is a, c, g, or t
gcacgaggcagcctacagccgcctgcatctgtatccagcgccaggtcccgccagtcccagctgcgcgcgccccccagtcccgcacccgttcggcccaggctaagttagccctcaccatgccggtcaaaggaggcaccaagtgcatcaaatacctgctgttcggatttaacttcatcttctggcttgccgggattgctgtccttgccattggactatggctccgattcgactctcagaccaagagcatcttcgagcaagaaactaataataataattccagcttctacacaggagtctatattctgatcggagccggcgccctcatgatgctggtgggcttcctgggctgctgcggggctgtgcaggagtcccagtgcatgctgggactgttcttcggcttcctcttggtgatattcgccattgaaatagctgcggccatctggggatattcccacaaggatgaggtgattaaggaagtccaggagttttacaaggacacctacaacaagctgaaaaccaaggatgagccccagcgggaaacgctgaaagccatccactatgcgttgaactgctgtggtttggctgggggcgtggaacagtttatctcagacatctgccccaagaaggacgtactcgaaaccttcaccgtgaagtcctgtcctgatgccatcaaagaggtcttcgacaataaattccacatcatcggcgcagtgggcatcggcattgccgtggtcatgatatttggcatgatcttcagtatgatcttgtgctgtgctatccgcaggaaccgcgagatggtctagagtcagcttacatccctgagcaggaaagtttacccatgaagattggtgggannnnnnnnnnnnnnnnnnnnnnnnnnnnnnnnnnnnnnnnnnnnnnnnnnnccactaattttagtattcattctgcattgctagataaaagctgaagttactttatgtttgtcttttaatgcttcattcaatattgacatttgtagttgagcgggggnnnnnnnnnnnnnnnnnnnnnnnnnnnnnnnnnnnnnnnnnnnncttgttatattaagcagaaatcctgcaatgaaaggtactatatttgctagactctagacaagatattgtacataaaagaatttttttgtctttaaatagatacaaatgtctatcaactttaatcaagttgtaacttatattgaagacaatttgatacataataaaaaattatgac

SEQ ID NO: 20703 - DNA, 1357 bp, Homo Sapiens
  misc_feature (1260)..(1274): n is a, c, g, or t
gcacgagggaaacccaaagcaaagtccagtgccaagagggccggcaagaagaagtgacaatgaagtcttttcttgcggacactccctcctgtctcctattttctgtaaataattttctccttttttctctcttgatgctcaccaccaccttttgcccccttctgttctgactttataagagacaggatttggattcttcagaaattacagaataattcatttttccttaaccagttgtgcaaggacagcaacaaccaatctaatgatgagaatgtacttatattttgttttgctattaacctacttacggggttagggacttgcggggggggcttgtgtgttttgttggcttgtttgccatgaaggtagatgtgggtggggagaagacacaaggcagtttgttctggctagatgagagggaacccaggaattgtgaggttagcaggaatatctttagggtgagtgagttttccttgagttgggcacccgttgtgagagtttcagaacctttggccagcaggagagaggtggtagggagcagccagccggcaaaggaaggaggtggaaaaaaaccgccaccgggctgacttccacctcccagtggtgagcagtgggggcccaaacccagtttccttctcatttttgttagtttgccctttcggcctccctattttcttagggaaggggagtggggtccaagtgacagctggatgggagaagccatagtttctcccagtcagctaggatgtagccattgggggatctttgtggcttcagcaaattctcttgttaaaccggagtgaaaacttcaggggaagggtggggagtcagccaagtgcctcagtgtgccctgttgaaacttaggtttttccacgcaatcgatggattgtgtcctaggaagacttttcttttcctctggatttttgttcctcctgtacaagaggtgtctttgcttggtttggtggggctgcggccacttaaaacctcccgatctctttttgagtcctttattataagtagttgtagctgcgggagggggagggggagtgggcgggcagtggatagtaagacttactgcagtcgatttgggatttgctaagtagttttacagagctagatctgtgtgcatgtgtgtgtttgtgtatatatacatatctagggctagtacttagtttcacacccgggagctgggagaaaaaacctgtacagttgtctttctcttatttttaataaaatagaaaaatcgcgcacttgcgcgtnnnnnnnnnnnnnnnttttttaaacaagtgttacttgtgccgggaaaattttgctgtctttgtaattttaaaactttaaaataaattggaaaagggag

SEQ ID NO: 20704 - DNA, 995 bp, Homo Sapiens
  misc_feature (831)..(874): n is a, c, g, or t
gcacgagggcctttcaagtaatttgtactttcccacactataattggcttctgttttacaaaatggtgggtggctttttcttttttgtacgtgtacaggattctgctggtacgagaggccttcctctttctgtttttaaaaaaagttttactgccatattggcattccattccctgttgccatcctcactgttacctgttttgggtttctggtctactttgactttcaaagtacctccagcctcctcatacgcacagcttttggatgacctcagcttgagtttctccatatgtgcatgtacatctagcattctgcctacagttcagacagaagtcacaaaaaggccttcaactcaccaaaggtaaatatctgtatctattaggacattttttacatagacttcagttgagatgtatacttagcaaaattatttttaaattgaaacagcacagtaaatacttaatataaaatgtcccttggattttgcttcccatgtaaatctattgtattattacacttgttataattttaactataaaggtccaattgtttcacagagccagtttgggatgggctgcattccatttatgctgtatatagtttgaattatatataaattaccccttcttctggccacccctgctcccatcttagtattttgcaagatctaatcagttgtacacctggtgcccctcgcttgcttcaatcatggttatttgatggcaaaatcgacctcttgtcgctgaaggagagagaaaagatgtgtgtctgattggtcctgggattttttgagctgtgccatttatggtactctttgcctatgcatccccnnnnnnnnnnnnnnnnnnnnnnnnnnnnnnnnnnnnnnnnnnnnctattgggaagaggcttgtgaccagtaccaatcttgagtttctttttctgtccacaagtaaattaatatctgctctgaaatgtcatttatctactcacacattcttggggaaaaaaatcaa

SEQ ID NO: 20705 - DNA, 1405 bp, Homo Sapiens
  misc_feature (679)..(709): n is a, c, g, or t
  misc_feature (1087)..(1096): n is a, c, g, or t
  misc_feature (1138)..(1150): n is a, c, g, or t
aacctttaatcaattttattcttcatatgtgggtaagggtacagattctagaccatgtctgtgaagtcatggtgatatcactgtgctaaagatcatggctgtaggttggctgagaatttaaaatgcaagaaaaatcagaagcagcacatcattgcttcttattctaggacatacagagagtttcttcagtaagtaccactccagttgtcttcacaatttaatgctacagaaacctaaatgtttctacttcagctacgaaatcattcaattggcaggcaaaacattttttattacctatttataaaaacatgagaaagggaggaaaaataatagaatgtataaactcatgctatcataattctaatgtctagctataaaggcatatggttgtaacaattgctatctaaaattttttattagctgcagtagctgcattccattttcattaccattttttaaagtctttttgcttggtcatctaaagacgtttttcaaatttcaaaagatcagctattattgtcctccttgtgcccctaaggaattaataaaatgcacattcatttccttctttctaaatgttccagttaaaaacgaaacaatgcaaaaatggcaaacattttcttggaccatttttttcactgtaacaacaaaaaatgtgcaaggtaaatagaactcaagnnnnnnnnnnnnnnnnnnnnnnnnnnnnnnnaataagtccgtccagaataatacaggttacatagctgtaaccatcttaaggaaaatgacattaagtttgcaacaaatacttgctggtgaaaacacattactagcatttcaaaaatttacaaaaatgtaacaaaatatcctaaacagctatctttatatttgtaaacgaagtatgaacaactggcttaaccagtttccactgcacatcaaacaggtggcaaagtgatagagatcatctttgatttttaagagaataataaaaactaatttatatcccacacattacaattctaggggattaggaacaggctatcacatgatgtcatctactttaacagccttttcatttactcgtattgtcttgatactttacaatgannnnnnnnnncctataagataatcgtattgttgctgtaaaagccgtaattcnnnnnnnnnnnnnaattcccttaaagaaatcgtgtgatccatttcccattaaatttcataaacacacgtgaaacttcagacacaatatgagggtggtggttttctttcggtttctgaggtcttctctctgaaacatcagagctgataatagttcggcctatacatgcatgctgccatagataattgggtggtacctgcacctcctgtttcaaaaacgcaagcagaaaatagtctggacaagggcaagctgcaactcaattttctgctg

SEQ ID NO: 20706 - DNA, 1209 bp, Homo Sapiens
cccgggctgcaggaattcggcacgaggcagctcctatatatagaattttaaagttgcccagaaagtgtgcaaattaaacttttaacatctacgtgtaggaatcccgttctgcttccagaagtggaagtgctcacggatcggggaaatctgcaaggcatacccctgcaaggtctcgctccaaggaagattccaggcgttccagatcaaagtccaggtcccgatctgaatctaggtctagatccagaagaagctcccgaaggcattatacccggtcacggtctcgctcccgctcccatagacgatcacgtagcaggtcttacagtcgagattatcgtagacggcacagccacagccattctcccatgtctactcgcaggcgtcatgttgggaatcgggcaaatcctgatcctaactgttgtcttggagtatttgggctgagcttgtacaccacagaaagagatctaagagaagtgttctctaaatatggtcccattgccgatgtgtctattgtatatgaccagcagtctaggcgttcaagaggatttgcctttgtatattttgaaaatgtagatgatgccaaggaagctaaagaacgtgccaatggaatggagcttgatgggcgtaggatcagagttgatttctctataacaaaaagaccacatacgccaacaccaggaatttacatggggagacctacctatggcagctctcgccgtcgggattactatgacagaggatatgatcggggctatgatgatcgggactactatagcagatcacgttccagatctcgatcatactcacctcgtcgctattaaagcatgaagactttctgaaacctgccctagagctgggatattgtttgtgggcaatattttttattgtctcttgtttaaaaagtgaacagtgcctagtgaagttaggtgacttttacaccttttacgatgactacttttggtggagttgaaatgctgttttcattctgcatttgtgtagtttggtgctttgttccaagttaagtgttttcagaaaagtatgttttgcatgtatttttttacagtctaaattttgactgctgagaagtttctattgtacaaaacttcatttaaaaggtttttctactgaatccagggtattctgaagatcgaagcctgtgtaaatgctaccaaatggcaaaaagcacaataaacagtttgatttttacttttc

SEQ ID NO: 20707 - DNA, 1288 bp, Homo Sapiens
  misc_feature (201)..(215): n is a, c, g, or t
  misc_feature (317)..(352): n is a, c, g, or t
  misc_feature (804)..(841): n is a, c, g, or t
  misc_feature (1002)..(1015): n is a, c, g, or t
  misc_feature (1215)..(1230): n is a, c, g, or t
gcacgaggcccaccccggccccttggaagagttgttgccagaccagggttttgggggaaacctgtcttgacattcaaaacctttttcttcccgatctgaacccctgttgactaatcttgcctgggtttgtgtaggtctgcaggaaggaaggctgaaaaagcggacgaagattttgacttaagtgggactttgtgatttaannnnnnnnnnnnnnnaagtggggaggaaggggaagctagatggactaggagagacttgattttggtgctaaagttccccagttcatatgtgacatctttttaaaataattaacaacnnnnnnnnnnnnnnnnnnnnnnnnnnnnnnnnnnnngtaaggggtgagcagttaatggtattcattccacatacaatatctgtgtaaaacgatttcctgtaaaagtagctttaatggtttttgctctagaataccgtaggtctatccttaaagcactcacgccatgctttcttccctgggttttaaacttcatataactttcagaaattggagagcaaaaattttgcttgtcactgcacatcaatataaaaaagcttatttaacttatcaaaacgtatttattgccaaactatgcttttttttgttaattttgttcatatttatcgggatgacaaatccatagaatatattcttttatgttaaattatgatcttcatattaatcttaaaattttgtgacgtgtctttttcctttttttccacagttttaatatattattcttcaacgacattttttgtaactttacacttttttggttattttatttnnnnnnnnnnnnnnnnnnnnnnnnnnnnnnnnnnnnnnctgttggattatttattttagaaattcccccctttgtgttggactgcaaattgagtttctttctctttaggcctttcacaactaggactgagaatgtatgtaaaagttctgtgacagtacagaaggaaaacaactttttatgtatagcttctaaaaggggnnnnnnnnnnnnnngagaaaccctttgacttccacgtgcccatctcaagacattccactcacagatttgaggttctggattccaggtctggagttttcccatgttaatgtaaacagaactggcacacacacattaaagatgaatgtaattattattcctcttgctggtcactaccgtcgctttctatttctctttctttgtgtgaatttatttnnnnnnnnnnnnnnnnccttttgtaacgactatttgcagtttaaaatcaataaaccccgttttttcaagaaaaa

SEQ ID NO: 20708 - DNA, 1428 bp, Homo Sapiens
  misc_feature (944)..(957): n is a, c, g, or t
ccgggctgcaggaattcggcacgaggggtggccaggatgggaaatgggtccaccaggaaactggagcccacgtcctcctcgtgcaggggaggcccgccctggccccacggcagaatcagcttctggtccatcggaggatccgagtgtgaatttcctgaagaacgttggggagagtgtggcagctgcccttagccctctgggcattgaagttgatatcgatgtggagcacggagggaaaagaagccgcctgacccccgtctctccagagagttccagcacagaggagaagagcagctcacagccaagcagctgctgctctgaccccagcaagccgggtgggaatgttgagggcgccacgcagtctctggcggagcagatgaggaagatcgccttggagtccgaggggcgccctgaggaacagatggagtcggataactgttcaggaggagatgatgactggacccatctgtcttcaaaagaagtggacccgtctacaggtgaactccagtccctacagatgccagaatccgaagggccaagctctctggacccctcccaggagggacccacagggctgaaggaagctgccttgtacccacatctcccgccagaggctgacccgcggctgattgagtccctctcccagatgctgtccatgggcttctctgatgaaggcggctggctcaccaggctcctgcagaccaagaactatgacatcggagcggctctggacaccatccagtattcaaagcatcccccgccgttgtgaccacttttgcccacctcttctgcgtgcccctcttctgtctcatagttgtgttaagcttgcgtagaattgcaggtctctgtacgggccagtttctctgccttcttccaggatcaggggttagggtgcaagaagccatttagggcagcaaaacaagtgacatgaagggagggtcccnnnnnnnnnnnnnnctgatgtttcctgggtgccctggctccttgcagcagggctgggcctgcgagacccaaggctcactgcagcgcgctcctgacccctccctgcaggggctacgttagcagcccagcacatagcttgcctaatggctttcactttctcttttgttttaaatgactcataggtccctgacatttagttgattattttctgctacagacctggtacactctgattttagataaagtaagcctaggtgttgtcagcaggcaggctggggaggccagtgttgtgggcttcctgctgggactgagaaggctcacgaagggcatccgcaatgttggtttcactgagagctgcctcctggtctcttcaccactgtagttctctcatttccaaaccatcagctgcttttaaaataagatctctttgtagccatcctgttaaatttgtaaacaatttaattaaatggcatcagcactttaacc

SEQ ID NO: 20709 - DNA, 2241 bp, Homo Sapiens
  misc_feature (1993)..(2031): n is a, c, g, or t
gcacgaggcctgctcggaggaatggcgccgccgggttcaagcactgtcttcctgttggccctgacaatcatagccagcacctgggctctgacgcccactcactacctcaccaagcatgacgtggagagactaaaagcctcgctggatcgccctttcacaaatttggaatctgccttctactccatcgtgggactcagcagccttggtgctcaggtgccagatgcaaagaaagcatgtacctacatcagatctaaccttgatcccagcaatgtggattccctcttctacgctgcccaggccagccaggccctctcaggatgtgagatctctatttcaaatgagaccaaagatctgcttctggcagctgtcagtgaggactcatctgttacccagatctaccatgcagttgcagctctaagtggctttggccttcccttggcatcccaagaagcactcagtgcccttactgctcgtctcagcaaggaggagactgtgctggcaacagtccaggctctgcagacagcatcccacctgtcccagcaggctgacctgaggagcatcgtggaggagattgaggaccttgttgctcgcctggatgaactcgggggcgtgtatctccagtttgaagaaggactggaaacaacagcgttatttgtggctgccacctacaagctcatggatcatgtggggactgagccatccattaaggaggatcaggtcatccagctgatgaacgcgatcttcagcaagaagaactttgagtccctctccgaagccttcagcgtggcctctgcagctgctgtgctctcgcataatcgctaccacgtgccagttgtggttgtgcctgagggctctgcttccgacactcatgaacaggctatcttgcggttgcaagtcaccaatgttctgtctcagcctctgactcaggccactgttaaactagaacatgctaaatctgttgcttccagagccactgtcctccagaagacatccttcacccctgtaggggatgtttttgaactaaatttcatgaacgtcaaattttccagtggttattatgacttccttgtcgaagttgaaggtgacaaccggtatattgcaaataccgtagagctcagagtcaagatctccactgaagttggcatcacaaatgttgatctttccaccgtggataaggatcagagcattgcacccaaaactacccgggtgacatacccagccaaagccaagggcacattcatcgcagacagccaccagaacttcgccttgttcttccagctggtagatgtgaacactggtgctgaactcactcctcaccagacatttgtccgactccataaccagaagactggccaggaagtggtgtttgttgccgagccagacaacaagaacgtgtacaagtttgaactggatacctctgaaagaaagattgaatttgactctgcctctggcacctacactctctacttaatcattggagatgccactttgaagaacccaatcctctggaatgtggctgatgtggtcatcaagttccctgaggaagaagctccctcgactgtcttgtcccagaaccttttcactccaaaacaggaaattcagcacctgttccgcgagcctgagaagaggccccccaccgtggtgtccaatacattcactgccctgatcctctcgccgttgcttctgctcttcgctctgtggatccggattggtgccaatgtctccaacttcacttttgctcctagcacgattatatttcacctgggacatgctgctatgctgggactcatgtatgtctactggactcagctcaacatgttccagaccttgaagtacctggccatcttgggcagtgtgacgtttctggctggcaatcggatgctggcccagcaggcagtcaagagaacagcacattagttccagaagaaagatggaaattctgaaaactgaatgtcaagaaaaggagtcaagaacaattcacagtatgagaagnnnnnnnnnnnnnnnnnnnnnnnnnnnnnnnnnnnnnnngtccagattgtagttatacttttgcttgtttttcagtttccccaacacacagcagatacctggtgagctcagatagtctctttctctgacactgtgtaagaagctgtgaatattcctaacttacccagatgttgcttttgaaaagttgaaatgtgtaattgttttggaataaagagggtaacaataggaaaattaaaagggacctcgtgc

SEQ ID NO: 20710 - DNA, 1258 bp, Homo Sapiens
  misc_feature (207)..(219): n is a, c, g, or t
gcacgaggtatgtgttcatatatacataatgattataatacataataagaatgaggtggtattacattattcctaataatagggataatgctgtttattgtcaagaaaaagtaaaatcgttctcttcaattaatggcccttttattttgggaccaggcttttattttccctgatattatttctatttaatactcttttctctcaagnnnnnnnnnnnnngtttgttttttctttattgtccttcatagcaggccaagtattgcctctctgcaatagacagctactgtcaatacatgctgtaatttgacattctgggtcacagatataaggtatttaaaatctatttatgctttatagagaaaccagacattaaaacttcatgcactacttatttcgaattactgtaccttatccaaatttacacctagctattaggatcttcaacccaggtaacaggaataattctgtggtttcatttttctgtaaacaactgaaagaataattagatcatattctagtatgttctgaaatatctttaagactgatcttaaaaactaacttctaagatgatttcatcttctcatagtatagagtttactttgtacacgtttgaaaccaactactgtagaagatgaggaatctattgtaattttttgctttattttcatctgccagtggacttatttgaaattttcactttagtcaaattattttttgtattagtttttgatgcagacataaaaatagcaatcattttaaattgtcaaaatttccagattactggtaaaaattatttgaaaacaaacttatgggtaataaaggctagtcagaaccctataccataaagtgtagttaccatacagattaatatgtagcaaaaatgtatgcttgatatttctcaactgtgttaatttttctgctgtattccagctgaccaaaacaatattaagaatgcatctttataaatgggtgctaattgataatggaaataatttagtaatggactatacaggatgttaataatgaagccatatgtttatgtctggatttaaaaattttaaacaatcatttactatgtcatttttctttaccttgaagaacataaactgttatttcacttctacaaatcagcaagatattatttatggcaagaaatattccattgaaatattgtgctgtaacatgggaaagtgtaaatgtttttcatgggttctatcaatgtgaaataaaatttaattctgactttaaaaggggggcc

SEQ ID NO: 20711 - DNA, 837 bp, Homo Sapiens
gcacgaggctcctcagcctcctcactcggggcacaggatcctgggctcagtctgccctgactcagcctcgctcagtgtccgggtctcttggacagtcagtcaccatctcctgcacgggaaccaccgctaattttggtccttttaattatgtctcttggttccaacaactcccaggcaaagcccccaaactccttcttttccatgtcagtgagcggccctcaggggtccctgatcgcttctctggctccaagtctggcaacacggcctccctgaccatctctggcctccaggctgacgatgaggctgattattactgctgctcatctgcaggcatgttcacttgggcgttcggcggagggaccaaggtgaccgtcctacgtcagcccaaggctgccccctcggtcactctgttcccaccctcctctgaggagcttcaagccaacaaggccacactggtgtgtctcataagtgacttctacccgggagccgtgacagtggcctggaaggcagatagcagccccgtcaaggcgggagtggagaccaccacaccctccaaacaaagcaacaacaagtacgcggccagcagctacctgagcctgacgcctgagcagtggaagtcccacaaaagctacagctgccaggtcacgcatgaagggagcaccgtggagaagacagtggcccctacagaatgttcataggttctcatccctcaccccccaccacgggagactagagctgcaggatcccaggggaggggtctctcctcccaccccaaggcatcaagcccttctccctgcactcaataaaccctcaataaatattctcattgtcaatcag

SEQ ID NO: 20712 - DNA, 802 bp, Homo Sapiens
  misc_feature (230)..(238): n is a, c, g, or t
gcacgaggttttcaaagcacattttaatcatttattttaaaagggggagtaaagcatttaaactgccaatcctatagactaggacttgaacatcaaaggaaaaatagacaaagactagatgataaagtcattcaaaagcacagaagcacatcacatacaccagcaaggtttccaactactgcactgattaactagatactctcaatagcttttctatagctcgtcctagnnnnnnnnnttaaattttcattttcttacaagttccaggcttaaacaaaggcaaaaattacatgcaacaactgatacactcataagttgcacatatgctccaaggtctttattagataacaataaatgctagcactttgtcactgccatcagattttcttatagtcttagagtcatgtaaataaaagtccataatgaaattaaagaaaattaatttttctaatcttagatcagttccatagaaaactattaatttttttaaagtaggcagtagaagggggttggtggggggtggaattggttagtaagtctggttctaatcttctgagctgcctttggaaggaagttatgaggtagaagattctactgacttttagtaaggtggacaatgagagaaaagaaaaagcaggtgcctcatctacagatccttctgggatttatttgccatgtacaatttaatgcataaaaaggcctctctccataaaactcagcactttacagatgtagaatatataagcatgccaaatttacttatctgtcacatacaaagcatcattccaggtgctagtgaggg

SEQ ID NO: 20713 - DNA, 1242 bp, Homo Sapiens
aacccccgggctgcaggaattcggcacgaggttttacttctctattgcactgtctcagttttgaacagatacttcagatctttgcctctgccgtgctggagagaaaaatcatcttcctggcggaaggtctcagcaccttgtctcagtgcatccatgctgctgccgcactgctctaccccttcagctgggcgcacacctacatccctgttgtccctgagagccttctggccaccgtctgctgccccacccccttcatggttggagtacaaatgcgcttccagcaggaggtcatggacagccctatggaagagctccagctccctggaagccgtggctcctctcctgatggccagtcagactctggcttttggtcctgctggtcaatctttgtgaaggaaccttcttaatgtcggttggtgatgaaaaagacatcctgccaccgaagcttcaggatgacatcttagactctcttggtcaggggatcaatgagttaaagactgcagaacaaatcaacgagcatgtttcaggcccctttgtgcagttctttgtcaagattgtgggccattatgcttcctatatcaagcgggaggcaaatgggcaaggccacttccaagaaagatccttctgtaaggctctgacctccaagaccaaccgccgatttgtgaagaagtttgtgaagacacagctcttctcacttttcatccatgaagccgagaagagcaagaatcctcctgcaggctatttccaacagaaaatacttgaatatgaggaacagaagaaacagaagaaaccaagggaaaaaactgtgaaataagagctgtggtgaataagaatgactagagctacacaccatttctggacttcagcccctgccagtgtggcaggatcagcaaaactgtcagctcccaaaatccatatcctcactctgagtcttggtatccaggtattgcttcaaactggtgtctgagatttggatccctggtattgatttctcaggactttggagggctctgacaccatgctcacagaactgggctcatagctccattttttgcagaggtgacacaggtaggaaacagtagtacatgtgttgtagacacttggttagaagctgctgcaactgctctctcccatcattataacatcttcaacacagaacacactttgtggtcgaaaggctcagcttctctacatgaagtctgtggacatgtaagacgaaagtaaagaggaaaatctattttt

SEQ ID NO: 20714 - DNA, 906 bp, Homo Sapiens
  misc_feature (764)..(778): n is a, c, g, or t
ccccgggctgcaggaattcggcacgaggggggattgggacagtcggccgcagaccgcgctgggttgccgctgccgctgccgccatcgtgccagcccctcgggtctccgtgaggccgggtgacgctccagaatgggagacaagccaatttgggagcagattggatccagcttcattcaacattactaccagttatttgataatgatagaacccaactaggcgcaatttacattgacgcgtcatgccttacgtgggaaggacaacagttccaggggaaagctgccattgtggagaagttgtctagccttccgttccagaaaattcagcacagcatcaccgcgcaggaccatcagcccactccagatagctgcatcatcagcatggttgtgggccagcttaaggcggatgaagaccccatcatggggttccaccagatgttcctattaaagaacatcaacgatgcttgggtttgcaccaatgacatgttcaggctcgccctgcacaactttggctgacctcctctcagctaggcactcacgctgtttcctcctccctcctcttcccaatactattcccactcctccagatgctccaaatatcatgcacaaatgagcagggccgcggtgggagtgggcgcagtgcgctgctgccactgaggtgttgtgcatgatgtttggatgctagactagttgcatctgacgggagaagtttgtgttgtaccagcgcatgccttggaaagacttaagtaatgcaaaaggttgtccnnnnnnnnnnnnnnnaatctactgacaagttgctctagtaacccaaagaagtgaaaggagaaagcagctgcctcaccgcccagacattgatttgttcagatgtttccatgcctcatgatacataaaaccacaaaaattttctt

SEQ ID NO: 20715 - DNA, 1537 bp, Homo Sapiens
  misc_feature (150)..(211): n is a, c, g, or t
gcacgagggttggtttcattagtggatcacacacagtgttctacttggcttgtaaaatggtgccttggatagggtgagtttggataagtatgtatgtatgtatgagttatagcaaaattaagtagattgaatcaagtccatgcaaaagcnnnnnnnnnnnnnnnnnnnnnnnnnnnnnnnnnnnnnnnnnnnnnnnnnnnnnnnnnnnnnnttttttgctaggttcttttaaaaaatgatgtaacttacatggaagtcttcacaggacttttttctttcctggaactattgaaatgtaatttaggatgatttgatcttccatctcaagttgtcaacatggctgtgtcattctggcttacatatgttttatttaacaaaattctagtcaagggataagggcataatgaagacaagcttcagttatgaaagtacaaactatttgtgtgattaatttttaaaaatgacattaagaagcccattgtaaaataatatttgcagtcaaatggtttttcttgctgtaagtcctgttgtagctatgtttagggtagtggttctcatctaccttggagtgcataagacttacctagcaggcttgtttaaaaagttcagattcctagctttgtacccagggattgcctcaggtggtatgggctgtggtcctggagtcatcacttttataaatagtggttcagagaccacagagagagactgcttcatcgaatgggaagtaccaaggagaaagtacaattcagtattgtctggaggcaagtggacactttgtacctgaggtttagaataggtggtctcttgccagtacaatccccaggcgttttctgtgttcagaagtagtaagaatgcctttaattcagaggattatctaagctctttaaagctgtttttctccattgtcatagtgccttctctgaaaaatgaatgtacaggtatcctattttctaatgtaattaggattttttaaaagcaatttttgatagtttttcttttaaaaagtaaaattcagcactgtgacttgaacccccaaatctttcacatacaggtgaaacattaagccacaaataaaaataatgaacaagaaagaagacaagatcctaattcctgtcattagtgacctaagtaccccatatcagaaactttgcaaaacagatctagggacagaagggctttgaaagacatttttctttggggcaaatttcgtgtgccagaactacagtttaaatgtttttatgagcaagggaaggtagcattgattcccatagctttctaattagatacatgctgtcatggatgtaagccttaaaggagttaatactaatcttgtacatacacaaattttctcaggtttttttattttaaaaaatgatttgttaaaagtactgtctgctagacccttgcctttgagtggctttgaaactaatatagttttaaaagtgcatgggatgagattatgctatagtatattaaaagcatgtttctgtttactccattgtaagatcattaatggaataaagatcacaacacc

SEQ ID NO: 20716 - DNA, 1357 bp, Homo Sapiens
cggtgctgggcagcagaccgtccaaaccgacacgcgtggtatcctcgcggtgtccggcaagagactaccaagacagacgctatgactgagggctgatgtgaatccaaaggcctatccccttgccgatgcccacctcaccaagaagctactggacctcgttcagcagtcatgtaactataagcagcttcggaaaggagccaatgaggccaccaaaaccctcaacaggggcatctctgagttcatcgtgatggctgcagacgccgagccactggagatcattctgcacctgccgctgctgtgtgaagacaagaatgtgccctacgtgtttgtgcgctccaagcaggccctggggagagcctgtggggtctccaggcctgtcatcgcctgttctgtcaccatcaaagaaggctcgcagctgaaacagcagatccaatccattcagcagtccattgaaaggctcttagtctaaacctgtggcctctgccacgtgctccctgccagcttcccccctgaggttgtgtatcatattatctgtgttagcatgtagtattttcagctactctctattgttataaaatgtagtactaaatctggtttctggatttttgtgttgtttttgttctgttttacagggttgctatcccccttcctttcctccctccctctgccatccttcatccttttatcctccctttttggaacaagtgttcagagcagacagaagcagggtggtggcaccgttgaaaggcagaaagagccaggagaaagctgatggagccaggacagagatctggttccagctttcagccactagcttcctgttgtgtgcggggtgtggtggaattaaacagcattcattgtgtgtccctgtgcctggcacacagaatcattcatacgtgttcaagtgatcaaggggtttcatttgctcttgggggattaggtatcatttggggaggaagcatgtgttctgtgaggttgttcggctatgtccaagtgtcgtttactaatgtacccctgctgtttgcttttggtaatgtgatgttgatgttctccccctacccacaaccatgcccttgagggtagcagggcagcagcataccaaaagagatgtgctgcaggactccggaggcggcctgggtgggtgagccatggggcagttgacctgggtcttgaaagagtcgggagtgacaagctcagagagcatgaactgatgctggcatgaaggatccaggaagatcattggagaactggctgggtacctgtaacagagatggtggagtccagggaaacagcctgtctctggtgaatgggactttctttggtggacacttggcacccgcttctgagagccctttcc

SEQ ID NO: 20717 - DNA, 1433 bp, Homo Sapiens
gcacgagggactcccggacgtaggtagtttgttgggccgggttctgaggccttgcttctctttacttttccactctaggccacgatgccgcagtaccagacctgggaggagttcagccgcgctgccgagaagctttacctcgctgaccctatgaaggcacgtgtggttctcaaatataggcattctgatgggaacttgtgtgttaaagtaacagatgatttagttaccaagctcaagatgtaaagaagattgagaaattccacagtcaactaatgcgacttatggtagccaaggaagcccgcaatgttaccatggaaactgagtgaatggtttgaaatgaagactttgtcgtgtacttaggaagtaaatatcttttgaattagagaaagtgttgggacagaaagtactttatgtaactaagtgggctgttcagaagcttagaggtcattttttgtaattttctttttaattactttagagagctagggatgcaaatgttttcagttagaaagcctttatttacttttggaaattgaacaagaaatgcatctgtcttagaaactggagattatttgatgttaggtaaaacatgtaattgtttctctggcaaatttgtatcagtaatttgaaaatgagatattaggaaaaaccaattcttcttaaatttagttcatctttctttaaaagaacattaaatgtaaccattttgtcagatccatgtattttggagcataaaatgtatgctgttgtgaccaataaatataaaatatggtaattggaattaactccacaccatagtatgcattgttatacatactgtgtacctaattatgtatagcagtgtagtctcaattatatctgaaagtaattgtgactaacaagtatgctttgccttatttccacatttaaactacctgttaatataagggatttgtagtatcagcttgttgagcaatgactttgaatctagttttcagtgatcagaagcagcagttatttgagtgtatgaatggaatgatgatcactgtgctataatgtactgaaaccaccatattacagaaatatttactacatattttccatctgtagtttctcagaagggctatggattagtttgaactgtcaaatccttgcatacttctgtgacacccctgcccattttctgtctttaattaaccaaggtgttaggtgtgactgtcacaactgttatgttttccagtaaactagaagtatgatatttgataattatatttgtatttcaccacctaaatgtaatgttgattcctcaagaatgaaatgaaggcactacattgaaatatgttttgtataaatttgtcatgttgaacagcattttagcatggtaagttcccttagctatatgaattttggcatgtttcagagagatcagtaaataaaatattagtgcctcgtgc

SEQ ID NO: 20718 - DNA, 2024 bp, Homo Sapiens
  misc_feature (1883)..(1910): n is a, c, g, or t
gcacgaggtgacagctttaaaattaggcctctgggctttacggaggaagtagaggttattcttcagtacatctgtgaatgtgaatgccaaagcgaaggcatccctgaaagtcccaagtgtcatgaaggaaatgggacatttgagtgtggcgcgtgcaggtgcaatgaagggcgtgttggtagacattgtgaatgcagcacagatgaagttaacagtgaagacatggatgcttactgcaggaaagaaaacagttcagaaatctgcagtaacaatggagagtgcgtctgcggacagtgtgtttgtaggaagagggataatacaaatgaaatttattctggcaaattctgcgagtgtgataatttcaactgtgatagatccaatggcttaatttgtggaggaaatggtgtttgcaagtgtcgtgtgtgtgagtgcaaccccaactacactggcagtgcatgtgactgttctttggatactagtacttgtgaagccagcaacggacagatctgcaatggccggggcatctgcgagtgtggtgtctgtaagtgtacagatccgaagtttcaagggcaaacgtgtgagatgtgtcagacctgccttggtgtctgtgctgagcataaagaatgtgttcagtgcagagccttcaataaaggagaaaagaaagacacatgcacacaggaatgttcctattttaacattaccaaggtagaaagtcgggacaaattaccccagccggtccaacctgatcctgtgtcccattgtaaggagaaggatgttgacgactgttggttctattttacgtattcagtgaatgggaacaacgaggtcatggttcatgttgtggagaatccagagtgtcccactggtccagacatcattccaattgtagctggtgtggttgctggaattgttcttattggccttgcattactgctgatatggaagcttttaatgataattcatgacagaagggagtttgctaaatttgaaaaggagaaaatgaatgccaaatgggacacgggtgaaaatcctatttataagagtgccgtaacaactgtggtcaatccgaagtatgagggaaaatgagtactgcccgtgcaaatcccacaacactgaatgcaaagtagcaatttccatagtcacagttaggtagctttagggcaatattgccatggttttactcatgtgcaggttttgaaaatgtacaatatgtataatttttaaaatgttttattattttgaaaataatgttgtaattcatgccagggactgacaaaagacttgagacaggatggttattcttgtcagctaaggtcacattgtgcctttttgaccttttcttcctggactattgaaatcaagcttattggattaagtgatatttctatagcgattgaaagggcaatagttaaagtaatgagcatgatgagagtttctgttaatcatgtattaaaactgatttttagctttacaaatatgtcagtttgcagttatgcagaatccaaagtaaatgtcctgctagctagttaaggattgttttaaatctgttattttgctatttgcctgttagacatgactgatgacatatctgaaagacaagtatgttgagagttgctggtgtaaaatacgtttgaaatagttgatctacaaaggccatgggaaaaattcagagagttaggaaggaaaaaccaatagctttaaaacctgtgtgccattttaagagttacttaatgtttggtaacttttatgccttcactttacaaattcaagccttagataaaagaaccgagcaattttctgctaaaaagtccttgatttaacactatttacatacaggccatactttacaaagtatttgctgaatggggaccttttgagttgannnnnnnnnnnnnnnnnnnnnnnnnnnntgtctggtgctttctgtcacctcttctaatcttttatgtatttgttgccattttggggtaagacttttttatgagtactttttctttgaattttagcggtcaatttgccttttt

SEQ ID NO: 20719 - DNA, 1167 bp, Homo Sapiens
  misc_feature (78)..(108): n is a, c, g, or t
  misc_feature (893)..(920): n is a, c, g, or t
gcacgagggggatgtcttcaaagtcagcagttacagaattagtttactttgaattttgttgtctaaatagctcctgcnnnnnnnnnnnnnnnnnnnnnnnnnnnnnnnctatcacaggctggcctaactaatacaaaataggtgatgaacctctggttttaccataatgcaatgtgccacggaaagtttgggggaggtttttaatgtaattgcactctggttaattggctcgtaccaagccctgccttatgacttgtggaaagcttcaaggagttccactgatgcaaaagggtcttttcctagcttcctggtctgatcagtgctatgagatggacagataagtgtgaatgttttatacagaaaatggaaatgatacatttctcttgttaggtgttttcataaaatgtagcattttttttcttatggaaataagagtttcaggtgtctccccacctagggcaaattcatgcacattgtcatgttataccaccattctggaaatgatttctgtggatttgaaattgcacttttaattttatatatgacagcatttaaatgcaaacactaccatgaatttaatgtataaaatgttgtcaaaccaagggaaaaaaccacagttcaccatgtggagtttactttttttatatgaatgtttgttgtactgtgtctaagcataacttccctaatgtcattacttttacataccagatttgactgaccactaatgtagtactggggataacttaatatcctatgttgtgtcaagactctttgaagactttcttgaattgctttcgtaaaggtctgaacactgttaaggagaaagctgagtatcaacttgcctttctgatagaaatgtttcttgtgccagttttattgttgagatatactannnnnnnnnnnnnnnnnnnnnnnnnnnnaaaaaaacaaatgtattgtggcttccagttaccaggttgtctaggtaatgacagtaaactgactgtagaaatgataattgtggtatagtgaccaatagatgccaaacagcttgtgggcctcactaaaggtggggtcgcttagtccccggggagtaaaatgagtgacctcagaaacaagaattcctggaaagcacatgccgaagaggaatatgtataattttaatttaatgcaaaattttaatttgtc

SEQ ID NO: 20720 - DNA, 930 bp, Homo Sapiens
  misc_feature (167)..(207): n is a, c, g, or t
gcacgagggtcaaagacagggtgttccaatgaattcactcaggtttctctttgagggtcagagaattgctgataatcatactccaaaagaactgggaatggaggaagaagatgtgattgaagtttatcaggaacaaacggggggtcattcaacagtttagatattcnnnnnnnnnnnnnnnnnnnnnnnnnnnnnnnnnnnnnnnnnaaaaatagttcttttgtaatgtggtgttcaaaacggaattgaaaactggcaccccatctctttgaaacatctggtaatttgaattctagtgctcattattcattattgtttgttttcattgtgctgatttttggtgatcaagcctcagtccccttcatattaccctctcctttttaaaaattacgtgtgcacagagaggtcacctttttcaggacattgcattttcaggcttgtggtgataaataagatcgaccaatgcaagtgttcataatgactttccaattggccctgatgttctagcatgtgattacttcactcctggactgtgactttcagtgggagatggaagtttttcagagaactgaactgtggaaaaatgacctttccttaacttgaagctacttttaaaatttgagggtctggaccaaaagaagaggaatatcaggttgaagtcaagatgacagataaggtgagagtaatgactaactccaaagatggcttcactgaagaaaaggcattttaagattttttaaaaatcttgtcagaagatcccagaaaagttctaattttcattagcaattaataaagctatacatgcagaaatgaatacaacagaacactgctctttttgattttatttgtactttttggcctgggatatgggttttaaatggacattgtctgtaccagcttcattaaaataaacatatttgtaaaaatcat

SEQ ID NO: 20721 - DNA, 1012 bp, Homo Sapiens
  misc_feature (295)..(314): n is a, c, g, or t
gccaaatacattttctgacattgtaagattgccttactgtctgtcattccttattgctggcccctttctcaggccggaggccaagtggtggagaaggaaaggaaatgatcgaacgggcatgttgtcaagtgggcatgccactgggaaataccaccagtttaccctgaaacattgtcctcagaggagtaggaaagtggattttgaatctctattttgctcaaaagttcagttcctgagatactgatgactgagagtgctgctgggaaattttcaggattgtgtggtcttttggggnnnnnnnnnnnnnnnnnnnnaagacaaagttgaccgctgttcactgtccacgtgatcagttgtaagattacaatgctgcatgctagttggttacataagatacaattccagtgatggaaggcggttataatggatggtggtgtgtacaagatggcactgccatctttgagcagagcccagctctgcagcgccacttcatctttttaaacaccctagaggtctgtttgttgttgctgttgtcctttattttgaaagagttgcaagagaagttacagtccaggtgaacttggagattgtgggattggttttgtttctgttttgttttgtttatcatttacctgtagtgctattgctgttgatactatcacctataccctgtttctagtgagtgctgaatacagtatggtacaatgacagtaacagccgcgtggtgctgccaggactgcccttgggcatatcagtgacagcccaaatgtgggtggaggaaacctgtaatttccttcttaacatgtgtttgaaataccaagtgaataatactgttctggaaaaaaatgataaactagtggaaattaaagaaattaagggttttatataatagacaggccccacctctcaaaatatttttagaagtctttttgtaaactaatttcttttgatcactattttgcatcagtaaaatgatttttttaaaaccaataaatcatcaattattagaaat

SEQ ID NO: 20722 - DNA, 1132 bp, Homo Sapiens
  misc_feature (969)..(985): n is a, c, g, or t
cccccgggctgcaggaattcggcacgaggctccatttttgataacttgaagaaatccattgcttataccttaaccagtaacattcccgagatcaccccgttcctgatatttattattgcaaacattccactaccactggggactgtcaccatcctctgcattgacttgggcactgacatggttcctgccatctccctggcttatgagcaggctgagagtgacatcatgaagagacagcccagaaatcccaaaacagacaaacttgtgaatgagcggctgatcagcatggcctatgggcagattggaatgatccaggccctgggaggcttctttacttactttgtgattctggctgagaacggcttcctcccaattcacctgttgggcctccgagtggactgggatgaccgctggatcaacgatgtggaagacagctacgggcagcagtggacctatgagcagaggaaaatcgtggagttcacctgccacacagccttcttcgtcagtatcgtggtggtgcagtgggccgacttggtcatctgtaagaccaggaggaattcggtcttccagcaggggatgaagaacaagatcttgatatttggcctctttgaagagacagccctggctgctttcctttcctactgccctggaatgggtgttgctcttaggatgtatcccctcaaacctacctggtggttctgtgccttcccctactctcttctcatcttcgtatatgacgaagtcagaaaactcatcatcaggcgacgccctggcggctgggtggagaaggaaacctactattagccccccgtcctgcacgccgtggagcatcaggccacacactctgcatccgacacccaccccctctttgtgtacttcagtcttggagtttggaactctaccctggtaggaaagcaccgcagcatgtggggaagcaagacgtcctggaatgaagcatgtagctctatnnnnnnnnnnnnnnnnnctgcctgaaaaccatccatctgtggaaatgacagcggggaaggtttttatgtgcctttttgtttttgtaaaaaaggaacacccggaaagactgaaagaatacattttatatctggatttttacaaataaagatggctattataatgg

SEQ ID NO: 20723 - DNA, 1760 bp, Homo Sapiens
gtccgccggtctggcggtgagtggggagtgggatccgatcccgtggggctatgtaggggaagttggtggctgcagctgccgtggttttctcctggtgtccagcagaaacggcggcggcgcaaggtgtggctgggccaacccaggatctcccaggaccctccgctctgcgcgacaaggggcccgcgcttgccaaggccgacgggcaggagtgaacgtggcctccgtgggtctgcagccccgataggccaattgtacagaatttaaaccgtctctcagatgtgtacagtagaactcaagaagacagactaccaagggtcatctgaagtcgtgattgggtcactaataacaccaggacaaagttaagggatcactactcaagcataagccccagttttcataagactgctgtgaagatgtttgatataaaggcttgggctgagtatgttgtggaatgggctgcaaaggacccctatggcttccttacaaccgttattttggcccttactccactgttcctagcaagtgctgtactgtcttggaaattggccaagatgattgaggccagggagaaggagcaaaagaagaagcaaaaacgccaagaaaacattgcaaaagctaaacgactaaaaaaggattgaaggactgaacaggctttgcaaccagaggaaaatcatttggaaaattacacagctttggaagaatccactaaagtttcttctttggatttcttgacagtatgatttagtaaatgaaatttgaccaaatggaagaatcatgttagttctgacctcaatactatagtaacttttaggcgtgggtgtagaagtttataggtttctattgacagttattgtaaattagcatttactgtggtacaaattctttataactgacttagtcatttgccgcttagcagtttatatactgaaatgaaaacatcttgtggggaaaagtgactttagattatgaactcaattcaaatgaactctatttaaaatggggtcctattttggacaaaggaaattaagaatgtaaaagtcagaacagtcttgaggtaaaaagtgtgctttggcttaaaagggatacagtatattaattacatcttttattattattgtttatttcttagaatcatttctggctttctcaaaacaaaataatattaatgagtacttctatttgctgcatttttcttattacagcctttgagacagctggtaattataagtcattttccattttttaaaacataattttataaagaattctcttatctcgactatgtagaataccacctactggacagaacaatttttgtactcacaaacactgccattttcttagagatggcttgagaggagtaacactatggtttaaagcttgcagtaaaaatgccaaacactgtagtaccttggaacccagtttattcttgtgctaagcagaactgtaaaatagttaaaatgtcttatcaagtaattcgccgattacaaagacaccatttgttttttatttcattctttgttttaactcatgtggtagtgatatttaatactttctgatcaaacaggttcaaagtaaaacgttaaatttcacatttcttttaaagaactcttaaagtgtaacagttacgccatacttcataagtggtaaagaaaggtataaatttgggaaacattttgttgggcatagtagtgattgggtgaaaggataaatatatcaaatgagaatgtgctgtaattgggagtaggagctaaaggatg

SEQ ID NO: 20724 - DNA, 1591 bp, Homo Sapiens
gcacgaggcaccctctttgtcacctacccagatggtaggccaacaggggacgcttttgtcctctttgcctgtgaggaatatgcacagaatgcgttgaggaagcataaagacttgttgggtaaaagatacattgaactcttcaggagcacagcagctgaagttcagcaggtgctgaatcgattctcctcggcccctctcattccacttccaacccctcccattattccagtactacctcagcaatttgtgccccctacaaatgttagagactgtatacgccttcgaggtcttccctatgcagccacaattgaggacatcctggatttcctgggggagttcgccacagatattcgtactcatggggttcacatggttttgaatcaccagggccgcccatcaggagatgcctttatccagatgaagtctgcggacagagcatttatggctgcacagaagtgtcataaaaaaaacatgaaggacagatatgttgaagtctttcagtgttcagctgaggagatgaactttgtgttaatggggggcactttaaatcgaaatggcttatccccaccgccatgcctgtctcctccctcctacacatttccagctcctgctgcagttattcctacagaagctgccatttaccagccctctgtgattttgaatccacgagggcactgcagccctccacagcgtactacccagcaggcactcagctcttcatgaactacacagcgtactatcccagccccccaggttcgcctaatagtcttggctacttccctacagctgctaatcttagcggtgtccctccacagcctggcacggtggtcagaatgcagggcctggcctacaatactggagttaaggaaattcttaacttcttccaaggttaccagtgtttgaaagatgtatggtgatcttgaaacctccagacacaagaaaacttctagcaaattcaggggaagtttgtctacactcaggctgcagtattttcagcaaacttgattggacaaacgggcctgtgccttatcttttggtggagtgaaaaaatttgagccagtgaagccaaatcgtaacttacagcaagcagcatgcagcatacctggctctttgctgattgcaaataggcatttaaaatgtgaatttggaatcagatgtctccattacttccagttaaagtggcatcataggcgtttcctaagttttaagtcttggataaaaactccaccagtgtctaccatctccaccatgaactctgttaaggaagcttcattttcgtatattcccgctcttttctcttcatttccctgtcttctgcataatcatgccttcttgctaagtaattcaagcataagatcttggaataataaaatcacaatcttaggagaaagaataaaattgttattttcccagtctcttggccatgatgatatcttatgattaaaaacaaattaaattttaaaacacctgaagatatattagaagaaattgtgcaccctccacaaaacatacaaagtttaaaagtttggatctttttctcagcaggtatcaggtgtaaataatgaattaggggccaaatgcaaaacgaaaa

SEQ ID NO: 20725 - DNA, 1008 bp, Homo Sapiens
gcacgaggggttgcacatgtttgttttctttattgaaagacaatacagaaatgatgaaacaatacctcaagggtcttgaacatggatcaaatgacagaagtctttaatgcaatggcacagaagcttctggcatcagcacctgcaagccctgttcagtcatcattcatgatcgccaaatactccttctggtgttcaaccagcttcaggaatacttggtatttcttatcatagtattttttatcctgtagtctcgggaacacaactttcccaactttgctcatttttgccattgcttcctgtacagaagcgaaatcccctgaggcacaggcacccagaacagcagcacccacaagaacggactccacctcttgcgacaggaccacaggcatgccagtaatgtccgcatgcatttgcacaaaaaggggattcttgctgaggcctccacataggaaaagagtactgattgagtgccctgctgcctccatggcttctataatgaagcgagtccccaaagcaatggcttgaactgtggccaggtagagaatggcaagatcatcaaggtcctgagacagtttcaatccggtgaccatgccctttagtgtcagatctgctaagggagaccggttgccatggaaatctggccaaacatgtaaatcaacagtaaggaaacccacaggctgagccttcttaatcagatccaggtgactgttcaaatatgcatatatactctggcatctggctgtggcctttacttgtagttctggaaaagcagcatggccttgtaccatgtggtctatcaattttccagtaacgctctgaccaccttcattcagccagaacccaggtaccatggctgagaaataaggcccccagacgcctggtacaaaaatcgggtctttgctgatccccatgtgacaagaagacgttccacagatgacagccagccgtgacgtcactggctgcccctcacagatgaggccgtgccctctcacatctgccccaatcact

SEQ ID NO: 20726 - DNA, 1312 bp, Homo Sapiens
cccttagcggccaaagtgattgaacccacccggccagagcctgctactggccattattaaaatagatacctttcttggtgggggcaatgatgactgtgagttggtggaacggctggttctctgctgcgcctgtcgcattatgccatacccatagtcgacagcgccatcattgtgcttagtcaggattgcttacctgcgcccaaaaccgacatggacaatctgcgcggggtttctgactatgcacccatggacagagtgctgcgagaagagagagcctatattttaaatttgtcacctacaattaaaaaaacaggatgtaatgtccttctcatagacaaatctattctaggagatgctcttattgatcttgctttaccctttctgaatttcatgaacatcatggtgattaaagatattgaaagagatcacctttaattcatttgtaagacaattggaaccaagccagttgctcatattgaccaatttactgctgacatgctgggttctgctgagttagctgaggaggtcaatttaaatggttctggcaaactgctcaagattacaggctgtgccagccctggaaaaacagttacaattgttgttcgtggttctaacaaactggtgattgaagaagctgagcgctccattcatgatgccctatgtgttattcgttgtttagtgaagaagagggctcttattgcaggaggtggtgctccagaaatagagttggccctacgattaactgaatattcacgaacactgagtggtatggaatcctactgcgttcgtgcttttgcagatgctatggaggtcattccatctacactagctgaaaatgccggcctgaatcccatttctacagtaacagaactaagaaaccggcatgcccagggagaaaaaactgcaggcattaatgtccgaaagggtggtatttccaacattttggaggaactggttgtccagcctctgttggtatcagtcagtgctctgactcttgcaactgaaactgttcggagcattctgaaaatagatgatgtggtaaacactcgataatctggataactgactagcaccattatgatcaccagtattgtggctggaatggaagaagatcaccttggtgttccttgtttggaagattatttcctctgaatttctgggcttggtcttccagttggcatttgcctgaagttgtattgaaacaatttaatgaaaatattaaatatttggtttcaaaaggcagatttatcttctcccaacattctgttatttctgatacttttgaaaaactaataaaaactaatcctcgtgc

SEQ ID NO: 20727 - DNA, 1049 bp, Homo Sapiens
gcacgaggctgctggccacctatggctggtacatcgtcttcagctgcatccttctctacgtggtctttcagaagctttccgcccggctaagagccttgaggcagaggcagctggaccgagctgcggctgctgtggaacctgatgttgttgttaaacgacaagaagaactaaatgcgcaagttgaaaagcataaggaaaaactgaaacaacttgaagaagaaaaaaggagacagaagattgaaatgtgggacagcatgcaagaaggaaaaagttacaaaggaaatgcaaagaagccccaggaggaagacagtcctgggccttccacttcatctgtcctgaaacggaaatcggacagaaagcctttgcggggaggaggttataacccgttgtctggtgaaggaggcggagcttgctcctggagacctggacgcagaggcccgtcatctggcggatgaggctaagaatcttgttagtgtcacttttgacattagcaagatgaacccttaaccctcgattcaattgccttacgcacgcttttcacagtgactagccaaggggaggtggggttgatttctgttcctaactacacctgcatatgtcagggctccagtcagcaaaaggtatagatgttgcctctaggcatgaggtcattggtcacattctacttggagacagtgattgcattcattgatttcatggttaattgctagttggtaggtaaaggcctctagatgattagcaatcttgataaaagaggcctagtaatgttcttttgaggttagaaatccttgctgctaggacagtctctgtgacaggttgcgttgaatgatgtcttccttatcaatggtgagcccaccagtgaggattactgatgtggacagttgatggggtttgtttctgtatatttatttttatgtacagaactttgtaaaaacgaaactatttaaaaaacaagaataacatttttagcatctttattcaaggagatttatggacttcaatttgtctatcaaacattaaatagctttttattacaacctctaactatt

SEQ ID NO: 20728 - DNA, 923 bp, Homo Sapiens
  misc_feature (736)..(746): n is a, c, g, or t
ccccgggctgcaggaattcggcacgagggtctttaataaaaagtagcttcttctaaatcataaatgcagacaatgtttaggtaaagacatactcattaagtgttatttattttactcaagaactggaaaccaactaaatgccttctatagaagtaatttttgatgaggagaaatggtacaatactaattaacaacttggtttaacatgtttactgagcatctgttaagtgttgggggaaaaagcagcaggatccagagctataggtacagtgtgatctcagctttgcaaacacattttctacatagatagtactaggtattaatagatatgtaaagaaagaaatcacaccattaataatggtaagattggtttatgtgattttagtggtatttttggcacccttatatatgttttccaaactttcagcagtgatattatttccataacttaaaaagtgagtttgaaaaagaaaatctccagcaagcatctcatttaaataaaggtttgtcatctttaaaaatacagcaatatgtgactttttaaaaaagctgtcaaataggtgtgaccctactaataattattagaaatacatttaaaaacatcgagtacctcaagtcagtttgccttgaaaaatatcaaatataactcttagagaaatgtacataaaagaatgcttcgtaattttggagtaggaggttccctcctcaattttgtatttttaaaaagtacatggtnnnnnnnnnnnttcacaacagtatataaggctgtaaaatgagaattctgccccctcacctcttaccccagtactattctccagaggtaatctattaacaatttcttatgtaattttcaagaaatttgtatgcgtatataagcaaatatgtaatctttattttttaaataaatgggatcatcctcgtgc

SEQ ID NO: 20729 - DNA, 1325 bp, Homo Sapiens
cctttttaaaaatcccccgggctgcaggaattcggcacgaggcgtgtctgagtggttgccgggtctccatggagaagcggctcgccagtgtcccaggctgctgagctctcgccgcccgagaccccgcggcgcggccgcagggccatgctagccttgcgcgtggcgcgcggctcgtggggggccctgcgcggcgccgcttgggctccgggaacgcggccgagtaagcgacgcgcctgctgggccctgctgccgcccgtgccctgctgcttgggctgcctggccgaacgctggaggctgcgtccggccgctcttggcttgcggctgcccgggatcggccagcggaaccactgttcgggcgcggggaaggcggctcccaggccagcggccggagcgggcgccgctgccgaagccccgggcggccagtggggcccggcgagcacccccagcctgtatgaaaacccatggacaatcccgaatatgttgtcaatgacgagaattggcttggccccagttctgggctatttgattattgaagaagattttaatattgcactaggagtttttgctttagctggactaacagatttgttggatggatttattgctcgaaactgggccaatcaaagatcagctttgggaagtgctcttgatccacttgctgataaaatacttatcagtatcttatatgttagcttgacctatgcagatcttattccagttccacttacttacatgatcatttcgagagatgtaatgttgattgctgctgttttttatgtcagataccgaactcttccaacaccacgaacacttgccaagtatttcaatccttgctatgccactgctaggttaaaaccaacattcatcagcaaggtgaatacagcagtccagttaatcttggtggcagcttctttggcagctccagttttcaactatgctgacagcatttatcttcagatactatggtgttttacagctttcaccacagctgcatcagcttatagttactatcattatggccggaagactgttcaggtgataaaagactgatgaaagtcatctctcactgttagtaagggaagcagtatacatcaatgggaacagggcccatggaaatgtacaggagtttccctattttggtgttcagcttgaaaaacacttgtcagaatcaactgtgtcatcaaaatttagtaatgtgcattgaaataagttgatcatgggaatatgcagaatttcaatgtattttaaatacaataaaattgtatttaaaatttttatcttaggtttcttgataattatagaagatcaattattgtcagtctttt

SEQ ID NO: 20730 - DNA, 807 bp, Homo Sapiens
tgcaggaaaagatccatgcccagtggcagaaagagggaaatgataaagattttaccttgaatgattttggcttcatgatctttcactcaccatattgtaaactggttcagaaatctctagctcggatgttaaattagaagacacctactttgatagagatgtggagaaggcatttatgaaggctagctctgaactcttcagtcagaaaacaaaggcatctttacttgtatcaaatcaaaatggaaatatgtacacatcttcagtatatggttcccttgcatctgttctagcacagtactcacctcagcaattagcagggaagagaattggagtgttttcttatggttctggtttggctgccactctgtactctcttaaagtcacacaagatgctacaccggggtctgctcttgataaaataacagcaagtttatgtgatcttaaatcaaggcttgattcaagaactggtgtggcaccagatgtcttcgctgaaaacatgaagctcagagaggacacccatcatttggtcaactatattccccagggttcaatagattcactctttgaaggaacgtggtacttagttagggtggatgaaaagcacagaagaacttacgctcggcgtcccactccaaatgatgacactttggatgaaggagtaggacttgtgcatttcaaacatagcaactgagcatattcccagccctgccaagaaagtaccaagactccctgccacagcagcagaacctgaagcagctgtcattagtaatggggaacattaagatactctgtgaggtgcagactttc

SEQ ID NO: 20731 - DNA, 1281 bp, Homo Sapiens
  misc_feature (713)..(721): n is a, c, g, or t
  misc_feature (961)..(970): n is a, c, g, or t
gcacgaggtatactaaattaaaactttattgaataaagaacactctccagaacacatgatctgatggactaggtctacattacatgcaatgaagctgaacatgaccgtagtttaacatggaatgtcaaacaaattagtaattttcattgtacaaaactgtttatgtagctgacatgcatgcaagaagaaaagtgtcatactcagcattttcaccaatcttctgtgatgagttttaaaaaaggcatttggagaaactggtagatgtcttcaacatatagttcaaataaattagttgtatgtgtactactgaatcctctttcaacctctcttgcattccaaataaaatcttagtgcaaacatcaaagttgctggtcactccaaaagactgctaaactcataatagaatacaagttctgaattactgtgtattaagtaggaaaacccaagaataccagttactgcaaaattcatttaggcacatttaatagtccactctaagcattttttctaagtctctcacattaatgactaaagcctgtttacagtactaaaattctatcattcaagcatcaatgattacatttcagaaaaaggaaattcatttcagtaatagcattactgctatatcctaaaaaaaggagagaaaataaagaatcataattaacaaaaccagtatccataataggatacacagggaaaaacattttaggagnnnnnnnnngtgtgctttacttgccacagcaggaattatataatgtaaacaccatattggcccacaccacaaaaatccatgagaaaggttcaaatttgaacaccatatgtgcattattttcaaatctgtgtttgtgagtttatactgtatctgcttgtaccaatacatgacaaacaaaacaaactcttcgacacacatataagtgattgttaaatattaagcatggcttgattccctgactttagctcnnnnnnnnnntgttaagtgacatcccaactgtcttaaaaatgtttacagaaaccattaaatgaatgtgagtagtagctgaggaatgatgaaaaagtgatggtaatgatattgtgcaagtggatggaaaaagaatatacgtatttgcaaatgcatggaaaatcttattctgtgggccttgtctgaattttaaactgataccaagaataaaaaaatatagtagcacaagtccattgacacctggagggtcaggcctagaaagcttaccttcaaagtgcaaattttaacaatggaatgttttagcagggacttaagcctcgtgc

SEQ ID NO: 20732 - DNA, 747 bp, Homo Sapiens
gcacgaggattaaatgtaggtatgaataagttcgaagctccgtgagtgaaccatcattataaacgtgatgatcagctgtttgtcatagggcagttggaaacggcctcctagggaaaagttcatagggtctcttcaggttcttagtgtcacttacctagatttacagcctcacttgaatgtgtcactactcacagtctctttaatcttcagttttatctttaatctcctcttttatcttggactgacatttagcgtagctaagtgaaaaggtcatagctgagattcctggttcgggtgttacgcacacgtacttaaatgaaagcatgtggcatgttcatcgtataacacaatatgaatacagggcatgcattttgcagcagtgagtctcttcagaaaacccttttctacagttagggttgagttacttcctatcaagccagtatgtgctaacaggctcaatattcctgaatgaaatatcagactagtgacaagctcctggtcttgagatgtcttctcgttaaggagatgggccttttggaggtaaaggataaaatgaatgagttctgtcatgattcactattctagaacttgcatgacctttactgtgttagctctttgaatgttcttgaaattttagactttctttgtaaacaaatgatatgtccttatcattgtataaaagctgttatgtgcaacagtgtggagattccttgtctgatttaataaaatacttaaacactgagttgt

SEQ ID NO: 20733 - DNA, 1791 bp, Homo Sapiens
  misc_feature (1610)..(1648): n is a, c, g, or t
gcacgagggcggcggcggcggctgtggaggccgcagtccgggtcctggcttcggcctcagccccaccatggtgacgcttgctgaactgctggtgctcctggccgctctcctggccacggtctcgggctatttcgttagcatcgacgcccatgctgaagagtgcttctttgagcgggtcacctcgggcaccaagatgggcctcatcttcgaggtggcggagggcggcttcctggacatcgacgtggagattacaggaccagataacaaaggaatttacaaaggagacagagaatccagtgggaaatacacatttgctgctcacatggatggaacatacaaattttgttttagtaaccggatgtccaccatgactccaaaaatagtgatgttcaccattgatattggggaggctccaaaaggacaagatatggaaacagaagctcaccagaacaagctagaagaaatgatcaatgagctagcagtggcgatgacagctgtaaagcacgaacaggaatacatggaagtccgggagagaatacacagagccatcaacgacaacacaaacagcagagtggtcctttggtccttctttgaagctcttgttctagttgccatgacattgggacagatctactacctgaagagattttttgaagtccggagagttgtttaaaaagcctcttcctgatgatcccaactcagaattcactgtttaccaaacaccttggtcataataatgtcattagtttctccatttttattttctgaactgtacattcacaacttatgtttctttgagattaatagatattgggggaaaaacgcctttttaggaaaattatagtgaaaatttgacagttgattggcataatttcttgtttgaatgctgcctccattatataggtccttccaggaactcaaacactgtaagtgaaatatgggagtatagtttttattatttcttcttttccttttgttttcataatataatgcagtttgttcaggaaatcagcacaaagcctgatagtactttactaaaatgactgcattctttggattccttcagtctatggttcaagtcactaaagattcatttttgttgagtccttatgagaaacagcagtatgaatcttgacggtttctgcccgtcctaatggcagagctctctgacttgggtgtatgctgccaggctgggtactttcatactttgttttcttgttttgctttaaaactacgactcagcatacattttcccacatacatttttacattgtaccttaggactcagtcatctccacttaaattgatgacacaagcagctaataaccatttctgggtttctgcctaaccccctaattgtctgttaaagccaattctctgggtgtcccagtgagtggtggctttttttctttccacattggcacattcacttctcccactcttggcatgtaagaaataagcatttacataattggaaaaatctggatttctgatgccaaagggttaaagcttcttggatttcatttcattgatatacagccactattttatttttgatcagtggcctttgggccactgttcagggtactgaccatcagtgtcagcattannnnnnnnnnnnnnnnnnnnnnnnnnnnnnnnnnnnnnngcacatgtgaatcttgttttgtgtaaaatgaaattactttctcttgttctctgatgatgggtttaaaattaaaagagcatccggttttggtatggggatgatccaggattatgttgtgactgatacatattagttacttgtgc

SEQ ID NO: 20734 - DNA, 627 bp, Homo Sapiens
  misc_feature (475)..(486): n is a, c, g, or t
cttaatacttatctttattatgaaagtgtttccaaagtaaaatgatcctcataataatgattgcttccagagatcaagaatgaataattatattttcatataaaaatcagcaaaacacaataacaatacataaaataattctaattggctaacagtatttcattccatttctgacagagatgctcaagcactgaattgtcttaagaaaacaagtaaggttttgtcacctatcctatttctcactgcaagttgaaaaaaatcaaatccaaacaccaccaccccttctatgacaacaaacggctgtggaggtaaatgactatgtgggcaaagagttgatgaaaatcatgagcttaggggctttatgaaactttgggaaatcaaactcaaaggttgttttccattcttaaagtaatgaagctctaagttaaagtttcaaaatcatcacataactgttcctattccataactcatttcnnnnnnnnnnnngcaggtaatcttattttcctaagggtagtttcatgatgacagtgtcaaaaaattactgtggataaagaaaaaattgtctcaatgaaataaaatttttcactgaacacagaaaccatctcaatagttgctgctccctggttt

SEQ ID NO: 20735 - DNA, 1752 bp, Homo Sapiens
gcacgaggctttaaaagaggtaagagcaacgtgctttgggagcagagaagagggagaaagcagcatcttgcctggatgagccaggggacacagaagagaagcccactatctcatttaatctttacaactctcttgcaaggttccctggttgtgaaaatacatgagataaatcatgaaggccactatcatcctccttctgcttgcacaagtttcctgggctggaccgtttcaacagagaggcttatttgactttatgctagaagatgaggcttctgggataggcccagaagttcctgatgaccgcgacttcgagccctccctaggcccagtgtgccccttccgctgtcaatgccatcttcgagtggtccagtgttctgatttgggtctggacaaagtgccaaaggatcttccccctgacacaactctgctagacctgcaaaacaacaaaataaccgaaatcaaagatggagactttaagaacctgaagaaccttcacgcattgattcttgtcaacaataaaattagcaaagttagtcctggagcatttacacctttggtgaagttggaacgactttatctgtccaagaatcagctgaaggaattgccagaaaaaatgcccaaaactcttcaggagctgcgtgcccatgagaatgagatcaccaaagtgcgaaaagttactttcaatggactgaaccagatgattgtcatagaactgggcaccaatccgctgaagagctcaggaattgaaaatggggctttccagggaatgaagaagctctcctacatccgcattgctgataccaatatcaccagcattcctcaaggtcttcctccttcccttacggaattacatcttgatggcaacaaaatcagcagagttgatgcagctagcctgaaaggactgaataatttggctaagttgggattgagtttcaacagcatctctgctgttgacaatggctctctggccaacacgcctcatctgagggagcttcacttggacaacaacaagcttaccagagtacctggtgggctggcagagcataagtacatccaggttgtctaccttcataacaacaatatctctgtagttggatcaagtgacttctgcccacctggacacaacaccaaaaaggcttcttattcgggtgtgagtcttttcagcaacccggtccagtactgggagatacagccatccaccttcagatgtgtctacgtgcgctctgccattcaactcggaaactataagtaattctcaagaaagccctcatttttataacctggcaaaatcttgttaatgtcattgctaaaaaataaataaaagctagatactggaaacctaactgcaatgtggatgttttacccacatgacttattatgcataaagccaaatttccagtttaagtaattgcctacaataaaaagaaattttgcctgccattttcagaatcatcttttgaagctttctgttgatgttaactgagctactagagatattcttatttcactaaatgtaaaatttggagtaaatatatatgtcaatatttagtaaagcttttcttttttaatttccaggaaaaaataaaaagagtatgagtcttctgtaattcattgagcagttagctcatttgagataaagtcaaatgccaaacactagctctgtattaatccccatcattactggtaaagcctcatttgaatgtgtgaattcaatacaggctatgtaaaatttttactaatgtcattattttg

SEQ ID NO: 20736 - DNA, 1353 bp, Homo Sapiens
  misc_feature (425)..(433): n is a, c, g, or t
gcacgaggcttacggtcatccttagtaggagtggtggttcctgacacagatgtacttccctcatttgcagccaagcttggggtgaagggctcctttgaggaactgtgccaaaaccaagttgtaagggaagccattttagaagacttgcagaaaattgggaaagaaagtggccttaaaacttttgaacaggtcaaagccatttttcttcatccagagccattttccattgaaaatgggctcttgacaccaacattgaaagcaaagcgaggagagctttccaaatactttcggacccaaattgacagcctgtatgagcacatccaggattaggataaggtacttaagtacctgccggcccactgtgcactgcttgtgagaaaatggattaaaaactattcttacatttgttttgcctttcctcctannnnnnnnnaacctgttaaactctaaagccatagcttttgttttatattgagacatataatgtgtaaacttagttcccaaataaatcaatcctgtctttcccatcttcgatgttgctaatattaaggcttcagggctacttttatcaacatgcctgtcttcaagatcccagtttatgttctgtgtccttcctcatgatttccaaccttaatactattagtaaccacaagttcaagggtcaaagggaccctctgtgccttcttctttgttttgtgataaacataacttgccaacagtctctatgcttatttacatcttctactgttcaaactaagagatttttaaattctgaaaaactgcttacaattcatgttttctagccactccacaaaccactaaaattttagttttagcctatcactcatgtcaatcatatctatgagacaaatgtctccgatgctcttctgcgtaaattaaattgtgtactgaagggaaaagtttgatcataccaaacatttcctaaactctctagttagatatctgacttgggagtattaaaaattgggtctatgacatattgtccaaaaggaatgctgttcttaaagcattatttacagtaggaactggggagtaaatctgttccctacagtttgctgctgagctggaagctgtgggggaaggagttgacaggtgggcccagtgaacttttccagtaaatgaagcaagcactgaataaaaacctcctgaactgggaacaaagatctacaggcaagcaagatgcccacacaacaggcttattttctgtgaaggaaccaactgatctcccccacccttggattagagttcctgctctaccttacccacagataacacatgttgtttctacttgtaaatgtaaagtctttaaaataaactattacagcctcgtgc

SEQ ID NO: 20737 - DNA, 1289 bp, Homo Sapiens
ttacagctctctgtttctgtaatgcagaaaaatctgaacagcccaccttggttacagctagcaaagatggttacttcaaagtatggatattaacagatgactctgacatatacaaaaaagctgttggctggacctgtgactttgttggtagttatcacaagtatcaagcaactaactgttgtttctccgaagatggttctttactagcagttagttttgaggaaatagtcacaatatgggattctgtaacatgggaacttaaatgtacattttgccaacgagctgggaaaataaggcacctttgctttgggagattgacgtgttcaaagtatctacttggtgctactgaaaatggcattctttgctgttggaatctgctgagctgtgcattggagtggaatgcaaaattaaatgttagagttatggaacccgatcctaattcagagaatattgctgcaatctctcagtcttcagtgggttcagacttgtttgtatttaaacctagtgagccaaggccattgtatattcaaaagggtatctccagagagaaagtccagtggggagtgtttgttccacgagatgtccctgaatccttcacctcagaagcttaccagtggctaaatagatcccagttttacttcctaacaaaatcacagagtttattgacattcagtacaaagtctccagaagaaaaactcacaccaacaagcaaacagctgctagcagaagaaagtcttcccacaaccccattttatttcatattgggaaaacacaggcaacagcaggatgaaaaactaaacgaaactttagagaatgagctggtacaactacccttaacagaaaacatacccgcaattagtgagcttcttcacactccagcccatgtcctgccatctgctgctttcctgtgctccatgtttgtaaattcattgctgctgtctaaagagactaagagtgctaaggaaattcctgaagatgtagatatggaagaagaaaaagaaagtgaagattcagatgaagaaaatgattttaccgaaaaagtccaggatacaagtaacacaggtttaggagaagacattatacatcagttgtcaaaatctgaagaaaaagaactgagaaaatttaggaaaatagactacagctggatagctgccctttaagccttggagatggggaggatccttggactttgtgtttttgattgtatgttgatattctaaaaacatctattttaatgttatttctgttctaaaaataagataataaatattaacaaactttgctttttt

SEQ ID NO: 20738 - DNA, 1200 bp, Homo Sapiens
gcacgaggttttaagacaaaacactggagatgatcagacttcctgaatagagaaagcttatgtgctttgttacattggggaacaactgaagagattcttgactcaaccttttagagcttagtccatgttgcaacgaggagtgttggttttgtttttccacttaaaaactttatttataaaaaggaaaagtagttttcatattaagtttttatttcctttccagcagttggggctagaaagtatgtgttggcactagaaacattgtcaagatttgttctgtggtgtaggtatgcacattccataggtatgcacacggccatgtaatatcagtatatcccaagttaatgaaagtgttcatttacataggtaatggagacctttgcattttgatccatagaacataggaggatgttcttagtctgtctcaaagctctatatgtttacatattatttctgtagattgttttcaggagaaagttttgcttctatggtaagagtgagcactttggcttatgtataagttagaaataattgttagtttttaatatgcacttcgtggggaaatttcttagacgtatgcaagcaagtgaaaacaattagggccagtggtattaactactttataaaattttatttttgtttgtaagaagtcatctacttaaggcccagttaatataagtggaatcatcatagtttaaggaatacccagagattgctgctgttctatttattttacagaaagggtagctagattgaaagctcttcagtggaccttgagctaatagatcttttaccactaaaagagcattattctcatgtcataatgagaataataatttacatacttggcataataaatgcctaaaagacattttattttctgaatctatttttttcttgctataatggggatattgtaaattatgcatttgtattaatggtatttcttaaagcaatctatgtaactgtaaattaaaccaatctacaaactattgtaggcatctgtaaattctgttgtaggtattataaactttgttgaagtcttaatcagcagattatgttgtgaatatatttgtacattgttaaaatagtttttaagattatttgtttaattgaataagtgtcttattggagtgatagctttgagggtgcaaaactttatatttgtataaaattctactatttacaagggcaaataaa

SEQ ID NO: 20739 - DNA, 1029 bp, Homo Sapiens
caggaattcggcacgaggcttcactgttttttctcgaacagaacacttaagccctctcaccgtcatcaccaaagagactgaaaaagctgccccccagagacattgaagaaggcaatgtgaagatgctgggcatgcagatccccataaagaatgttgagatgctggcctctgttttggttgccattagtgtcacccttctgctcgttgttctggctcttggtggagtggtttggtaccaacatcgacagagaaagctacgacgcaataggaggtccatcctggatgacagcttcaagcttctgtctttcaaacagtaacatctggagcctggagatatcctcaggaagcacatctgtagtgcactcccagcaggccatggactagtcactaaccccacactcaaaggggcatgggtggtggagaagcagaaggagcaatcaagcttatctggatatttctttctttatttattttacatggaaataatatgatttcactttttctttagtttctttgctctacgtgggcacctggcactaagggagtaccttattatcctacatcgcaaatttcaacagctacattatatttccttctgacacttggaaggtattgaaatttctagaaatgtatccttctcacaaagtagagaccaagagaaaaactcattgattgggtttctacttctttcaaggactcaggaaatttcactttgaactgaggccaagtgagctgttaagataacccacacttaaactaaaggctaagaatataggcttgatgggaaattgaaggtaggctgagtattgggaatccaaattgaattttgattctccttggcagtgaactactttgaagaagtggtcaatgggttgttgctgccatgagcatgtacaacctctggagctagaagctcctcaggaaagccagttctccaagttcttaacctgtggcactgaaaggaatgttgagttacctcttcatgttttagacagcaaaccctatccattaaagtacttgttagaacac

SEQ ID NO: 20740 - DNA, 1488 bp, Homo Sapiens
tcccccgggctgcaggaattcggcacgagggctacacacgccatgaacctgtgggggtgtgcgggcagatcattccgtggaatttcccgctcctgatgcaagcatggaagctgggcccagccttggcaactggaaacgtggttgtgatgaaggtagctgagcagacacccctcaccgccctctatgtggccaacctgatcaaggaggctggctttccccctggtgtggtcaacattgtgcctggatttggccccacggctggggccgccattgcctcccatgaggatgtggacaaagtggcattcacaggctccactgagattggccgcgtaatccaggttgctgctgggagcagcaacctcaagagagtgaccttggagctgggggggaagagccccaacatcatcatgtcagatgccgatatggattgggccgtggaacaggcccacttcgccctgttcttcaaccagggccagtgctgctgtgccggctcccggaccttcgtgcaggaggacatctatgatgagtttgtggagcggagcgttgcccgggccaagtctcgggtggtcgggaacccctttgatagcaagaccgagcaggggccgcaggtggatgaaactcagtttaagaagatcctcggctacatcaacacgagggaagcaagagggggcgaagctgctgtgtggtgggggcattgctgctgaccgtggttacttcatccagcccactgtgtttggagatgtgcaggatggcatgaccatcgccaaggaggagatcttcgggccagtgatgcagatcctgaagttcaagaccatagaggaggttgttgggagagccaacaattccacgtacgggctggccgcagctgtcttcacaaaggatttggacaaggccaattacctgtcccaggccctccaggcgggcactgtgtgggtcaactgctatgatgtgtttggagcccagtcaccctttggtggctacaagatgtcggggagtggccgggagttgggcgagtacgggctgcaggcatacactgaagtgaaaactgtcacagtcaaagtgcctcagaagaactcataagaatcatgcaagcttcctccctcagccattgatggaaagttcagcaagatcagcaacaaaaccaagaaaaatgatccttgcgtgctgaatatctgaaaagagaaatttttcctacaaaatctcttgggtcaagaaagttctagaatttgaattgataaacatggtgggttggctgagggtaagagtatatgaggaaccttttaaacgacaacaatactgctagctttcaggatgatttttaaaaaatagattcaaatgtgttatcctctctctgaaacgcttcctataactcgagtttataggggaagaaaaagctattgtttacaattatatcaccattaaggcaactgctacaccctgctttgtattctgggctaagattcattaaaaactagctgctcttaactt

SEQ ID NO: 20741 - DNA, 1325 bp, Homo Sapiens
gaattcggcacgaggcattccccttatagaatacatgtcatggacttgggggaaaccagtactttgaatactctgctcaacatgaaattcggcacaacatccagaaggaattatgtcttcatgctgctcaaggtctcgttcagctgaaggcatgtacctacaaaggtcacaagacagttgtcactggagagcagatatgggagatccagaaggatcaacttctatacaatccattcttaaaaatgtgcctttcagcaaatggagagcatccaagtttagtgtcatgcaacccatcagatccactccaaaaatggatacttagccaaaatgattaagtgttccttaaaattaagttgaaaaaggaaatattctttctcataaaactgtgactaggcatacactgtagtttttgaaaattatgcaaaagcagctaaatgtaacttattccaagtgcatttttcttatttatatctttatgtagcactactacagaaattctgcaagtttctgtttcaaagcacaataactagtaataccaaagactatttcaaaatgtccagatgtaggggaagagatgtttacagtatgatgaaaataattttccaagtaaagtgatgtttgtgtgttttgtacacttagggatatatatatatagctacattcacacactcacaatttaaaatatttcccctagttttttggggggataggaagaaagatttgttactgtatttttttaactacataaaaatagatcaataaatgtcagcattggcctctgtgtacaaaccaagagcttttacagatccagaatttattagtttaaaatgcaggtgaacttttttttgcgtttggtttacttgtctgtcaaatgtttccttaaacatgaaactgaataaggagaagagtatttttaacacttaaatttcttggcaaattttaaaacattttttagtctgtaatacactccacttgaagcacttaagtcttccttaaatgacttttcttaagtaatgatactgtgtgttttcccaaagcacttttaaaaaaatttttataaattactatctgttgaaaaggtgtccttttcctttcttctagtatttttttcttaccaaaattcactaatcttgaatgtttgtgatattaaatttcaaatgcagaatacttgactcatttaaagctaaattttgttactgattcaattataattgtaatggatttttgactttgtaatggattcttttcatcaaaaagccttatttttttatctatgtggaaaacacaataaaaaatcctcaacactattgtaaaaaacctcgtgc

SEQ ID NO: 20742 - DNA, 1238 bp, Homo Sapiens
  misc_feature (221)..(229): n is a, c, g, or t
ccccgggctgcaggaattcggcacgagggctgttccttttcacctaactgttcagtcattctggttttcaagcagtgctttatctcatgtccttgaatatagttgtgtaactttattttttaggtaataattagaacagttcccttcagaggctgcatttgccttcttctgccacctaaatattacttcccttcaaatctgcctttgaatcatcatttttnnnnnnnnnttaacatgtttttgttgtagttatcttctggggtttcaattcctcagaaacaacttttttcacaacggaaaggaaagaacactagtgttctttcagtaaagtacaaagtgtttattttacaaaagagtaggtactcttgagagcaattcaaatcatgctgacaaggatactgatagaaaaagtgatttcttcttattataaagtacatttaaagttcaaggactaaccttatttatttgggaaaggggaggaggaaggaaatgatatggtacccagacactgggctaggctgcaactttatctcatttaatactcccagctgtcatgtgagaaagaaagcaggctaggcatgtgaaatcactttcatggattattaatggatttaagagggcatcaatcagctcaactcaagatttcataatcattttttagtatttagattgtgcctcaaaagttgtagtacctcacaatacctccactggtttcctgttgtaaaaaccttcagtgagtttgaccattgtgctcttggctcttgggctggagtaccgtggtgagggagtaaacactagaagtctttagtacaaaactgctctagggacacctggtgattcctacacaagtgatgtttatatttctcataaagagtcttccctatcccaaggtcttcatgatgccagtagccatatatgataaattatgttcagtgataacttagttatcagaaatcagctcagtggtcttccccgccatgattcacatttgatgagtttttaaaaatcaaagtgattttgaaaatctctaatggctcagaaaataaaaacatccagtttgtggatgactatatttagatttctctagactctagtggaagacctttggaaaggccatgccaaccgtgcttgtactgctagaagcactttatgtttcctttttgggtgaaatggatttatgtgagtgctttaaacaaatagcaatacttatagactgaaataaaatgaaacttcaaata

SEQ ID NO: 20743 - DNA, 1194 bp, Homo Sapiens
  misc_feature (214)..(229): n is a, c, g, or t
  misc_feature (881)..(890): n is a, c, g, or t
  misc_feature (1028)..(1044): n is a, c, g, or t
aactgacaaacaaagtcatatttattgaatgcgtttattttaacaaccaaaaaattctaacagcctaacaatgcacataagttaaaaattaattatcacttagtgataacaaagatagttgatttacatggaaaaaagaacatttacaatatgttaatccttattcacattgttgataccgcaataaaacacaatttgtttttttcatttcacnnnnnnnnnnnnnnnnggcgggaaattgtgctttgtcaagaggcactacaagagaaagtttcttcttccaaatagatattatatgacagatattgaataatagacatatatgcatgtaattcgcaaagatctggcaagaccacaggctaaaatgcccacagattcacttagaaccactgcaaacttggcagtgaaattaaaaaataaaaggcaagacttagcattgaaaaatacctaataaatttttggttgaagtgtaaaagataccaaatgcggatgccatcgatagatgaaccaccttgtaagagcttggcaaaatcagtttccattacgtgtacagagtgaccttcagcaacagtgtaagaagacaatttggaaagagtaactcggagatcaggaagcagcaaccatggactttctgattaaagctgcagcatactacagaaataggaaggatggggccagggctaactgcaaacaaccatccttttgcaaaggtatatgacgcttatgtcaagataatttttaaacatcattatttgaaaaagtacaggaaaatgtccctttaaaaactccagaggttactgagcagctagaattagcttgtattgcaacatgtcttctccctgtatattgtaagttctgagttaatatctacacatagaggnnnnnnnnnnaactcctaccttttatacctttcaaatatataaatagtattaacagttatattacaatgtttgtgtagtaaacagaaaataactttcaaagtgatattgcatgaggtctttgacaaggttttgtgaaagcacaactcnnnnnnnnnnnnnnnnntccaaccatgtgggactgtttaatggccagtttaaagcatggattacgttcactaggccagtcctgaatgtgaggtctcctcttgcaattactgtaagtagaagtggaaagtaatgcttctggtgtttctcataggaagccgcctcgtgc

SEQ ID NO: 20744 - DNA, 1092 bp, Homo Sapiens
gcacgaggactcacaatatccaactaaaaattacgctatctagaattgtaccaaccaaaatctcgtattggcagatcttgacaggctggacctgcaagatgtggcttgaattttaaccatttattacataatctctagtgatcatgcatctagttatcataagaaataatttaaaaggttttgttgctgaaagcagtaagtggtgcagtaaaatacttaagttattcaaagaatgttatctttcttgcaagagtaatttaagcacatgggaaagattctagactttttgtttcttgcaacaacagtgccctctgctgctagaaacctttttctacttactatcatttttattgtggcttgagctcagtcaatctggtgcagatgaggctggacaactactaaccaataaaatgaggagtttgtacaaaagttaaatggaacattataattattttaagtaatgttaattgaaaaaattttttctttttgacaatataaaaaacattttaaatttcctagaaatgtcttcagggtaatgccaatttaagatctctcttaacttgtggccaagaaattctagattttccagctgactttggtataatatatatttatcaggaacttctctcagcagagagtacccattcttcgagttcaaagcacaattttaaacatgtaaaatggatatataatttgccaaaggtaattaatttattctttttttcttaaagaagaaaaagacattggttgttgttacaaaaagtctaaattactgttggttgaaacacagcagctgtggagttcagtccaggcatgaagactaaatctgctttaccaagtaaggtgtaaggttgcatgtttcagtcctctaccatcctgcactgtgagcagcactatacctgtgcgttgtctgaaagccttccgtatattctccagctaaatggtcgtctggtagcctttgcatttaacaaactagcatgaggctttttatatctaaatgctacgtgatagacaatttcagctagccacatattgtatgtatgagattcataaagactttcattcatttcattttcagacaactgaaatttg

SEQ ID NO: 20745 - DNA, 1410 bp, Homo Sapiens
ggctgcaggaattcggcacgaggcacaccttcatgttcccagattgcagtaaagacaggcataagaaattatgaaagtattaatttggggaactaacaaatgtccatgaaatcttcacaatttatgtttttctgctgtggcttcagcaggttgcttttctcttctggaatacgaaaaagagtaacttttttatgattggcatatgagaatatagtctaagtactttgaaaacgtgtttatagttcatgtaagagacattctttggtaattgggtagcttatgtagattttaataggattccattgtaaatgaaagttaatcttaggaattaaatgaatccttagggaaatttgtactctatctttacaaaataatatcctttagaaatgtctcaacatagggtagtctaggcttccaagagattaaaattaatgaaagtttctgtaatgtatgtctgccagtaatctgtggtagtctagaaagtagggattataaaaatttgttgtttgcatacacgcataaaaactttcctattattttttgtatttctcttatgctttcagatatgcaagaactgtacaggttgctttgatcgacacatcccatgtgtttctctgaactgcccagtacttttcaaactctcccgagtaaatagagaattgtccaaggcaccatatctccggcagttattagaccagttttaaattgtcaatatcacagtattacaggtgctatttttttcagtgcttaccactaaactgttgtgcatggtgctttttaactttcatcgagtcaaggatgttcactgtctgttatctgaagactatgaagacttctatgctaaccgaattaaaatgtacttgttgatctctgaatagctcacttcttacaatgtacaaattcctcattctgtcaccttttaaacattgttttataatgcaggtgttggatttgctccagtatgtgtaccatcttgtaaattcatttgagtagatcatgtttacttcccagtggaaggagcactgaaaacctcttaaagaaaaagcatttgtgtgttttccttgaactgtctgtatcaagacgtgttacttcgagatatccattcactttataattttgactgcaaaatattttgtaaatacacttttttacttttcaaacgagtaaaataatgtgcaatgatttttatacaaatgattttcaagttgtttggtatatttcctctaggttttgcttgactcaaagtagatcgttattttgatcaaactgtgcaaacagtagtaccacgtgtagcattttgaaacattattttttaaaaaatgctgtcttgctttagctattaatggggcattgtgaggaactgtgcaaagacatttttgttacaaacctgtgggcctgttgcaatacttt

SEQ ID NO: 20746 - DNA, 1309 bp, Homo Sapiens
  misc_feature (682)..(691): n is a, c, g, or t
gcacgagggttggttatttatttacttgatacacttcattttttagagtagctttagggttacagaaagttgagcaaaaagtatagagaattctcatataaccctttcccctcccatcttccacaggctccccaatcattaacatcttgcatcattatggttcatttgttacaattaatgagccaacagtgatacattattattaactgaagtccagagttgacattagggtttactctgtgttttccgttcactgttttccattctctgcgttttgacaaattacagtaccctagagagtactttcactgccttaaaaatcacctctctacctgccatccctcctttcccctcaactctcagcaaccactggtcctttcactggctcaatagttttgcctctcccaaaatgtcatgataattgcaatcatacaaaatagaaagccttttcagattggttttcacttaacaataagcatttagggtttctccgtgtcttttaatgacttgatgtccaattcctttttatcatctacctgaggactgtatcctgcaatcctgctgtaattgcttattaatgtcagcagggtttttgttatttagaattctctacaaagacaatcatgttacttgtgaacaaagttgtatttcatcctttcaaatctatgtgcattttatttcnnnnnnnnnnaacactgcattatatagcacttccagtacaatgctgaaaagcagtggtgtggtgttccttgccatgttcctgatcttagtaggaaagtgtctagttggaaacatcaaggataatgttagctgtagggttttttgtagtatgttctttaccaacttgagtaagttctcctgtattccttctgtgttgagaggttttaacatgaatggatattggattttgtcaaatgctttttctgtacctattgatatgatcgtatttcatctttgagctgctaatgcatgcaatggattacactgaatatcaaatgttgaacaagccttgcattcctgatttgctaatattttgaggatttctgcatctgtgttcaatggaaatattgatctgtagttttcctttcttgtaatatctttgcctggttttgctattagggtaatactggcctcacaaaatgagttgggaagtgttatctctgcttttattttctgaaagagatggtagagacttggtatcatttctaccttaagtatctcaaaaacacatcagtgaacccagctggtcctggcactttgttttggaaagtttcattattattttttgagatgcagtctcattctgtca

SEQ ID NO: 20747 - DNA, 909 bp, Homo Sapiens
  misc_feature (488)..(507): n is a, c, g, or t
gcacgagggaaggaagctcctgcccctcctaaagctgaagccaaagcgaaggctttaaaggccaagaaggcagtgttgaaaggtgtccacagccacaaaaagaagaagatccgcacgtcacccaccttccggcggccgaagacactgcgactccggagacagcccaaatatcctcggaagagcgctcccaggagaaacaagcttgaccactatgctatcatcaagtttccgctgaccactgagtctgccatgaagaagatagaagacaacaacacacttgtgttcattgtggatgttaaagccaacaagcaccagattaaacaggctgtgaagaagctgtatgacattgatgtggccaaggtcaacaccctgattcggcctgatggagagaagaaggcatatgttcgactggctcctgattacgatgctttggatgttgccaacaaaattgggatcatctaaactgagtccagctgcctaattctgannnnnnnnnnnnnnnnnnnncttttcaccatatacatgcctgtctgtcaatttctggttgggctgggaggccacacacacacactgacatgacagggcttgggcaagactcctgttctacttatccttttgaaatacctcaccctgccactccaccatgtatgatcattccagagatctttgtgactagagttagtgtcctaggaaaaccagaactcagaacttgcctccatggttgagtaacaagctgtacaagaaccccttttatctctggaagaggctgtgtatgaaaccaatgcccagggtttgaagggtgttagcatccatttcaggggagtgtggattggctggctctctggtagcattttgtcctcacacacccatctactatgtccaaccggtctgtctgcttccctcacccct

SEQ ID NO: 20748 - DNA, 836 bp, Homo Sapiens
  misc_feature (372)..(389): n is a, c, g, or t
gcacgaggggcaatcttcagatatgtcatcctcagaatgtgaagctgtttgagattaaaatttgtgtcaatgtttgggaccatcttaggtattcctgctcccctgaagaatgattacagtgttaacagaagactgacaagagtctttttatttgggagccagaggagggaagtgttacttgtgctataactgcttttgtgctaaatatgaattgtctcaaaattagctgtgtaaaatagcccgggttccactggctcctgctgaggtcccctttccttctgggctgtgaattcctgtacatatttctctactttttgtatcaggcttcaattccattatgttttaatgttgtctctgaagatgacttgtgannnnnnnnnnnnnnnnnnaaaccatgaagagccgtttgacagagcatgctctgcgttgttggtttcaccagcttctgccctcacatgcacagggatttaacaacaaaaatataactacaacttcccttgtagtctcttatataagtagagtccttggtactctgccctcctgtcagtagtggcaggatctattggcatattcgggagcttcttagagggatgaggttctttgaacacagtgaaaatttaaattagtaacttttttgcaagcagtttattgactgttattgctaagaagaagtaagaaagaaaaagcctgttggcaatcttggttatttctttaagatttctggcagtgtgggatggatgaatgaagtggaatgtgaactttgggcaagttaaatgggacagccttccatgttcatttgtctacctcttaactgaataaaaaagcctacagttttt

SEQ ID NO: 20749 - DNA, 1246 bp, Homo Sapiens
  misc_feature (184)..(195): n is a, c, g, or t
  misc_feature (1186)..(1195): n is a, c, g, or t
gcacgaggcacagactagacctttcttatcctcctcctagagttttgacttgggactctagtgttaagatgatgagcccgtgcatcaggtccttctgcactttggtggaagtctcccagggtaggtttcctatttgaaacagtggaatcatgtttccagtgataaagtttaatgacctcatccnnnnnnnnnnnnctcatctgccatttgtgtgtcttaaatgggttttaattgcatgaatgtggctaatgtggttctcaaaaattggtcagtatggcccaacatagcttctgctctgtcttactgactcaatacctttaggatttgtatcaaagtttggatactagtgttagtggtggtgtcaccactacttaattgggagataatgaaaccaatcatggatgctgtttttattgggcatgtcatctaagagaggagaaatagctgggttttgggtctaattatgaataaggactgattcagaaaacgagtttatggtaggtagactaaagtttcacatcagactgtaccattgtgatttagacctatctaaaattcagagcatatcatctgggctacctcagggtcaccacccatgtattgggcttagtcaggattgacagatacattctcagctggcctgtcatataaaacatactgtcattgagcttaagctccgcttgttctgaggtttcacctccatgtgtttcattggtgcaaaagtggatctcttagttggtcacttaattctttctttttcagaaagatagtatgttcactggtatatttggtcactcttagaaccttccttcacattgttttttatgggacccatgaatggttagcctttcttttctattgtagaaggaaataaataggagtaaaaagaccattgtagtaaataagttcaaggggaacttgggaccagaaaccactgttatgtacaaaaaaatggcaaattcaataaactcaaatttaaaataatttttaaattaacagttatgataaattttatattttatacaaatagattgcttagaatggttctcaagaattataagagaaatgaactcacagtacaaaaattttataattactatacttgtgttttgtttgggggctgggaaatgtatttttacattgtagccaatcattttatatttgtcaatttaaatcttatgggtcnnnnnnnnnnatctctcttgatgtcagattttatagtctttttaaataaatccatttaatt

SEQ ID NO: 20750 - DNA, 1176 bp, Homo Sapiens
  misc_feature (988)..(996): n is a, c, g, or t
gcacgaggtactacccagaagtttattgtgaaagtaaattaaacaaacaaacacacagtatggccaatggtggcaaaagcaatctggtagcttaaggcaagttttaatggagatgaatttagaaaagatgatgcaatgatgtaattttgtttaaatatagattatgaaaaaatatcaaattgcatcaataacttaatagaagtagttttcaaagcctgtactactggagaaaaagggctcatgatcttaatgccagcattaagacagacagaagcagcatggtgctaaatgacagaaaaatccagtatttacattaggatggtaacaggaacatttaagagcatttgatcttatttactggtggaccgaaagcccttagctagacaatagaggaaaatgtaccatcatcatgttatttaaaaaaatttaagtgcagaagtaaaaaaccaaggagctctgtaataaagtaacataaaacaccactgtaaggatcacttaaaaagcgattccctcaggggaaattagggcactgagtgtgtaaacatgtgagctgtacaacaccaaaaccaaccaaattcattcatagtacttatagttatgcaagatcagcatggcctttaatgacgcattattgtttgtaacaatttaaacacactcctttccatgcataacttcaaatatataacaaatacttttatttgatacaggatatctgtttatgaaataagacctatatacaatgaaagtaacacctccctcatcagtcaagtacagttatatgctttttaaatgcaatgaccttattcagacttcagtccattttctgaattgactgtgtcagtttttcaccctttaaaataatgccatttaatgataaaatacatttttcaaaaattcagaaatgtagtaacatttaataaatgtgaccatgaaaaatatttgtaaggaggtgccaaatgacttagcactgttttccactctgtatctnnnnnnnnngttgcaatttgacagtaagcctatttaaaaaatattcttacattaattcatctcaaaaggttctattaatagtccttttgcaaaataccatatatataactgtgaacgttttttccagaattaatggaagaaaatgcatcctctgcacagatgaacattttctctctaaaaccctcgtgc

SEQ ID NO: 20751 - DNA, 776 bp, Homo Sapiens
  misc_feature (294)..(304): n is a, c, g, or t
gcacgagggactgatgctagtccttgttgtattttgttgggctgtccttgtgtattttcaccccagcctgtagtcctcctcacttcaaccccagggatttgtggggagcaagggtagccaatggcagagggggttggggctgggactctggaggctcctccccttctttctcttccttctgcctcccccgtgcccccagctgctcttgtcactgtctctgatgggtatttgcctggctttgttgcttctctatctgtatttagctgcagtgatcctttagctggttggctcagnnnnnnnnnnntgtgctttaggtgccctgtaatcctgggcatcaagggaatccatccttcccctttttgatatgttctccccgtacttccagatttattgttatggctcccagtgggtattggcgattcttgtgatgcagggcctcagtcagtgtccagccatgcataagggagaggatagtgtgtacctgccctgccctctgctatgaaggtctctgccttgtggatcatgggactccccttggaggatctgtgcaaaggggggctgggcacaaaggagaatgtcttatttgggagggcaggaagcaaaggaactggacaggtattggtgggctggggaacggaagtttatcttggatacccttgaagaggctgggtctcttccatgaagatcgaaaaggggaccctgctttccaattctctcttccattcctcgagctactccagggcttgaagatgctcttggtctgtgggtccagtgtt

SEQ ID NO: 20752 - DNA, 2270 bp, Homo Sapiens
  misc_feature (2079)..(2087): n is a, c, g, or t
cgcgtccggtgcgggtttcggttggaggactcgttggggaggtggcctgcgcttgtagagactgcatccccgagacgatggcggagggagataatcgcagcaccaacctgctggctgcagagactgcaagtctggaagaacagctgcaaggatggggagaagtgatgctgatggctgataaagtcctccgatgggaaagagcctggtttccacctgccatcatgggtgtggtttctttggtgtttctgattatctactatctagatccatctgttctgtccggcgtttcctgttttgttatgtttttgtgcttggctgactaccttgttcccattctagcgcctagaatttttggctccaataaatggaccactgaacaacagcaaagattccatgaaatttgcagcaatctagtaaaaactcgacgcagagctgtgggttggtggaaacgcctcttcacactaaaggaagaaaaacctaagatgtacttcatgaccatgatcgtttcccttgctgcggttgcttgggtgggacaacaagtccacaacctgcttctcacctacctgatagtgacttccttactattgcttcctggactaaaccaacatggaatcattttgaagtacattggaatggccaagagggagataaacaaacttctcaaacaaaaagaaaagaaaaacgaatgattcatctgctttaatcagtgtgattaatgcagcacccattgccccgggaaccgtttctgctgtactatctggatactaaaatgttacggaagtagctctttgttctccctcactctgcccttagttaatagaaattcagactcgccaagtaaggcttcgtgcatagtgtcttcatgtcgcgtatagttgagcgcgttcttagcagttggcttcatggacaactcattagtgttttgacttttcttacccagcgttaattgaattcttgcttttagacaacttcctttttgtagtggtgaaccttgccctttagtacagttcaagtgaatctggataattgttcatctttgctttagcttagataccatgtagtggtctgtggctacaggaagctggttctgtctgcttccacagtctgcttaaaaaactgtctgacttcgtgaatatagagaccaagtttaccacttctgatgaagagaccaattaagattcattcctcattctgtttctttccagtgggagaagagtccccatgaaataagatgaaactgattccatgcactagtacatgtaggcttctcccttgtgcaaagcttagcaatttgtaggaaactttgatctttttgtccaagaaaaggaatgtctgacaggcttaagctttcgtccccttgcacttagactcgaagttagtaaatccttaaaggctttttaatagcagacttccaaaagattgcatttaggatttctagcatgcttttaatttcagattttcagctgacattagctatagtatacagtaggttaagactcatgtctatgactttcactctaagactggcaaaaggacagcagtcttctatgtttagtcaatattcatttcagtagaagataatcttatctaatttttgagaccagaataagccttttaaggtaaacctcaaaattatcattttatggtaatactgaccattttagtcccctaggtttgacatgggagatagtgactacactggtgtctgacttttttcctagagatttctccctgaaaaatacaagggctgttggtgagagcagacttgaggtgatgatagttggcctctggtctacaaagatttcataactccttggaaagcttcttataatcattcttaacttcttggtagctagaaatttagagtagttgaaatctttaggaatgaacttctgagggccaaaaaatgtgactgacgggaacaattcttaaactgattaactagctgtaatatagtttttgtgaatttattgcactgatgttgtaccttgtggtatatctgtccctattaaataagtgttgttttctcctctttaatattgctgtgaacagtggtgcccattgtagcatatgtttgannnnnnnnnattattttcataagaaaactacgttaattttaccttactttcattgtaaataagccgtctcctacctggattttttgtgtgcatacatattctactgattacctacttttgcagtttaatcttgtattatttcttctacttggtttgttgtaaaggggaaaaaataagataggctggaatctt

SEQ ID NO: 20753 - DNA, 1627 bp, Homo Sapiens
  misc_feature (1308)..(1322): n is a, c, g, or t
gcacgaggtataggacaacccccagcctggagcataagagatcaagatccaatgctaaactccaatggttcagtgactgtggttgctcttcttcaagccagctgatacctgtgcatactgcaggcatctaaattagaagacctgcgagtaaaactgaagaaagaaggatattctaatatttcttatattgttgttaatcatcaaggaatctcttctcgattaaaatacacacatcttaagaataaggtttcagagcatattcctgtttatcaacaagaagaaaaccaaacagatgtctggactcttttaaatggaagcaaagatgacttcctcatatatgatagatgtggccgtcttgtatatcatcttggtttgcctttttccttcctaactttcccatatgtagaagaagccattaagattgcttactgtgaaaagaaatgtggaaactgctctctcacgactctcaaagatgaagacttttgtaaacgtgtatctttggctactgtggataaaacagttgaaactccatcgcctcattaccatcatgagcatcatcacaatcatggacatcagcaccttggcagcagtgagctttcagagaatcagcaaccaggagcaccaaatactcctactcatcctgctcctccaggccttcatcaccaccataagcacaagggtcagcataagcagggtcacccagagaaccgagatatgccagcaagtgaagatttacaagatttacaaaagaagctctgtcgaaagagatgtataaacaattactctgtaaattgcccacagattcagagttggctcctaggagctgatgctgccattgtcgacatctgatatttgaaaaaacagggtctgcaatcacctgacagtgtaaagaaaacctcccatctttatgtagctgacagggacttcgggcagaggagaacataactgaatcttgtcagtgacgtttgcctccagctgcctgacaaataagtcagcagcttatacccacagaagccagtgccagttgacgctgaaagaatcaggcaaaaaagtgagaatgaccttcaaactaaatatttaaaataggacatactccccaatttagtctagacacaatttcatttccagcatttttataaactaccaaattagtgaaccaaaaatagaaatcagatttgtgcaaacatggagaaatctactgaattggcttccagattttaaattttatgtcatagaaatattgactcaaaccatattttttatgatggagcaactgaaaggtgattgcagcttttggttaatatgtcnnnnnnnnnnnnnnnccagtgttctatttgctttaatgagaatagaaacgtaaactatgacctaggggtttctgttggataattagcagtttagaatggaggaagaacaacaaagacatgctttccatttttttctttacttatctctcaaaacaatattactttgtctttcaatcttctacttttaactaataaaataagtggattttgtattttaagatccagaaatacttaacacgtgaatattttgctaaaaaacatatataactattttaaatatccatttatcttttgtatatctagactcatcctgattttta

SEQ ID NO: 20754 - DNA, 1006 bp, Homo Sapiens
  misc_feature (471)..(484): n is a, c, g, or t
gcacgagggtctttttgtttttagttctgctctagatcataattgtaaaaaatattaagtcataatctgttacactaaaatttgtcagccaaatgttagatgaaatgtctgcactgtagtctcagatcactgtcacgtatataaattgcttcttccttttaatttgtaaaagtactttacagtaggaaacgccagtaaacaacttttatactgttaaaaggcttttttccccttcctaaatgttttaattgtaccatagtgttttgctcactgaaaaagcttcttatggaccttgcaactttgttgctagcttgaggttgattattgtggttgtattgttcactgtgtgtagaaatagtatgagtaccatttcaatagactgttcagtttttagtattagccataacactggttagtatatctcagtagtttcatgaaacgtttcctgtattctaatctattttgaaacannnnnnnnnnnnnnaattgtgtcttacagtcaagtttgtagattttcataagccacaattttaaaagatgcagtaatcttccaacttccaatatttatccattcgttgtggacccacagattgcatctttaaattcataataagtttccttaactatcttatgtttctagtctttcaagcttagtgataaggtggaagcacaagaaaaatttcagtagaatacagtttttattttgtaaacactaatgtattaaacttgctatacattaaagcaaataatatatatttttatttgaattgtatatgtgaattggaagttataattagttgattttttcattttgttagaggtattttcactgaacaaggtcaattggttacctcagtattacagccaatatagtccaagggaccatttctccccgagtctcttacactttattgtgcgatgtccacgtttttgtgactcttcaagctgttggtgaggtgggacgaatgcacttgcttcctgtggcaataaagattttctgtgcctc

SEQ ID NO: 20755 - DNA, 928 bp, Homo Sapiens
  misc_feature (299)..(314): n is a, c, g, or t
aggggaatatcattgattatacggggaaggtcagggaagaacgaaccttgacttgcagtgcagtttcaccagatcgtgtagatctttattttagcccatgcactgtgggaggaaaattacctgtcttgactgccatgtgttcatcatcttaagtattgtaagctgctatgtatggatttaaaccgtaatcatatctttttcctatctgaggcactggtggaataaaaaacctgtatattttactttgttgcagatagtcttgccgcattttggcaagttgcagagatggtggagctagnnnnnnnnnnnnnnnngcccttttcagtttgtgcactgtgtatggtccgtgtagattgatgcagattttctgaaatgaaatgtttgtttagacgagatcataccggtaaagcaggaatgacaaagcttgcttttctggtatgttctaggtgtattgtgacttttactgttatattaattgccaatataagtaaatatagattatatatgtatagtgtttcacaaagcttagacctttaccttccagccaccccacagtgcttgatatttcagagtcagtcattggttatacatgtgtagttccaaagcacataagctagaagaagaaatatttctaggagcactaccatctgttttcaacatgaaatgccacacacatagaactccaacaacatcaatttcattgcacagactgactgtagttaattttgtcacagaatctatggactgaatctaatgcttccaaaaatgttgtttgtttgcaaatatcaaacattgttatgcaagaaattattaattacaaaatgaagatttataccattgtggtttaagctgtactgaactaaatctgtggaatgcattgtgaactgtaaaagcaaagtatcaataaagcttatagacttaaaaaaaa

SEQ ID NO: 20756 - DNA, 1441 bp, Homo Sapiens
cccgggctgcaggaattcggcacgaggcaagaatcaaaaactcttacacaggaagtagagaaaaaggaatctgaagatcatttgaaagagaacactgagaaaacggagcagcagccacagccttatgtgatggtagtgtccagttccaatggatttacttctcaggtagctatgaaacaaaacgaactgctggaacccaactctttttagttaatataccaaagcttatgaataattgtttgttaattgaacattttcaattatatgcagactgactgattctaagataaattctaaggaggtttctaattttgtaattgttaaaaatagagttaattttgactttgttagatgagggaggaaaactcaactgtttctctttgttatctaaatgtttcagaattcaatcgtgaaggaacaggcattttacactatgaagacattcttttgagatttttatttcagttgctatatcataagcatttttaaagtttcttttctaattttacattgtattagattttctgattcttttgtaaatacagaacttaaatagaaggcaacaggaaatttatataggaactattttcattccacttgtgtaagttaagtcttgactctttcaaatgcaaaaaacctattttatgctttgttaaaattatggtgtcacttagattgactttagttgactgcactatataatatagaactatgaatatgtagaataacatgaaaaattggaggtgctggtggtatggctgaccctgtttcagaagcaggatagtataaaagcatcagcctaagaatggcactcccactaactagctatgtaatcttgacctctttgggctttagttcctctcataaaaggaagagatgtattggattagactagatgatcaccactttctcttctagttctaatttttttaattctaatacctatattttcaagttatgtcaattaaatcattatcaggttatttcctaatgtaagaatagctaaaatgttgcagagaaataagtgacccaacaaaatttattcatctgttatgggtaagatctgccataaattcttcctaaataatttgttactaactctttaggccactgtgctttgcggtccattagtaaacttgtgttgctaagtgctaaacagaatactgctattttgagagagtcaagactctttcttaagggccaagaaagcaacttgagccttgggctaatctggctgagtagtcagttataaaagcataattgctttatattttggatcattttttactgggggcggacttggggggggttgcatacaaagataacatatatatcaaccttctgaaatgaaatgtttttaattactttttcactgtaataatgtactttaatgtcacaagaacaaatgtcttctgcaattttctagtataacaaaaatttt

SEQ ID NO: 20757 - DNA, 1130 bp, Homo Sapiens
  misc_feature (73)..(96): n is a, c, g, or t
gcacgaggaaaacacttttcctgagggatttctaaccatgtatctaatcctcccatttgggcagtataggtgnnnnnnnnnnnnnnnnnnnnnnnnaagaaaaaccttgaaacctttgacactgacagatgtgtttgcaaggatacggctgcagtattactaatttccatgtgtatctggaagtatttttaaatggcataccaaaatccagaagtttaaagatgcctataaaagtaaacaacatttatttaaaaagaactctgaatatgccttcttttttaattaaaaatatcttcgagacttgggtgtttgttaataactaataactggagtaagctacaggatctaaagcagccctttttacagtctagttaggagagagaaaataattgcaaatatccacttagaggcaaagaacaattttttattatcaaaaaggtttctgcacattgttgtggcaatattgtatctgtttagaaaatgggcttttccaaaagcaaacaaagataggttcctcaggtgaccaaaactgaaaatcaatatttccatgtttcattaatcaaggcataaaatacaattaaagcaaaatattttacattaaaatcttggttgtgtatttttttaaaagaagggaaatagtttagtttggggtggaaattaccagtgatttctatttttattaaaccattcactacaacaaataagtataaaaattccaattccacttttatacctatttatttgttgtagtgaatggtttaataaatggcagatttatgtccagaagtcactctattttgtcgtgtattaggggaacacattttgacatttttcgtaccaatcatcaatcatattcccttatcttgaagtttttgccttatattcaaaaagttcagtttgaattctcctttgccaggtgtgaggatttccgcaccttagagtcagcgcaaaacacgctgcaacttgaatcaagtcagcaacagagcacactatgggttagataagtccctgtgtagcaagttttcagaataagaaataaaaatctattcttagggtattaactgacttgacttgaactccgttggtttaccatgttagtaaactgtgctttctattattatcatctatac

SEQ ID NO: 20758 - DNA, 1125 bp, Homo Sapiens
gcacgaggcttccgtggagttaagggctccgtggacatctcaggtcttcagggtcttccatctggaactatataaagttcagaaaacatgtctcgaagatatgactccaggaccactatattttctccagaaggtcgcttataccaagttgaatatgccatggaagctattggacatgcaggcacctgtttgggaattttagcaaatgatggtgttttgcttgcagcagagagacgcaacatccacaagcttcttgatgaagtctttttttctgaaaaaatttataaactcaatgaggacatggcttgcagtgtggcaggcataacttctgatgctaatgttctgactaatgaactaaggctcattgctcaaaggtatttattacagtatcaggagccaataccttgtgagcagttggttacagcgctgtgtgatatcaaacaagcttatacacaatttggaggaaaacgtccctttggtgtttcattgctgtacattggctgggataagcactatggctttcagctctatcagagtgaccctagtggaaattacgggggatggaaggccacatgcattggaaataatagcgctgcagctgtgtcaatgttgaaacaagactataaagaaggagaaatgaccttgaagtcagcacttgctttagctatcaaagtactaaataagaccatggatgttagtaaactctctgctgaaaaagtggaaattgcaacactaacaagagagaatggaaagacagtaatcagagttctcaaacaaaaagaagtggagcagttgatcaaaaaacatgaggaagaagaagccaaagctgaccgtgagaagaaagaaaaagaacagaaagaaaaggataaatagaatcagagattttattactcatttggggcaccatttcagtgtaaaagcagtcctactcttccacactaggaaggctttactttttttaactggtgcagtgggaaaataggacattacatactgaattgggtccttgtcatttctgtccaattgaatactttattgtaacgatgatggttacccttcatggacgtcttaatcttccacacacatcccctttttttggaataaaatttggaaaatggaaatgaa

SEQ ID NO: 20759 - DNA, 1526 bp, Homo Sapiens
cgggctgcaggaattcggcacgagggttccaagtcatggccaattccagaaattataaatcagaagaagaatttattcatattaataacaaactgcgtcggggagacataattggagttcaggggaatcctggtaaaaccaagaagggtgagctgagcatcattccgtatgagatcacactgctgtctccctgtttgcatatgttacctcatcttcactttggcctcaaagacaaggaaacaaggtatcgccagagatacttggacttgatcctgaatgactttgtgaggcagaaatttatcatccgctctaagatcatcacatatataagaagtttcttagatgagctgggattcctagagattgaaactcccatgatgaacatcatcccagggggagccgtggccaagcctttcatcacttatcacaacgagctggacatgaacttatatatgagaattgctccagaactctatcataagatgcttgtggttggtggcatcgaccgggtttatgaaattggacgccagttccggaatgaggggattgatttgacgcacaatcctgagttcaccacctgtgagttctacatggcctatgcagactatcacgatctcatggaaatcacggagaagatggtttcagggatggtgaagcatattacaggcagttacaaggtcacctaccacccagatggcccagagggccaagcctacgatgttgacttcaccccacccttccggcgaatcaacatggtagaagagcttgagaaagccctggggatgaagctgccagaaacgaacctctttgaaactgaagaaactcgcaaaattcttgatgatatctgtgtggcaaaagctgttgaatgccctccacctcggaccacagccaggctccttgacaagcttgttggggagttcctggaagtgacttgcatcaatcctacattcatctgtgatcacccacagataatgagccctttggctaaatggcaccgctctaaagagggtctgactgagcgctttgagctgtttgtcatgaagaaagagatatgcaatgcgtatactgagctgaatgatcccatgcggcagcggcagctttttgaagaacaggccaaggccaaggctgcaggtgatgatgaggccatgttcatagatgaaaacttctgtactgccctggaatatgggctgccccccacagctggctggggcatgggcattgatcgagtcgccatgtttctcacggactccaacaacatcaaggaagtacttctgtttcctgccatgaaacccgaagacaagaaggagaatgtagcaaccactgatacactggaaagcacaacagttggcacttctgtctagaaaataataattgcaagttgtataactcaggcgtctttgcatttctgcgaaagatcaaggtctgcaagggaattcttgtgtgctgctttccatttgacaccgcagttctgttcagccatcagaagagagacaaggaattaaaaatttctttttaatcctgttacc

SEQ ID NO: 20760 - DNA, 1289 bp, Homo Sapiens
  misc_feature (352)..(361): n is a, c, g, or t
aaaaatatacagttttaataaaaatattaaaataatcattacacttcctctcattgcaaaaaccatgaaaaaatatgccttttgtaatcaaagtaattttttatcatgcaaaaaagtattttgttatgacattcgtaagtggagactgtatttcaaaacaagtttatacaaacttcaaaaggtctaaagtcaaagggaaatatatttaaatatgattagttacatctaatgcagctggcatactcttattcccagtttaaaaagtaaaaaaactaaactcttcatgtcggctctgaaataaatgcattttcattcatacattcgctagttaggtctgttcttctaaggaggnnnnnnnnnntatatgaaatattttttaaagaacaaactcaacatatcagcagcaaatttcagttaaactaaattggaaaccaatgttctgtgtaaccaaagtgcaaagtcagttccccagctcagaaagaaaattaagagtataaactgaaggcttaagagaacttcagagagcacactgtgtgattaatacataaatattaaaaattatccaatttttgatttaagaacaacacagtttggatctagtcattaaaacatatgcacaggtgtcaaaggcaagtaacactaccacctaaggttattcggaggaactgtgaagatgtagcacggacctctaaggtgtctaaatcccttctgatggaaaggttatggaacactatctgccaaaaacactgaaagcaccacttttatatttagatccaatgctgagtgatatagtcactgttgggataggtttttatttgggaaaatggagaggattctcaaaacagattcatggcttgcatgcagtgacaccctatcaagagcctggaaagacaccatgaaatcacctcaactcaagtggtgggcccacctactcatagtcagtgttacactagccagctctagggctctgacaacataatgagttttgaggtagtatactttaaagaaaaaaagaagagtttattttaaagcaaataactaaactgtattttaacttagcacaattaactgcagcatatttacttcatagccccttaacatgtcacttttaccaacaaagctttttccttcatattctaatcacaaaaatttctcaacaatttataacaatctgtaaatctgaccttgcaataaatagtcataaaacgttatttttattactattattatttttagagacaaggtctcctcgtgccgaattcctgcagcccgggggatttttttagggg

SEQ ID NO: 20761 - DNA, 1126 bp, Homo Sapiens
ccccgggctgcagggcgagctgagtggttgtgtggtcgcgtctcggaaaccggtagcgcttgcagcatggctgaccaactgactgaagagcagattgcagaattcaaagaagctttttcactatttgacaaagatggtgatggaactataacaacaaaggaattgggaactgtaatgagatctcttgggcagaatcccacagaagcagagttacaggacatgattaatgaagtagatgctgatggtaatggcacaattgacttccctgaatttctgacaatgatggcaagaaaaatgaaagacacagacagtgaagaagaaattagagaagcattccgtgtgtttgataaggatggcaatggctatattagtgctgcagaacttcgccatgtgatgacaaaccttggagagaagttaacagatgaagaagttgatgaaatgatcagggaagcagatattgatggtgatggtcaagtaaactatgaagagtttgtacaaatgatgacagcaaagtgaagaccttgtacagaatgtgttaaatttcttgtacaaaattgtttatttgccttttctttgtttgtaacttatctgtaaaaggtttctccctactgtcaaaaaaatatgcatgtatagtaattaggacttcattcctccatgttttcttcccttatcttactgtcattgtcctaaaaccttattttagaaaattgatcaagtaacatgttgcatgtggcttactctggatatatctaagcccttctgcacatctaaacttagatggagttggtcaaatgagggaacatctgggttatgccttttttaaagtagttttctttaggaactgtcagcatgttgttgttgaagtgtggagttgtaactctgcgtggactatggacagtcaacaatatgtacttaaaagttgcactattgcaaaacgggtgtattatccaggtactcgtacactatttttttgtactgctggtcctgtaccagaaacattttcttttattgttacttgctttttaaactttgtttagccacttaaaatctgcttatggcacaatttgcctcaaaatccattccaagttgtatatttgttttccaataaaaaaattacaatttaccc

SEQ ID NO: 20762 - DNA, 1070 bp, Homo Sapiens
gcacgaggccgcaggcacgaggctcgccagctcttccgctcctctcacagccgccagacccgcctgctgagccccatggcccgcgctgctctctccgccgcccccagcaatccccggctcctgcgagtggcactgctgctcctgctcctggtagccgctggccggcgcgcagcaggagcgtccgtggccactgaactgcgctgccagtgcttgcagaccctgcagggaattcaccccaagaacatccaaagtgtgaacgtgaagtcccccggaccccactgcgcccaaaccgaagtcatagccacactcaagaatgggcggaaagcttgcctcaatcctgcatcccccatagttaagaaaatcatcgaaaagatgctgaacagtgacaaatccaactgaccagaagggaggaggaagctcactggtggctgttcctgaaggaggccctgcccttataggaacagaagaggaaagagagacacagctgcagaggccacctggattgtgcctaatgtgtttgagcatcgcttaggagaagtcttctatttatttatttattcattagttttgaagattctatgttaatattttaggtgtaaaataattaagggtatgattaactctacctgcacactgtcctattatattcattctttttgaaatgtcaaccccaagttagttcaatctggattcatatttaatttgaaggtagaatgttttcaaatgttctccagtcattatgttaatatttctgaggagcctgcaacatgccagccactgtgatagaggctggcggatccaagcaaatggccaatgagatcattgtgaaggcaggggaatgtatgtgcacatctgttttgtaactgtttagatgaatgtcagttgttatttattgaaatgatttcacagtgtgtggtcaacatttctcatgttgaaactttaagaactaaaatgttctaaatatcccttggacattttatgtctttcttgtaaggcatactgccttgtttaatggtagttttacagtgtttctggcttaaaccaaaggggcttaattattgatggttttc

SEQ ID NO: 20763 - DNA, 1161 bp, Homo Sapiens
cccgggctgcaggaattcggcacgaggagacaattataaaaaatcaagttaatcttagcagacatgtgtttctggagcatcacagaaggtatattgctagttacactttgccctcctgcagtttcttctctgctcccaacccccatctcatagcatccccctctatttccaatgctcctctccaaccgcttagtttctgaatttcttttaaattacagttttatgaaagcatattttatttacttggtgttgaaatagccctcataaaacctaagcacttggaaacacaataatagtattaactaactagatctattgaatttcagatatttttttcttctaacttgtttacacaaaaacgagtatgatttagcattcatactagttgaaatttttaatagaatcaaggcacaaaagtcttaaaaccatgtggaaaaattaaggaattattgcagattgatgtctctcaatcccatgtattgcgcttatgttacaagttgttgtcacacttgagacttaatttctcctaatttcttctgcccgaagggtaagtggtgcgtccagcttacacaatcataattcaaaggttggtgggcaatgtaatacttaattaaaataatgatggaagagctatctggagattatgagtaagctgatttgaattttcagtataaaactttagtataattgtagtttgcaaagtttatttcagttcacatgtaaggtattgcaaataaattcttggacaattttgtatggaaacttgatattaaaaactagtctgtggttctttgcagtttcttgtaaatttataaaccaggcacaaggttcaagtttagattttaagcacttttataacaatgataagtgcctttttggagatgtaacttttagcagtttgttaacctgacatctctgccagtctagtttctgggcaggtttcctgtgtcagtattccccctcctctttgcattaatcaaggtatttggtagaggtggaatctaagtgtttgtatgtccaatttacttgcatatgtaaaccattgctgtgccattcaatgtttgatgcataattggaccttgaatcgataagtgtaaatacagcttttgatctgtaatgcttttatacaaaagtttattttaataataaaatgtttgttct

SEQ ID NO: 20764 - DNA, 1010 bp, Homo Sapiens
gcacgaggcacgaggacagcattcgaggccgagatgtctcgctccgtggccttagctgtgctcgcgctactctctctttctggcctggaggctatccagcgtactccaaagattcaggtttactcacgtcatccagcagagaatggaaagtcaaatttcctgaattgctatgtgtctgggtttcatccatccgacattgaagttgacttactgaagaatggagagagaattgaaaaagtggagcattcagacttgtctttcagcaaggactggtctttctatctcttgtactacactgaattcacccccactgaaaaagatgagtatgcctgccgtgtgaaccatgtgactttgtcacagcccaagatagttaagtgggatcgagacatgtaagcagcatcatggaggtttgaagatgccgcatttggattggatgaattccaaattctgcttgcttgctttttaatattgatatgcttatacacttacactttatgcacaaaatgtagggttataataatgttaacatggacatgatcttctttataattctactttgagtgctgtctccatgtttgatgtatctgagcaggttgctccacaggtagctctaggagggctggcaacttagaggtggggagcagagaattctcttatccaacatcaacatcttggtcagatttgaactcttcaatctcttgcactcaaagcttgttaagatagttaagcgtgcataagttaacttccaatttacatactctgcttagaatttgggggaaaatttagaaatataattgacaggattattggaaatttgttataatgaatgaaacattttgtcatataagattcatatttacttcttatacatttgataaagtaaggcatggttgtggttaatctggtttatttttgttccacaagttaaataaatcataaaacttgaaaaaaaacctcgtgccgaattcctgcagcccgggggatttttttttaggtctagagcggccgcc

SEQ ID NO: 20765 - DNA, 1210 bp, Homo Sapiens
cgtccggttcgacagtcagccgcatcttcttttgcgtcgccagccgagccacatcgctcagacaccatggggaaggtgaaggtcggagtcaacggatttggtcgtattgggcgcctggtcaccagggctgcttttaactctggtaaagtggatattgttgccatcaatgaccccttcattgacctcaactacatggtttacatgttccaatatgattccacccatggcaaattccatggcaccgtcaaggctgagaacgggaagcttgtcatcaatggaaatcccatcaccatcttccaggagcgagatccctccaaaatcaagtggggcgatgctggcgctgagtacgtcgtggagtccactggcgtcttcaccaccatggagaaggctggggctcatttgcaggggggagccaaaagggtcatcatctctgccccctctgctgatgcccccatgttcgtcatgggtgtgaaccatgagaagtatgacaacagcctcaagatcatcagcaatgcctcctgcaccaccaactgcttagcacccctggccaaggtcatccatgacaactttggtatcgtggaaggactcatgaccacagtccatgccatcactgccacccagaagactgtggatggcccctccgggaaactgtggcgtgatggccgcggggctctccagaacatcatccctgcctctactggcgctgccaaggctgtgggcaaggtcatccctgagctgaacgggaagctcactggcatggccttccgtgtccccactgccaacgtgtcagtggtggacctgacctgccgtctagaaaaacctgccaaatatgatgacatcaagaaggtggtgaagcaggcgtcggagggccccctcaagggcatcctgggctacactgagcaccaggtggtctcctctgacttcaacagcgacacccactcctccacctttgacgctggggctggcattgccctcatggcccacatggcctccaaggagtaagacccctggaccaccagcccccagcaagagcacaagaggaagagagagaccctcactgctggggagtccctgccacactcagtcccccaccacactgaatctcccctcctcacagtttccatgtagaccccttgaagaggggaggggcctagggagccgcaccttgtcatgtaccatcaataaagtaccctgtgctcaaccctcgtgc

SEQ ID NO: 20766 - DNA, 1192 bp, Homo Sapiens
  misc_feature (924)..(977): n is a, c, g, or t
gcacgaggcacagctggagcgcctgcaggccgaggcacagcagctgcgcaaggaggagcggagctgggagcagaagctggaggagatgcgcaagaaggagaagagcatgccctggaacgtggacacgctcagcaaagacggcttcagcaagagcatggtaaataccaagcccgagaagacggaggaggactcagaggaggtgagggagcagaaacacaagaccttcgtggaaaaatacgagaaacagattcccctgtgtcatcccatcattttccatatcctggtgccccccacccctggaagagcccagtctgttgagttagttaagttgggttaataccagcttaaaggcagtattttgtgtcctccaggagcttcttgtttccttgttagggttaacccttcatcttcctgtgtcctgaaacgctcctttgtgtgtgtgtcagctgaggctgggggagagccgtggtccctgaggatgggtcagagctaaactccttcctggcctgagagtcagctctctgccctgtgtacttcccgggccagggctgcccctaatctctgtaggaaccgtggtatgtctgccatgttgcccctttctcttttcccctttcctgtcccaccatacgagcacctccagcctgaacagaagctcttactctttcctatttcagtgttacctgtgtgcttggtctgtttgactttacgcccatctcaggacacttccgtagactgtttaggtcccctgtcaaatatcagttacccactcggtcccagttttgttgccccagaaagggatgttattatccttgggggctcccagggcaagggttaaggcctgaatcatgagcctgctggaagcccagcccctactgctgtgaaccctggggcctgactgctcagaacttgctgctgtcttgttgnnnnnnnnnnnnnnnnnnnnnnnnnnnnnnnnnnnnnnnnnnnnnnnnnnnnnncgcagtgccttgcatacccaaaccaggtgggagcgttttgttgagcatgacagcctgcagcaggaatatatgtgtgcctatttgtggggacaaaaatatttacacttagggtttggagctattcaagaggaaatgtcacagaaggcagctaaaccaaggactgagcaccctctggattctgaatctcaagatgggggcagggctgtgcttgaagg

SEQ ID NO: 20767 - DNA, 1915 bp, Homo Sapiens
gcacgaggctctcgcactctgttcttccgccgctccgccgtcgcgtttctctgccggtcgcaatggaagaagagatcgccgcgctggtcattgacaatggctccggcatgtgcaaagctggttttgctggggacgacgctccccgagccgtgtttccttccatcgtcgggcgccccagacaccagggcgtcatggtgggcatgggccagaaggactcctacgtgggcgacgaggcccagagcaagcgtggcatcctgaccctgaagtaccccattgagcatggcatcgtcaccaactgggacgacatggagaagatctggcaccacaccttctacaacgagctgcgcgtggccccggaggagcacccagtgctgctgaccgaggcccccctgaaccccaaggccaacagagagaagatgactcagattatgtttgagaccttcaacaccccggccatgtacgtggccatccaggccgtgctgtccctctacgcctctgggcgcaccactggcattgtcatggactctggagacggggtcacccacacggtgcccatctacgagggctacgccctcccccacgccatcctgcgtctggacctggctggccgggacctgaccgactacctcatgaagatcctcactgagcgaggctacagcttcaccaccacggccgagcgggaaatcgtgcgcgacatcaaggagaagctgtgctacgtcgccctggacttcgagcaggagatggccaccgccgcatcctcctcttctctggagaagagctacgagctgcccgatggccaggtcatcaccattggcaatgagcggttccggtgtccggaggcgctgttccagccttccttcctgggtatggaatcttgcggcatccacgagaccaccttcaactccatcatgaagtgtgacgtggacatccgcaaagacctgtacgccaacacggtgctgtcgggcggcaccaccatgtatccgggcattgctgacaggatgcagaaggagatcaccgccctggcgcccagcaccatgaagatcaagatcatcgcacccccagagcgcaagtactcggtgtggatcggtggctccatcctggcctcactgtccaccttccagcagatgtggattagcaagcaggagtacgacgagtcgggcccctccatcgtccaccgcaaatgcttctaaacggactcagcagatgcgtagcatttgctgcatgggttaattgagaatagaaatttgcccctggcaaatgcacacacctcatgctagcctcacgaaactggaataagccttcgaaaagaaattgtccttgaagcttgtatctgatatcagcactggattgtagaacttgttgctgattttgaccttgtattgaagttaactgttccccttggtatttgtttaataccctgtacatatctttgagttcaacctttagtacgtgtggcttggtcacttcgtggctaaggtaagaacgtgcttgtggaagacaagtctgtggcttggtgagtctgtgtggccagcagcctctgatctgtgcagggtattaacgtgtcagggctgagtgttctgggatttctctagaggctggcaagaaccagttgttttgtcttgcgggtctgtcagggttggaaagtccaagccgtaggacccagtttcctttcttagctgatgtctttggccagaacaccgtgggctgttacttgctttgagttggaagcggtttgcatttacgcctgtaaatgtattcattcttaatttatgtaaggttttttttgtacgcaattctcgattctttgaagagatgacaacaaattttggttttctactgttatgtgagaacattaggccccagcaacacgtcattgtgtaaggaaaaataaaagtgctgccgtaacccctcgtgc

SEQ ID NO: 20768 - DNA, 1090 bp, Homo Sapiens
ccacgcgtccgcactactctgatcgttttttcactgacccggtgaggcgggggggcgagccccgaggggctctcgcttcgggcgcgacccgctccggggacagtgccaggtggggagtttgactggggcggtacacctgtcaaacggtaacgcaggtgtcctaaggcgagctcagggaggacagaaacctcccgtggagcagaagggcaaaagctcgcttgatcttgattttcagtacgaatacagaccgtgaaagcggggcctcacgatccttctgaccttttgggttttaagcaggaggtgtcagaaaagttaccacagggataactggcttgtggcggccaagcgttcatagcgacgtcgctttttgatccttcgatgtcggctcttcctatcattgtgaagcagaattcaccaagcgttggattgttcacccactaatagggaacgtgagctgggtttagaccgtcgtgagacaggttagttttaccctactgatgatgtgttgttgccatggtaatcctgctcagtacgagaggaaccgcaggttcagacatttggtgtatgtgcttggctgaggagccaatggggcgaagctaccatctgtgggattatgactgaacgcctctaagtcagaatcccgcccaggcggaacgatacggcagcgccagcgagctgctgccaagctgcagcgacccccacctgaggggcccgagagccctgagacagctgagcctggcctgcctggtgacacggtgaccccccagcctgactgtggcttcagggcaggcggggacccacccctgctcaagctcacagccccggcggtggaggctcccgtggagaggaggccgtgctgcctgctcatgtgaggctgttgctcagcatgcaggggccctgtcgcgggcacagcccaaggctgcctccccacggtgcgtgccctggtgctgcgggtgcagcacggaaaccccggcttctactgtacaggacactggcccctctcaggtcagaagacatgcctggagggatgtctggctgcaaagactatttttatcctgcaactcttgataaagggctgttttgccatgga

SEQ ID NO: 20769 - DNA, 1370 bp, Homo Sapiens
  misc_feature (389)..(397): n is a, c, g, or t
  misc_feature (880)..(892): n is a, c, g, or t
  misc_feature (996)..(1013): n is a, c, g, or t
gcacgagggcctgttgaagtcactgagtcagcataaataaagactgcacaggagaattacccctatacctgagcctcaaccttctgggggaaagggaactagataacatacttcttacttgtctgtacagtaccttgttgcagatgggtgatatataatggtaatagaatagcacagccagacttgcttcctgcatggtagggagagacacaaaagatgggaaactgcttttccacaaggaatctccgtagaattttgcggcgaccagatggtgcataggtctggaaggtctgatctcccttggtcttccatgggatggttagtgtggaggggagatatagattgtccggccgctttgtgattccatggattgattcagtcttctggannnnnnnnnctttatattttgggtactggagcttttaaaaatgtttggtttcaggtatttttattcatgtgaagtgtatatgattctcttgagataaggttttaagctaaaatgttactccctgttttagtttctgaactctgacagattgacagggactttgctggtgtagtctttttataggttttataaaccacttgagcctatatcagtcgttttagtgtctgacctaatatttggagctatcagtgctttgttgatttagatgatgactcaagattttttctggtccatttcccatttccttttcttccctgacccccataccctcacccttaaaattctcctgtaactcaactaacaaaatcaagcctgattcaaaacatcctagggtgttttaaacacaccatctggtgccaaatgaagatttttaggagtgattactaattatcaagggcacagttgtggtactgtcattgataataatatagnnnnnnnnnnnnncctaattttgacctgtttcaccagtgttttacccttgactgccccttctatgctgcttccaaaagtgatagtgtgtgtaagatttttaccttcctttctaaagnnnnnnnnnnnnnnnnnnaagtgagtcctgttcttcctatttctttcagcaaaaatgaaatcccaggtaagtataagtattcaagtatttgatcagtaagtcacagttatctccagtgcattaaataaccttcatcaagaaataggttataggtaaaatctctgaaggatcatctatgtattcaagtaattattttttagataataactgtcttctggacttggtcttgaagtctgtacagattcagcctcagtagtagcgaactgcactgctgtttggtttggagtacaaattagacttatagtcctcctggaacttgagttattaaatcataggaataaaattatggggatctcaacaaagggtcgagggttt

SEQ ID NO: 20770 - DNA, 913 bp, Homo Sapiens
  misc_feature (835)..(847): n is a, c, g, or t
tcttttttgaattaaaatacaatattttatttttgtcacctaaaaaacaagcaacccagaattaagatatacgtaagtttctcaaatttatcctaataaaattttgaatatttatacaatttctacagaaacatacagtgtatcaaaatctgcataaatcaaatttataaaatgtgtagaaatgcatagtgatattaccaacttacaaagcaaggatatgggaattatttccaaagcagcctacagtagaaaatagtcattatggcagcagcttctgatgtttttgtttggtaggttttctgatttcaatatatagaatcatattcatagagtatcttcttttaacgaattgcacaaagtacccatttaaaatttacatgcacagttcattgccacctttcttaggcctatgcatagttaataaggttataatctactcaacatggaaaatggagcctatttgcaaacacacaagtaattaaagtaccaattctctcttagtttctttttttatagttggtttattttgcaattataaatgttaaacatccctagagatgaaagttaaaatggttgatcacagatcagtagcaaaatacaaattgacaattcaaaattataaataaaactctgttgaggatgtttaactttgagtctccaaatttaagagctaagcttggaagaaacaaatttataggttatatttccctcttaaattaaaaaacaaacttcctctggcagtagtttgtgaattcctttcattgtaatgataccatgattacaggatcaaaaatgcttaacttacttgccattctgctcacatcatcacagttgnnnnnnnnnnnnnaagcactcaatgtaggcattttaatcttctggataacagagtatcttttgagaaattaaatcgaat

SEQ ID NO: 20771 - DNA, 1271 bp, Homo Sapiens
  misc_feature (484)..(501): n is a, c, g, or t
ccccgggctgcaggaattcggcacgaggggccagtggaaatgtaaagaaggccctgaagctgatggggtcaaatgaaggtgaattcaaggctgaaggaaatagcaaattcacctacacagttctggaggatggttgcacgaaacacactggggaatggagcaaaacagtctttgaatatcgaacacgcaaggctgtgagactacctattgtagatattgcaccctatgacattggtggtcctgatcaagaatttggtgtggacgttggccctgtttgctttttataaaccaaactctatctgaaatcccaacaaaaaaaatttaactccatatgtgttcctcttgttctaatcttgtcaaccagtgcaagtgaccgacaaaattccagttatttatttccaaaatgtttggaaacagtataatttgacaaagaaaaatgatacttctctttttttgctgttccaccaaatacaattcaaatgcnnnnnnnnnnnnnnnnnnaccaattccaatttcaaaatgtctcaatggtgctataataaataaacttcaacactctttatgataacaacactgtgttatattctttgaatcctagcccatctgcagagcaatgactgtgctcaccagtaaaagataacctttctttctgaaatagtcaaatacgaaattagaaaagccctccctattttaactacctcaactggtcagaaacacagattgtattctatgagtcccagaagatgaaaaaaattttatacgttgataaaacttataaatttcattgattaatctcctggaagattggtttaaaaagaaaagtgtaatgcaagaatttaaagaaatatttttaaagccacaattattttaatattggatatcaactgcttgtaaaggtgctcctcttttttcttgtcattgctggtcaagattactaatatttgggaaggctttaaagacgcatgttatggtgctaatgtactttcacttttaaactctagatcagaattgttgacttgcattcagaacataaatgcacaaaatctgtacatgtctcccatcagaaagattcattggcatgccacaggggattctcctccttcatcctgtaaaggtcaacaataaaaaccaaattatggggctgcttttgtcacactagcatagagaatgtgttgaaatttaactttgtaagcttgtatgtggttgttgatcttttttttccttacagacacccataataaaatatcatattaaaattctaaacctcgtgc

SEQ ID NO: 20772 - DNA, 832 bp, Homo Sapiens
  misc_feature (261)..(292): n is a, c, g, or t
tttttagttatagagctaattggcttttatttgtgatttatgaattaaagcagcaccactctacaagtacagtgatagctccccctgggcaatacaatacaagaacagtgggttttgtcaaattggaacaaggaaacagaaccacagaaataaatacattggttaacatcagattagttcaggttacttttttgtaaaagttaaagtagaggggacttctgtattatgctaactcaagtagactggaatctcctgtgttcnnnnnnnnnnnnnnnnnnnnnnnnnnnnnnnnaattggatctatcttcttccttaacatttcagttggagtatgtagcatttagcaccactggctcaatgcgctcacctaggtgagagtgtgaccaaatcttaaagcattagtgctattatcagttaccaccatttggggcttttatccttcatgggttatgatgttctcctgatgacacatttctctgagttttgtaattccagccaaagagagaccattcactatttgatggctggctgcatgcagacatttaaagcttttagagaatacactacaccagggagtatgactactagtatgactattaggagggtaataccaagagttggactacgcaccttaggcaagatacaaaccaactaaaatagaataaagaatgagtcagatgagtgtagccattttaaccaagcagcacatttgttaatttctacaacttagtctcagcgatacccattgtatttagccatgttcaacaacaagtgtcagaaactgcacagactcctccctgttcagctggtagggagcaattctattatttgg

SEQ ID NO: 20773 - DNA, 2012 bp, Homo Sapiens
  misc_feature (63)..(73): n is a, c, g, or t
gcacgaggaaacagtggatcacaaagtggaacgaaaatgaaagctactcatagcgggggcctnnnnnnnnnnngcttcacagtacccaaactgctttttccaactcagaaattcaatttggatttaaaagcctgctcaatccctgaggactgatttcagagtgactacacacagtacgaacctacagttttaactgtggatattgttacgtagcctaaggctcctgttttgcacagccaaatttaaaactgttggaatggatttttctttaactgccgtaatttaactttctgggttgcctttatttttggcgtggctgacttacatcatgtgttggggaagggcctgcccagttgcactcaggtgacatcctccagatagtgtagctgaggaggcacctacactcacctgcactaacagagtggccgtcctaacctcgggcctgctgcgcagacgtccatcacgttagctgtcccacatcacaagactatgccattggggtagttgtgtttcaacggaaagtgctgtcttaaactaaatgtgcaatagaaggtgatgttgccatcctaccgtcttttcctgtttcctagctgtgtgaatacctgctcacgtcaaatgcatacaagtttcattctccctttcactaaaacacacaggtgcaacagacttgaatgctagttatacttatttgtatatggtatttattttttcttttctttacaaaccattttgttattgactaacaggccaaagagtctccagtttacccttcaggttggtttaatcaatcagaattagagcatgggaggtcatcactttgacctaaattatttactgcaaaaagaaaatctttataaatgtaccagagagagttgttttaataacttatctataaactataacctctccttcatgacagcctccaccccacaacccaaaaggtttaagaaatagaattataactgtaaagatgtttatttcaggcattggatattttttactttagaagcctgcataatgtttctggatttcatactgtaacattcaggaattcttggagaaaatgggtttattcactgaactctagtgcggtttactcactgctgcaaatactgtatattcaggacttgaaagaaatggtgaatgcctatggtggatccaaactgatccagtataagactactgaatctgctaccaaaacagttaatcagtgagtcgatgttctattttttgttttgtttcctcccctatctgtattcccaaaaattactttggggctaatttaacaagaactttaaattgtgttttaattgtaaaaatggcagggggtggaattattactctatacattcaacagagactgaatagatatgaaagctgattttttttaattaccatgcttcacaatgttaagttatatggggagcaacagcaaacaggtgctaatttgttttggatatagtataagcagtgtctgtgttttgaaagaatagaacacagtttgtagtgccactgttgttttgggggggcttttttcttttcggaaatcttaaaccttaagatactaaggacgttgttttggttgtactttggaattcttagtcacaaaatatattttgtttacaaaaatttctgtaaaacaggttataacagtgtttaaagtctcagtttcttgcttggggaacttgtgtccctaatgtgtttagattgctagattgctaaggagctgatactttgacagtgtttttagacctgtgttactaaaaaaaagatgaatgtcctgaaaagggtgttgggagggtggttcaacaaagaaacaaagatgttatggtgtttagatttatggttgttaaaaatgtcatctcaagtcaagtcactggtctgtttgcatttgatacatttttgtactaactagcattgtaaaattatttcatgattagaaattacctgtggatatttgtataaaagtgtgaaataaattttttataaaagtgttaaaaaaaacctcgtgc

SEQ ID NO: 20774 - DNA, 1531 bp, Homo Sapiens
  misc_feature (1403)..(1428): n is a, c, g, or t
gcacgagggagaatccgaagggaaaggaataagatggctgcagccaaatgccgcaaccggaggagggagctgactgatacactccaagcggagacagaccaactagaagatgagaagtctgctttgcagaccgagattgccaacctgctgaaggagaaggaaaaactagagttcatcctggcagctcaccgacctgcctgcaagatccctgatgacctgggcttcccagaagagatgtctgtggcttcccttgatctgactgggggcctgccagaggttgccaccccggagtctgaggaggccttcaccctgcctctcctcaatgaccctgagcccaagccctcagtggaacctgtcaagagcatcagcagcatggagctgaagaccgagccctttgatgacttcctgttcccagcatcatccaggcccagtggctctgagacagcccgctccgtgccagacatggacctatctgggtccttctatgcagcagactgggagcctctgcacagtggctccctggggatggggcccatggccacagagctggagcccctgtgcactccggtggtcacctgtactcccagctgcactgcttacacgtcttccttcgtcttcacctaccccgaggctgactccttccccagctgtgcagctgcccaccgcaagggcagcagcagcaatgagccttcctctgactcgctcagctcacccacgctgctggccctgtgagggggcagggaaggggaggcagccggcacccacaagtgccactgcccgagctggtgcattacagagaggagaaacacatcttccctagagggttcctgtagacctagggaggaccttatctgtgcgtgaaacacaccaggctgtgggcctcaaggacttgaaagcatccatgtgtggactcaagtccttacctcttccggagatgtagcaaaacgcatggagtgtgtattgttcccagtgacacttcagagagctggtagttagtagcatgttgagccaggcctgggtctgtgtctcttttctctttctccttagtcttctcatagcattaactaatctattgggttcattattggaattaacctggtgctggatattttcaaattgtatctagtgcagctgattttaacaataactactgtgttcctggcaatagtgtgttctgattagaaatgaccaatattatactaagaaaagatacgactttattttctggtagatagaaataaatagctatatccatgtactgtagtttttcttcaacatcaatgttcattgtaatgttactgatcatgcattgttgaggtggtctgaatgttctgacattaacagttttccatgaaaacgttttattgtgtttttaatttatttattaagatggattctcagannnnnnnnnnnnnnnnnnnnnnnnnnctaccttgaggtcttttgacatgtggaaagtgaatttgaatgaagaatttaagcattgtttgcttattgttccaagacattgtcaataaaagcatttaaggtg

SEQ ID NO: 20775 - DNA, 1820 bp, Homo Sapiens
gccaacgagttttaggcgtgccaatcatagtacaggcatcacaggcagaaaaaaacagagctgcagcaatggcaaacaatttacaaaagggaagtgctggacctatgaggctttatgtgggctcattacacttcaacataactgaagatatgcttcgtgggatctttgagccttttggaagaattgaaagtatccagctgatgatggacagtgaaactggtcgatccaagggatatggatttattacattttctgactcagaatgtgccaaaaaggctttggaacaacttaatggatttgaactagcaggaagaccaatgaaagttggtcatgttactgaacgtactgatgcttcgagtgctagttcatttttggacagtgatgaactggaaaggactggaattgatttgggaacaactggtcgtcttcagttaatggcaagacttgcagagggtacaggtttgcagattccgccagcagcacagcaagctctacagatgagtggctctttggcatttggtgctgtggcagaattctcttttgttatagatttgcaaacaagactttcccagcagactgaagcttcagctttagctgcagctgcctctgttcagccacttgcaacacaatgtttccaactctctaacatgtttaaccctcaaacagaagaagaagttggatgggataccgagattaaggatgatgtgattgaagaatgtaataaacatggaggagttattcatatttatgttgacaaaaattcagctcagggcaatgtgtatgtgaagtgcccatcaattgctgcagctattgctgctgtcaatgcattgcatggcaggtggtttgctggtaaaatgataacagcagcatatgtacctcttccaacttaccacaacctgtttcctgattctatgacagcaacacagctactggttccaagtagacgatgaaggaagatatagtcccttatgtatatagctttttttctttcttgagaattcatcttgagttatcttttatttagataaaaataaagaggcaaggatctactgtcatttgtatgcaatttcctgttaccttgaaaaaataaaaatgttaacaggaatgcagtgtgctcattctccctaaatagtaaatcccactgtatacaaaactgttctcttgttctgccttttaaaatgttcatgtagaaaattaatgaactataggaatagctctaggagaacaaatgtgctttctgtaaaaaggcagaccagggatgtaatgtttttaatgtttcagaagcctaactttttacacagtggttacatttcacatttcactaatgttgatatttggctgatggttgagcagtttctgaaatacacatttagtgtatggaaatacaagacagctaaagggctgtttggttagcatctcatcttgcattctgatcaattggcaagaaagggagatttcaaaattatatttcttgatggtatcttttcaattaatgtatctgtaaaagtttctttgtaaatactatgtgttctggtgtgtcttaaaattccaaacaaaatgatccctgcatttcctgaagatgtttaaacgtgagagtctggtaggcaaagcagtctgagaaagaaataggaaatgcagaaataggttttgtctggttgcatataatctttgctctttttaagctctgtgagctctgaaatatatttttgggttacttcagtgtgtttgacaagacagcttgatatttctatcaaacaaatgactttcatattgcaacaatctttgtaagaaccactcaaataaaagtctcttaaaaaggc

SEQ ID NO: 20776 - DNA, 1291 bp, Homo Sapiens
  misc_feature (1061)..(1070): n is a, c, g, or t
tttatgcatcctaatttattagctgtttgtgttgaaaatgcaaccttgaagagtcacatcatttcaagcacagaatgatttggtggcaagtattccaaattgcttttctaactacttcagtttggagcgagaactgtgagaatggtgtataaccatgcataatacattttccaataaaatgtggtaataggtcaaacttcatgtctttcagaatatcatcacccttgcagaaactggctctctggacttcagaacattttgtacatcatgtcttataaggaatttcttttaggtcactccactgccatgtatgcaactgctgtgtggctcgatatgatcaacactgcctgtggactggacggtgcataggttttggcaaccatcactattacatattcttcttgtttttcctttccatggtatgtggctggattatatatggatctttcatctatttgtccagtcattgtgccacaacattcaaagaagatggattatggacttacctcaatcagattgtggcctgttccccttgggttttatatatcttgatgctagcaactttccatttctcatggtcaacatttttattattaaatcaactctttcagattgcctttctgggcctgacctcccatgagagaatcagcctgcagaagcagagcaagcatatgaaacagacgttgtccctcaggaagacaccatacaatcttggattcatgcagaacctggcagatttctttcagtgtggctgctttggcttggtgaagccctgtgtggtagattggacatcacagtacaccatggtctttcacccagccagggagaaggttcttcgctcagtatgaagaaaagcaacccaaaactctcaatctgatttgtttttgtttatgtcgatgccctgtagtttgaaagtgaagtaaagatttagaattcacctaagtccaaaggaaaacacgtggtttttaaagccattaggtaaaaaaagttctcaataaaggcattacaattttttaggtttagaaagatggacttttctgataaatcttggcagacatctnnnnnnnnnnccatatttttcacaagaaaatgcaagttactttttttggaaataatactcactgattatggataaaatggaatattttcagatactatattggctgtttcaaaatagtactattctttaaacttgtaatttttgctaagttatttgtctttgttgtatctataaatatgtaaaaaatatttaaatagatgtacctgttttgctttcacacttaataaaaaa

SEQ ID NO: 20777 - DNA, 1317 bp, Homo Sapiens
gcacgaggggaaatttgtagcatcaactagaataatctacattgatagcatttattgtgataagtacattgtttccacttcttgatatgactgagatttatttctctcttttagatgaaattgttgatactttaggtgaaggagcttttggaaaagttgtggagtgcatcgatcataaagcgggaggtagacatgtagcagtaaaaatagttaaaaatgtggatagatactgtgaagctgctcgctcagaaatacaagttctggaacatctgaatacaacagaccccaacagtactttccgctgtgtccagatgttggaatggtttgagcatcatggtcacatttgcattgtttttgaactattgggacttagtacttacgacttcattaaagaaaatggttttctaccatttcgactggatcatatcagaaagatggcatatcagatatgcaagtctgtgaattttttgcacagtaataagttgactcacacagacttaaagcctgaaaacatcttatttgtgcagtctgactacacagaggcgtataatcccaaaataaaacgtgatgaacgcaccttaataaatccagatattaaagttgtagactttggtagtgcaacatatgatgacgaacatcacagtacattggtatctacaagacattatagagcacctgaagttattttagccctagggtggtcccaaccatgtgatgtctggagcataggatgcattcttattgaatactatcttgggtttaccgtatttccaacacacgatagtaaggagcatttagcaatgatggaaaggattcttggacctctaccaaaacatatgatacagaaaaccaggaaacgtaaatattttcaccacgatcgattagactgggatgaacacagttctgccggcagatatgtttcaagacgctgtaaacctctgaaggaatttatgctttctcaagatgttgaacatgagcgtctctttgacctcattcagaaaatgttggagtatgatccagccaaaagaattactctcagagaagccttaaagcatcctttctttgaccttctgaagaaaagtatatagatctgtaattggacagctctctcgaagagatcttacagactgtatcagtctaatttttaaattttaagttattttgtacagctttgtaaattcttaacatttttatattgccatgtttcttttgtttgggtaatttggttcattaagtacatagctaaggtaatgaacatctttttcagtaattgtaaagtgatttattcagaataaattttttgtgcttatggagttg

SEQ ID NO: 20778 - DNA, 891 bp, Homo Sapiens
  misc_feature (546)..(587): n is a, c, g, or t
gcacgaggcgggctccggggccgtcgaccatgccgctcgacctccacctccgctgggaagctgaggcgccgaacggctcccagagggtcccgggaagcgcatggtgttcaggcgcttcgtggaggttggccgggtggcctatgtctcctttggacctcatgccggaaaattggtcgcgattgtagatgttattgatcagaacagggctttggtcgatggaccttgcactcaagtgaggagacaggccatgcctttcaagtgcatgcagctcactgatttcatcctcaagtttccgcacagtgcccaccagaagtatgtccgacaagcctggcagaaggcagacatcaatacaaaatgggcagccacacgatgggccaagaagattgaagccagagaaaggaaagccaagatgacagattttgatcgttttaaagttatgaaggcaaagaaaatgaggaacagaataatcaagaatgaagttaagaagcttcaaaaggcagctctcctgaaagcttctcccaaaaaagcacctggtactaagggtannnnnnnnnnnnnnnnnnnnnnnnnnnnnnnnnnnnnnnnnnaaagttccagcaaaaaagatcaccgccgcgagtaaaaaggctccagccccgaaggttcctgcccagaaagccacaggccagaaagcagcgcctgctccaaagctcagaagggtcaaaagctccagcccagaaagcacctgctccaaaggcatcgggcaagaaagcataagtggcaatcataaaaagtaataaaggttctttttgacctgttgacaaatgtatttaacccttgggatttaaagcctgttgaggctggagttagggggccgattggtggtgggattataataaacattaaataatc

SEQ ID NO: 20779 - DNA, 1385 bp, Homo Sapiens
  misc_feature (1105)..(1122): n is a, c, g, or t
gcacgaggatccagtccagcaacgggcacatcaccaccacgccgacccccacccagttcctgtgccccaagaacgtgacagatgagcaggagggcttcgccgagggcttcgtgcgcgccctggccgaactgcacagccagaacacgctgcccagcgtcacgtcggcggcgcagccggtcaacggggcaggcatggtggctcccgcggtagcctcggtggcagggggcagcggcagcggcggcttcagcgccagcctgcacagcgagccgccggtctacgcaaacctcagcaacttcaacccaggcgcgctgagcagcggcggcggggcgccctcctacggcgcggccggcctggcctttcccgcgcaaccccagcagcagcagcagccgccgcaccacctgccccagcagatgcccgtgcagcacccgcggctgcaggccctgaaggaggagcctcagacagtgcccgagatgcccggcgagacaccgcccctgtcccccatcgacatggagtcccaggagcggatcaaggcggagaggaagcgcatgaggaaccgcatcgctgcctccaagtgccgaaaaaggaagctggagagaatcgcccggctggaggaaaaagtgaaaaccttgaaagctcagaactcggagctggcgtccacggccaacatgctcagggaacaggtggcacagcttaaacagaaagtcatgaaccacgttaacagtgggtgccaactcatgctaacgcagcagttgcaaacattttgaagagagaccgtcgggggctgaggggcaacgaagaaaaaaaataacacagagagacagacttgagaacttgacaagttgcgacggagagaaaaaagaagtgtccgagaactaaagccaagggtatccaagttggactgggttgcgtcctgacggcgcccccagtgtgcacgagtgggaaggacttggcgcgccctcccttggcgtggagccagggagcggccgcctgcgggctgccccgctttgcggacgggctgtccccgcgcgaacggaacgttggacttttcgttaacattgaccaagaactgcatggacctaacattcgatctcattcagtattaaannnnnnnnnnnnnnnnnnttacaaactgcaatagagactgtagattgcttctgtagtactccttaagaacacaaagcggggggagggttggggaggggcggcaggagggaggtttgtgagagcgaggctgagcctacagatgaactctttctggcctgccttcgttaactgtgtatgtacatatatatattttttaatttgatgaaaagctgattactgttcaataaacagcttcctgcctttgtaagttatttcttgttttgttttgttttgggtatcct

SEQ ID NO: 20780 - DNA, 1118 bp, Homo Sapiens
gcacgaggctcacattgaggaaaatacagattggttcaaagaaaccaaaaaccagagtgtccctcttagctgctgcagagagactgcccccaattgtaatggcagcctggcccacccttccgacctctatgctgaggggtgtgaggctctagttgtgaagaagctacaagaaatcatgatgcatgtgatctgggccgcactggcatttgcagctattcagctgctgggcatgctgtgtgcttgcatcgtgttgtgcagaaggagtagagatcctgcttacgagctcctcatcactggcggaacctatgcatagttgacaactcaagcctgagctttttggtcttgttctgatttggaaggtgaattgagcaggtctgctgctgttggcctctggagttcatttagttaaagcacatgtacactggtgttggacagagcagcttggcttttcatgtgcccacctacttacctactacctgcgactttctttttccttgttctagctgactcttcatgcccctaagattttaagtacgatggtgaacgttctaatttcagaaccaattgcgagtcatgtagtgtggtagaattaaaggaggacacgagcctgcttctgttacctccaagtggtaacaggactgatgccgaaatgtcaccaggtcctttcagtcttcacagtggagaactcttggccaaaggtttttggggggaggaggaggaaaccagctttctggttaaggttaacaccagatggtgcccctcattggtgtccttttaaaaaatatttactgtagtccaataagatagcagctgtacaaaatgactaaaatagattgtaggatcatatggcgtatatcttggttcatcttcaaaatcagagactgagctttgaaactagtggtttttaatcaaagttggctttataggaggagtataatgtatgcactactgttttaaaagaattagtgtgagtgtgtttttgtatgaatgagcccattcatggtaagtcttaagcttgttggaaataatgtacccatgtagactagcaaaatagtatgtagatgtgatctcagttgtaaatagaaaaatctaattcaataaactctgtatcagccccc

SEQ ID NO: 20781 - DNA, 1527 bp, Homo Sapiens
gcacgaggtgcgggtcatggcgccccgagccctcctcctgctgctctcgggaggcctggccctgaccgagacctgggcctgctcccactccatgaggtatttcgacaccgccgtgtcccggcccggccgcggagagccccgcttcatctcagtgggctacgtggacgacacgcagttcgtgcggttcgacagcgacgccgcgagtccgagaggggagccgcgggcgccgtgggtggagcaggaggggccggagtattgggaccgggagacacagaactacaagcgccaggcacaggctgaccgagtgagcctgcggaacctgcgcggctactacaaccagagcgaggacgggtctcacaccctccagaggatgtatggctgcgacctggggcccgacgggcgcctcctccgcgggtatgaccagtccgcctacgacggcaaggattacatcgccctgaacgaggacctgcgctcctggaccgccgcggacaccgcggctcagatcacccagcgcaagttggaggcggcccgtgcggcggagcagctgagagcctacctggagggcacgtgcgtggagtggctccgcagatacctggagaacgggaaggagacgctgcagcgcgcagaacccccaaagacacacgtgacccaccaccccctctctgaccatgaggccaccctgaggtgctgggccctgggcttctaccctgcggagatcacactgacctggcagcgggatggggaggaccagacccaggacaccgagcttgtggagaccaggccagcaggagatggaaccttccagaagtgggcagctgtggtggtgccttctggacaagagcagagatacacgtgccatatgcagcacgaggggctgcaagagcccctcaccctgagctgggagccatcttcccagcccaccatccccatcatgggcatcgttgctggcctggctgtcctggttgtcctagctgtccttggagctgtggtcaccgctatgatgtgtaggaggaagagctcaggtggaaaaggagggagctgctctcaggctgcgtgcagcaacagtgcccagggctctgatgagtctctcatcacttgtaaagcctgagacagctgcctgtgtgggactgagatgcaggatttcttcacacctctcctttgtgacttcaagagcctctggcatctctttctgcaaaggcgtctgaatgtgtctgcgttcctgttagcataatgtgaggaggtggagagacagcccacccccgtgtccaccgtgacccctgtccccacactgacctgtgttccctccccgatcatctttcctgttccagagaggtggggctggatgtctccatctctgtctcaaattcatggtgcactgagctgcaacttcttacttccctaatgaagttaagaacctgaatataaatttgtgttctcaaatatttgctatgaagcgttgatggattaattaaataagtcaattcctagaagttgagagagcaaataaagacctgagaaccttccaaa

SEQ ID NO: 20782 - DNA, 954 bp, Homo Sapiens
ggctgcaggaattcggcacgaggatatcgatcccattaactccatgctgagtatctacatggatacattaaatatatttatgcgagttgcaactatgctggcaactggaggcaacagaaagaaatgaagtgactcagcttctggcttctctgctacatcaaatatcttgtttaatggggcagatatgcattaaatagtttgtacaagcagctttcgttgaagtttagaagataagaaacatgtcatcatatttaaatgttccggtaatgtgatgcctcaggtctgcctttttttctggagaataaatgcagtaatcctctcccaaataagcacacacattttcaattctcatgtttgagtgattttaaaatgttttggtgaatgtgaaaactaaagtttgtgtcatgagaatgtaagtcttttttctactttaaaatttagtaggttcactgagtaactaaaatttagcaaacctgtgtttgcatatttttttggagtgcagaatattgtaattaatgtcataagtgatttggagctttggtaaagggaccagagagaaggagtcacctgcagtcttttgtttttttaaatacttagaacttagcacttgtgttattgattagtgaggagccagtaagaaacatctgggtatttggaaacaagtggtcattgttacattcatctgctgaacttaacaaaactgttcatcctgaaacaggcacaggtgatgcattctcctgctgttgcttctcagtgctctctttccaatatagatgtggtcatgtttgacttgtacagaatgttaatcatacagagaatccttgatggaattatatatgtgtgttttacttttgaatgttacaaaaggaaataactttaaaactattctcaagagaaaatattcaaagcatgaaatatgttgctttttccagaatacaaacagtatactcatga

SEQ ID NO: 20783 - DNA, 2048 bp, Homo Sapiens
gcggcagccatcaggtaggctgcgttgaggcttttgctcttccatccgcctttgatcgtcttcctcttcagccatcaggtaagccaagatgggtgcatacaagtacatccaggagctatggagaaagaagcagtctgatgtcatgcgctttcttctgagggtccgctgctggcagtaccgccagctctctgctctccacagggctccccgccccacccggcctgataaagcgcgccgactgggctacaaggccaagcaaggttacgttatatataggattcgtgttcgccgtggtggccgaaaacgcccagttcctaagggtgcaacttacggcaagcctgtccatcatggtgttaaccagctaaagtttgctcgaagccttcagtccgttgcagaggagcgagctggacgccactgtggggctctgagagtcctgaattcttactgggttggtgaagattccacatacaaattttttgaggttatcctcattgatccattccataaagctatcagaagaaatcctgacacccagtggatcaccaaaccagtccacaagcacagggagatgcgtgggctgacatctgcaggccgaaagagccgtggccttggaaagggccacaagttccaccacactattggtggctctcgccgggcagcttggagaaggcgcaatactctccagctccaccgttaccgctaatataagtaaagtttgtaaaattcatacttaataaacaatttaggacagtcatgtctgcttacaggtgttatttgtctgttaaaactagtctgcagatgtttcttgaatgctttgtcaaattaagaaagttaaagtgcaataatgtttgaagacaataagtggtggtgtatcttgtttctaataagataaacttttttgtctttgctttatcttattagggagttgtatgtcagtgtataaaacatactgtgtggtataacaggcttaataaattctttaaaaggagagaactgaaactagccctgtagatttgtctggtgcatgtgatgaaacctgcagctttatcggagtgatggcaatgctctgctggtttattttcaagtggctgcgttttttttagtttggcaggtgtagactttttaagttgggctttagaaaatctgggttagcctgaagaaaattgcctcagcctccacagtaccattttaaattcacataaaaggtgaaagctcctggttcagtgccatggcttcatggcattcagtgattagtggtaatggtaaacactggtgtgttttgaagttgaatgtgcgataaaattattagccttaagattggtaagctagcaatgaatgctagggtgggaagctggtgagccagtggccattagataaatacctttcaagtgtgagcttagacgtcaaccctaaaatacttaaccgtaatgctaattgtgatcattatgaatcccttcagtcacattagggggaaagtagttggctataagtacgtcattcttagtccagtcagtcttaaaaacatcttgggttacccactctgtccactcccataggctacagaaaaagtcacaagcgcatggtttccaaccatatgtgttttctgcagttatttctcttgttctggccaaacaaccctaaaaatccttaccattccacaaagttggaccatcacttgtgcacccactttgactatgagtataccaccacattgcatttctgtttgcaccatgtcttccaggagactagactactgttgtccagggtcaatttgagtgtaaagaaaatgtagacaaggaattgcccaattttaaattctgactttgctgacttaatttaaatgctcgttctgaaccaattttctcctatcttctctaggggtttcaaaagactcagttaattgatttccaggaagtactcatagcaagttcataaaagttcttgagacctaaatttcttcacaaaaaaagaaaagatcttaagtcatacattttaattgtgtagaggttgttcaactgaaggaataaatgtctattaaaccctcgtgc

SEQ ID NO: 20784 - DNA, 1303 bp, Homo Sapiens
gcacgaggcgcgcagctgcgcttcctgctcagcctgcccgagcaccgcggagacgctgccgtgcgcgacgagctgatggcggccgtccgcgataacaacttttggaacagaatccggcaagagcaaaccgaggattgccctccctccagccctagtagaggttggcattgccaggattggccgtcacgcaaacctcccaccagcatacgtttatgttttgccaagccgattattaagcgccatcgcatgccttcctacatggctccttactatgaagccttgtgcaaatccctcgactggcagatagacgtggacctactcaataaaatgaagaaggcaaatgaagatgagttgaagcgtttggatgaggagctggaagatgcagagaagaatctaggagagagcgaaattcgcgatgcaatgatggcaaaggccgagtacctctgccggataggtgacaaagagggagctctgacagcctttcgcaagacatatgacaaaactgtggccctgggtcaccgattggatattgtattctatctccttaggattggcttattttatatggataatgatctcatcacacgaaacacagaaaaggccaaaaggcagctgaactcttccttgacactgtttcaacatttacatcctatgaactcatggattataaaacatttgtgacttatactgtctatgtcagtatgattgccttagaaagaccagatctcagggaaaaggtcattaaaggagcagagattcttgaagtgttgcacagtcttccagcagttcggcagtatctgttttcactctatgaatgccgttactctgttttcttccaatcattagcggttgtggaacaggaaatgaaaaaggactggctttttgcccctcattatcgatactatgtaagagaaatgagaattcatgcatacagtcagctgctggaatcatataggtcattaacccttggctatatggcagaagcgtttggtgttggtgtggaattcattgatcaggaactgtccaggtttattgctgccgggagactacactgcaaaatagataaagtgaatgaaatagtagaaaccaacagacctgatagcaagaactggcagtaccaagaaactatcaagaaaggagatctgctactaaacagagttcaaaaactttccagagtaattaatatgtaaagccatgtaactaacaaaggatttgctttagagataattatttggaatttttatagcttacttcacaatgtgcccaggtcagctgtataaaaataaatactgcattgttgttt

SEQ ID NO: 20785 - DNA, 1741 bp, Homo Sapiens
  misc_feature (1247)..(1277): n is a, c, g, or t
  misc_feature (1316)..(1336): n is a, c, g, or t
gcacgagggccagatcaacctgtagaagaccctgatccagaagattttgctgatgagcagagccttgtgggccgcttcattcatctgctgcgctctgaggaccctgaccagcagtacttgattttgaacacagcacgaaaacattttggagctggtggaaatcagcggattcgcttcacactgccacctttggtatttgcagcttaccagctggcttttcgatataaagagaattctaaagtggatgacaaatgggaaaagaaatgccagaagattttttcatttgcccaccagactatcagtgctttgatcaaagcagagctggcagaattgcccttaagactttttcttcaaggagcactagctgctggggaaattggttttgaaaatcatgagacagtcgcatatgaattcatgtcccaggcattttctctgtatgaagatgaaatcagcgattccaaagcacagctagctgccatcaccttgatcattggcacttttgaaaggatgaagtgcttcagtgaagagaatcatgaacctctgaggactcagcgtgcccttgctgcatccaaacttctaaagaaacctgatcagggccgagctgtgagcacctgtgcacatctcttctggtctggcagaaacacggacaaaaatggggaggagcttcacggaggcaagagggtaatggagtgcctaaaaaaagctctaaaaatagcaaatcagtgcatggacccctctctacaagtgcagctttttatagaaattctgaacagatatatctatttttatgaaaaggaaaatgatgcggtaacaattcaggttttaaacccgcttatccaaaagattcgagaagacctcccgaatcttgaatccagtgaagaaacagagcagattaacaaacattttcataacacactggagcatttgcgcttgcggcgggaatcaccagaatccgaggggccaatttatgaaggtctcatcctttaaaaaggaaatagctcaccatactcctttccatgtacatccagtgagggttttattacgctaggtttcccttccatagattgtgcctttcagaaatgctgaggtaggtttcccatttcttacctgtgatgtgttttacccagcacctccggacactcaccttcaggaccttaataaaattattcacttggtaagtgttcaagtctttctgatcaccccaagtagcatgactgatctgcaatttaaaattcctgtgatctgtnnnnnnnnnnnnnnnnnnnnnnnnnnnnnnncccacaagcacttatcttggctactaatgaagctctccnnnnnnnnnnnnnnnnnnnnncttcattgttgattgtgtattttcttcattcctggggagtactaacccaaaagcgtctgtctcttgttttctagtccagtttgaaattaatttaaaaaaaaggaatactgtatgtgaaattcatcttgggctttcccctaaattgcaagataaggccatgtgtaaaattttccctaaaactagaatatattaatgcatgtttgaaaattttaaagcaccatggtcaaaaccaaaagctatattttgcatatttggactcagccatccattaaaaacccatgttgtcctctggacatatttatcaatataattgggttttaaatagtataaaagaaaacttgtgatctatataatttatgtatcaccttcattgtaaatttagcaggaaatgcatcacaattatga

SEQ ID NO: 20786 - DNA, 1011 bp, Homo Sapiens
  misc_feature (76)..(105): n is a, c, g, or t
  misc_feature (208)..(222): n is a, c, g, or t
gcacgaggtaactttttaaacattccacaagaggaagtgcctgcgggttccttttttagaagctttgtgggttgannnnnnnnnnnnnnnnnnnnnnnnnnnnnnaattgcagtttaaaagtgaatcgtaagagaacctcagcattgtgcacgataagagaatgtgtcagtatttcagggttctacattttatctgtaaaatgtgacnnnnnnnnnnnnnnnatcacaacagaagtaaaatgttgctttgtacctggtgtcttttattaaaaatttactccccccatttctcacagagaataacagtcgggagtcattgtcacaatataatagaaatgttagcaaccagattcatgtaaggactaagtggtcctcatgaattgcattaagactctgtactgctcatattacactccatcctctctgtagtttgctgggtagtggagggggtaagctaaatcatagtttctgacaataactgggaaggttttttcttaaaataacaatggaattggtataattgggattgaaaactaaaacttggaactaagatagagaagatggagtgtatgtagaagggctgttaaaaatgtaaaacttggttgcattatttgtggaggctcaaacttgtgaaggttaataccataatttttccatttgttctgcattttgattctgaaaagaaagctggctttgcccatttcttattaaaaaaacttgttgtaaatccagttgtctaatgggatctatatgaagttagccatgtctgtatgcccttctcccacaaaatactgtataactagtgtgcttgtagtagttaactccaccatctttgtaagctaatgaaattgtgagtcacccatttatatcttaatttttaatcatgtcagttcttgaatgggtatctccttagcctgctgatttctttttctttctaaagaaagtgggtggagaaattaatttagacgtttgtttgcaataaaaagaattcattttaaaaaaacctcgtgc

SEQ ID NO: 20787 - DNA, 875 bp, Homo Sapiens
ccgggctgcaggaattcggcacgagggggaccttccgcatcctgctgatgttttgttgcttaggatatgaatggctgagcggaggctgtaaaacctggcactctgcttgggtatgaggttcttcctgccatcctgccatcatttgttttttatgttttgtcgccaaaagtgaccttgaggaaccctgggagctcaggaaggaaggagcgcccagaagcagggacagggagctggttggggaggaccagaaatcaggttatcaatactctggctgaccatcgtcatcgtgggactgactttggtggaagtccttggttacttatcattactgtgtttctgagaagttataaatttgccatctccctctgcacaagttacctttgtgtgtctttcctgaagactatcttcccgtctcaaaatggacatgatggatccacggatgtacagcagagagccaggaggtccaaccgccgtagacaggaaggaattaaaattgtcctggaagacatctttactttatggagacaggtggaaaccaaagttcgagctaaaatccgtaagatgaaggtgacaacaaaagtcaaccgtcatgacaaaatcaatggaaagaggaagaccgccaaagaacatctgaggaaactaagcatgaaagaacgtgagcacggagaaaaggagaggcaggtgtcagaggcagaggaaaatgggaaattggatatgaaagaaatacacacctacatggaaatgtttcacgtgcgcaagcgttgcggcggcgggcagaggactactacagatgcaaaatcaccccttctgcaagaaagcctctttgcaaccggggcacttacaatttggtattacctgggagtgaaaagaaatat

SEQ ID NO: 20788 - DNA, 1647 bp, Homo Sapiens
atcccccgggctgcaggaattcggcacgagggccctgaagaaaaaagagagtgctttggagcttgtctgtttacctgttacaatcttttaaggccagatgtcgtcctagaaactgcatggaggcacaatatcatggattttgccatgccctatttcatccaggtcatgaaggagtacttgacaaagctggataaattagatgcttcagaatcactgagaaaagaagaagaacaagctacagagacacaacccattgtttatggtcagccccagttgatgctgacagcaggacccagtgttgccgtccctccccaggcaccttttggttatggttataccgcaccaccgtatggacagccacagcctggctctgggtacagcatgtgagatggagcgctgatcctgtagtcacctattttcgtactgaaacatcgtctttacccacttctcagtttataatgggggaaaacaggcaacgtgttcttgtaacctttatttcatgaaggacttctttttgtttctaactataaacttggatcacctatgttaaaaccttatttcacattccacatcattttagaatttattttcgaaggggaatagtttcaatgttttattcacttgggctttttttcttccccctctttctttaaagaactgctcaatattcaatctgttgtgaagaacctgatttgcactctgtagtgtttaaagaaacaaagaaactctaatattgaatctcttaaatttagtgtatgtaaacagcttacaaatacgtattgtctaaatgcatttaaatctgttttattcaaagaaaagctaaagcaaaaacactggcatatgaccatgcaagactgtcagtgccaacaaagacaacactaatcagcacatcgtacactggattgcagtgcttcccagattattgaaaaatgttacagacaacttgcctgatttttaaatgagcgtaaaaggccctctaacctatgcaggtttccccattatgcatatagaaaatgctagtatgttttgctcacttcatatgtaacaggtgcccttatgttgtgctgtatcctgtgctttttctgtgggaccattccattcaggagcaaagagcaccatgattccaatcttgtgtgtgtttactaacccttccctgaggtttgtgtatgttggatattgtggtgttttagatcactgagtgtacagaagagagaaattcaaacaaaatattgctgttcttcagttttgtttgtggaatttgaaattactcaaatttaaaataaattactggactgtggaaataacatagaattgaagttttaattaaataccactcaaacgaaaagaacagtagtttttgtagttttatattggatactgaggcattagggaggcatgaaaggaagaggaatgaggattgagacatgtgaagacattgtgcattatatcaatgtgcattcctgtagttcattaacaaggtacatgcaatagtctaaagaaccagagtcactactatagtggcttaacatttaatctgtctccaatattttaaccaagtgacaccgaggtttttatccaagcatttcacttaaatgaacaaatcatggctgttatattaacttgaaataaaatatattttaaacatgt

SEQ ID NO: 20789 - DNA, 1512 bp, Homo Sapiens
  misc_feature (530)..(544): n is a, c, g, or t
gcacgaggattttactaaatcaactcacacaaattccaaattgcaaatataattaaggacaacagattctgctttgccttattaaatctttcattttcaaatccatcaataagacaaaaagtaaccaaaaattaggtctgttgcaaattcatgattcttctgaggggggaaaccaaaagaacattagagtaaaaagaacgccactggaggatgtacaataaagcaccacaacacacgcttacaaacggggcttcctggcttcggtgacaggtaaaagacgctgttctccccactgctgtgcgtcaatcagggtttcattaaaataaaactataaaatctcctaggttacactaagtcagacacggtctggaacacagtgcttaacaacagtaatgccaactatcagtgctaacataaaaacattttagaaggtcaaaaacaattaaactggaaaccaaagccttattttccctagatgagcaaaactgaaaatgaaaggggtcccacctcccagtaggagtgaaggggannnnnnnnnnnnnnnaaactgaaggtggggtacatggtgcagctggttctgtcattgctcagcctagttggcgtccagcttggccatttcctgcacatagatgcctatactctcgctgtcaaaaagcacgaagtacaccgttttgatggaagaggacattgtagacacgaagtaactggagatggccttcagaatcagctgagctgctgtctgctttggaaaaccgttcctgccgctgccgatggatggaaatgcaatggatttcagcttcttatcatcagccagggccaagcagtttttcactgtcttttccagaagttcttcacacttgtctgcaccccaaactggactattacagtggatcacaaacttggcaggcaggccatggcctgcgctgacagcagctccagctacttccaagggcccgttctttttccggagttccaggacagcttccacaaactccttgccacctttcttctccagcgtgtttcctacttcaccaccgatgtagaagtcagtgtttgtcgggtgaacgacagcatcactgtcgatcgaggcaatgtcagcctgtacaacttgcaacttctggccaaggaagaggctcttggtggagaggactgtgaagccgtcggcaggtgtgccctcggttgtgctgtcggcgctggctgccttactgacttcaccctgcttcttcttggatttccgggcccctttcttgcctcctgcttttttagatacaggcttcttctgggatggagacttggcctttttggctgggggtggtgtgatgatggcttccaactttcctttggatccccgcttcttcgctagcaactcggggtggatgttgggtaacacacccccactggctatggtgactccttttagcagctgattcagctcttcatcattggccacagccagcaggatgtgccggggtgtgacccgtcccttcttgttgtctctcgctgccctcgtgc

SEQ ID NO: 20790 - DNA, 1667 bp, Homo Sapiens
gcacgagggttcttcccaaaccaccaagccactgggtccctgtttcctttaatccttcagataaggaaataatgacatttcaacttaaaaccttacttaaagtacaggtataaaataagacaaatgtttaaatttagttatgttcacggatagttgtcaattggtctgaaacaaattcgctagggaatctatttgtgtagaactaattaatgtaaaaaaaacagaccatctcgtgttgtgtgcactgtgatataatggtagtatcagtgcaactttaatgattgtacttgatattaagtgttctcaactgagtaacttttaagtggaaaccaagtttagatttggggagtggtaaaggaatcagctttttctattgttaggggaagacagtaatttatcattcatggaccagtagattgttgaaagttggtgaatcggattataagcttctagctaacacaaggattcagaattaggtaaacatctgaaggtttagtatattagaaacacccaaaccagtaatatgctaacctgatgcactgctgaaagaaaatgtgaatttttcgtaataattgcattttagtgaattgtacagtgggtggaaagggcatttggagctcattagaatgagacatagtacaccccaatggccctgtttattaaatgtagtggattaagtgtctgtcaacaaatacaccaaaaccattttttatagaaacagtatttaatggtcactcaatagctttcaaaatacatttttgtattacagcactgcacaagctattctaatagtgctctcgcctcatcattcctgcaaagcttgctttggggagttggataatgtgaaaattttaagtacctaggggagaaagagccatgtaaatatctgtaataaacttgtagcatatgtaaagttttcttggcctttatcttacaaaaatggagtattttagtatgaatttgctgaatgtaagaccgtggactgttttttataatatggcctaattttaaaggtccaaaataacttgtttttaaagtttgcccttgtgctaaagtgccagtgtatgtatgttatacttgatttggttgtaaactatatttcaaagtaaaccctagtgtaataagttttataactaaaaaggtttaagctgctaaaactatttttaagagatgtgaaatgcagtatgggactatctttttttcctcctctaagcccaaagattaactagagtccctccaaccttatagattgttggctttcacaatcttataacctaggatacaggtagtttcgagtatggtgccagtgatgttttgtttttgtttggtcaaggggtaggtgcaacccaatggaccacttatgcaaaagatgtaaactcttgcataatacattgataacatgttttgccaactttaaatgcttaaacataagcgaaaccagtagcaagtatgtgggtcagcttaaaaattttgattgttaatgccctattttctaatttggcacctcttgatgcctaagcaggtaagcagatgcctaagctgtatttctccaataaatcaagatgaagtactgctcaagttaaatatttgatagcctaaagacaagtttatgtagtacttaatgtacatgatatgaatgtgaagcataaattaaataaatttttccc

SEQ ID NO: 20791 - DNA, 1097 bp, Homo Sapiens
  misc_feature (57)..(67): n is a, c, g, or t
  misc_feature (675)..(687): n is a, c, g, or t
gcacgagggtttttctttcttaaatttcatcactgttgatgtggttcttttgtgttnnnnnnnnnnngtgcaactatcaaaactaaaaaattatagagtaatattgccgttctgctgattttaaatatacaatacatcatacatactttacaagcaagttaaatggagataaagttgaaatcatagaagatgcaaatgacctttcaaaatcaacacaatgtgttctgaaactttcgtgactaataccatgcatctgtgatcaatgaactatgtggttttgaatcggatgtagaccattagtactactacttgagctaaacttctgcatggttcataatttttaaagtgtgtagttaatatgcatgttatcgtcctttcttccattcttaacagtatgtgcccatttgcaaaacaaaaatgctaataatcagtaatagtcctataaaagatgttaactctgtttagtcattgactgatcttgctctaaccttaaaattttgtgattattgacctctgttgcatttattctaaagccccccaaaaattatctagccgtttcgaatatcaacattaccctggtgtattcactgctgtatgcattattgttctttgttgctgttttatgccttcatattagcaaatatgaaattctgtgaaaaaaaccctttgatcttnnnnnnnnnnnnnccaccccccccttctgtagcaggaaacaaattgcttgttcttgagaactttcccatcaagaatttagtagaagcaggtatacttctatcattttgatgtttttgttaatgtttccaaacaatgtactttgaaatcagaatcacttcttatcgttttcatatacttctgatgctcttcatcacattagtgatcagaaatgaggtgtaattccccaacccctgcccgcaagagctaagtaggatcttactgtaagctgaagggagttttgccctaactcatggattgtgcaagaatgaactgctgttgggtttgattgactgtcgatggattgtggtgtggtgtatctgaaggctattgaatgcaacttacaatgcttaataaaaatctttattcttttagtatcctcgtgc

SEQ ID NO: 20792 - DNA, 937 bp, Homo Sapiens
ccccgggctgcaggctgcggcgcagtctgcccccttgacatacccggggcatcctggcgccggcggcgggtactacccaggcgggtatggaggggctcccggagggcctgcgtttcccggacaaactcaggatccgctgtatggttactttgctgctgtagctggacaggatgggcagatagatgctgatgaattgcagagatgtctgacacagtctggcattgctggaggatacaaaccttttaacctggagacttgccggcttatggtttcaatgctggatagagatatgtctggcacaatgggtttcaatgaatttaaagaactctgggctgtactgaatggctggagacaacactttatcagttttgacactgacaggagtggaacagtagacccacaagaattgcagaaggccctgacaacaatgggatttaggttgagtccccaggctgtgaattcaattgcaaaacgatacagcaccaatggaaagatcaccttcgacgactacatcgcctgctgcgtcaaactgagggctcttacagacagctttcgaagacgggatactgctcagcaaggtgttgtgaatttcccatatgatgatttcattcaatgtgtcatgagtgtttaaatcaagaggaagctgcatgaatgtaatcaacattccaactggagctctcctttgcttgtcctctttgccttcggtaatatgtataaacttacatcacgactttctcttaacagctgttgtaaagtttattactttatgtacaactgaagttttgttttagttttgataataaattctttggaactttaataagatctagtctgttacaccatttagaactttcctgagccattatcagtcatgccttaattttcttgctaaaactctatgtaaatttaatatgcaaatggttaagtcacattattt

SEQ ID NO: 20793 - DNA, 936 bp, Homo Sapiens
  misc_feature (723)..(732): n is a, c, g, or t
gcacgaggctggtgtcggtggttagtttctgcgacttgtgttgggactgctgataggaagatgtcttcaggaaatgctaaaattgggcaccctgcccccaacttcaaagccacagctgttatgccagatggtcagtttaaagatatcagcctgtctgactacaaaggaaaatatgttgtgttcttcttttaccctcttgacttcacctttgtgtgccccacggagatcattgctttcagtgatagggcagaagaatttaagaaactcaactgccaagtgattggtgcttctgtggattctcacttctgtcatctagcatgggtcaatacacctaagaaacaaggaggactgggacccatgaacattcctttggtatcagacccgaagcgcaccattgctcaggattatggggtcttaaaggctgatgaaggcatctcgttcaggggcctttttatcattgatgataagggtattcttcggcagatcactgtaaatgacctccctgttggccgctctgtggatgagactttgagactagttcaggccttccagttcactgacaaacatggggaagtgtgcccagctggctggaaacctggcagtgataccatcaagcctgatgtccaaaagagcaaagaatatttctccaagcagaagtgagcgctgggctgttttagtgccaggctgcggtgggcagccatgagaacaaaacctcttctgtannnnnnnnnnccattagtaaaacacaagacttcagattcagccgaattgtggtgtcttacaaggcaggcctttcctacagggggtggagagaccagcctttcttcctttggtaggaatggcctgagttggcgttgtgggcaggctactggtttgtatgatgtattaataaagcaacccattattcttttgtagtttgtattaaaacttgaactg

SEQ ID NO: 20794 - DNA, 1084 bp, Homo Sapiens
gcacgaggtgcaagacttgagttcaggactcccaatccttcgccatccgaacctggagaggatccagtcgacacctacaggggtcggacatgtccaaggctaactgagaggccttccagacgcttcatttttgttgtttgggtttgcggcagggcacaaagaggatggcgggtgaaaaagttgagaagccagatactaaagagaagaaacccgaagccaagaaggttgatgctggtggcaaggtgaaaaagggtaacctcaaagctaaaaagcccaagaaggggaagccccattgcagccgcaaccctgtccttgtcagaggaattggcaggtattcccgatctgccatgtattccagaaaggccatgtacaagaggaagtactcagccgctaaatccaaggttgaaaagaaaaagaaggagaaggttctcgcaactgttacaaaaccagttggtggtgacaagaacggcggtacccgggtggttaaacttcgcaaaatgcctagatattatcctactgaagatgtgcctcgaaagctgttgagccacggcaaaaaacccttcagtcagcacgtgagaaaactgcgagccagcattacccccgggaccattctgatcatcctcactggacgccacaggggcaagagggtggttttcctgaagcagctggctagtggcttattacttgtgactggacctctggtcctcaatcgagttcctctacgaagaacacaccagaaatttgtcattgccacttcaaccaaaatcgatatcagcaatgtaaaaatcccaaaacatcttactgatgcttacttcaagaagaagaagctgcggaagcccagacaccaggaaggtgagatcttcgacacagaaaaagagaaatatgagattacggagcagcgcaagattgatcagaaagctgtggactcacaaattttaccaaaaatcaaagctattcctcagctccagggctacctgcgatctgtgtttgctctgacgaatggaatttatcctcacaaattggtgttctaaatgtcttaagaacctaattaaatagctgactaccctcgtgccgaattcctgca

SEQ ID NO: 20795 - DNA, 960 bp, Homo Sapiens
  misc_feature (756)..(812): n is a, c, g, or t
gcacgaggagatacgttcgtcagcttgctcctttctgcccgtggacgccgccgaagaagcatcgttaaagtctctcttcaccctgccgtcatgtctaagtcagagtctcctaaagagcccgaacagctgaggaagctcttcattggagggttgagctttgaaacaactgatgagagcctgaggagccattttgagcaatggggaacgctcacggactgtgtggtaatgagagatccaaacaccaagcgctccaggggctttgggtttgtcacatatgccactgtggaggaggtggatgcagctatgaatgcaaggccacacaaggtggatggaagagttgtggaaccaaagagagctgtctccagagaagattctcaaagaccaggtgcccacttaactgtgaaaaagatatttgttggtggcattaaagaagacactgaagaacatcacctaagagattattttgaacagtatggaaaaattgaagtgattgaaatcatgactgaccgaggcagtggcaagaaaaggggctttgcctttgtaacctttgacgaccatgactccgtggataagattgtcattcagaaataccatactgtgaatggccacaactgtgaagttagaaaagccctgtcaaagcaagagatggctagtgcttcatccagccaaagaggtcgaagtggttctggaaactttggtggtggtcgtggaggtggtttcggtgggaatgacaacttcggtcgtggaggaaacttnnnnnnnnnnnnnnnnnnnnnnnnnnnnnnnnnnnnnnnnnnnnnnnnnnnnnnnnnggatggctataatggatttggtaatgatggaagcaatttggaggtggtggaagctacaatgattttgggatttacaacaatcagtcttcaattttggacccatgaagggaggaaattttggaggcagaagctctggcccctatggcgg

SEQ ID NO: 20796 - DNA, 1459 bp, Homo Sapiens
  misc_feature (277)..(285): n is a, c, g, or t
gcacgaggggcaccttagattaaaaagcgaatgggtcccggagcaacagctggtggtgctgagaagtccaatgttaaaattcagagcactccagtcaagcagtcaggtggaggttgctgctaaaatttgcctccatccttttctcacagcaatgaatttgcaatctgaacccaagtgaaaaaacaaaattgcctgaattgtactgtatgtagctgcactacaacagattcttaccgtctccacaaaggtcagagattgtaaatggtcaatactgacnnnnnnnnnattcccttgactcaagacagctaacttcattttcagaactgttttaaacctttgtgtgctggtttataaaataatgtgtgtaatccttgttgctttcctgataccagactgtttcccgtggttggttagaatatattttgttttgatgtttatattggcatgtttagatgtcaggtttagtcttctgaagatgaagttcagccattttgtatcaaacagcacaagcagtgtctgtcactttccatgcataaagtttagtgagatgttatatgtaagatctgatttgctagttcttccttgtagagttataaatggaaagattacactatctgattaatagtttcttcatactctgcatataatttgtggctgcagaatattgtaatttgttgcacactatgtaacaaaacaactgaagatatgtttaataaatattgtacttattggaagtaatatcaaactgtatggtgataagtattgttttgattcttatggttaaagggaaatagagccttgcattatattcaacacagccatttgtgtgtgcacaatgcaaactaaggtattctagacctatcttagagcagcatccagtatttgctttctagataatatgcccaataacatgacctagaggggcttctgtgctgtgtagggatttaaccaacttcagtggttcagggagctcaaactatatgtaaaacaagtttagaatgtatgctatctagcccgttatctctgatccttctctaaaaccatttgaaatagcttcattgatcaacatttcataaatgcatctgtggtagaggtagaaagcagcacctttcctaattggcaaatgatcagactaatgtgtgctaatgtttttcttccatgctttcagtcagattcaactattttatcctccacagttgcttaacttggtgttggaggagggtttaagcattaagataggaagcaggaaatttgattgctctaaatttagaaattatatccctaaaaattaaaacatgaatactgggtggtaatgataattgaggcaaatgtatttattttggtgacattttgcatatatgaagattttctgaaataggaccttcaagatcctacggggttttgtttggtttttatttgtgaggaataaaaatcttctgcccacactggcattttaagg

SEQ ID NO: 20797 - DNA, 1606 bp, Homo Sapiens
gcacgagggcagaattggcggctgcggcggctcgagtggtgttgtcatccgcggcgcggcggcggctctggggtttcagcgagagtcttctaatccgaggcgctgcgggacggtcattatattttggagagaacagattaagaagtacacaggctgctacccaagttgttctgaatgttcctgaaacaagagtaacatgtttagaaagtggactcagagtagcttcggaagactctgggctctcaacatgcacagttggactctggattgatgctggaagtagatacgaaaatgagaagaacaatggaacagcacactttctggagcatatggctttcaagggcaccaagaagagatcccagttagatctggaacttgagattgaaaatatgggtgctcatctcaatgcctatacctccagagagcagactgtatactatgccaaagcattctctaaagacttgccaagagctgtagaaattcttgctgatataatacaaaacagcacattgggagaagcagagattgaacgtgagcgtggagtaatccttagagagatgcaggaagttgaaaccaatttacaagaagttgtttttgattatcttcatgccacagcttatcaaaatactgcacttggacggacaattttgggaccaactgaaaatatcaaatctataagtcgtaaggacttagtggattatataaccacacattataaggggccaagaatagtgcttgctgctgctggaggtgtttcccatgatgaattgcttgacttagcaaagtttcatttcggtgactctttatgcacacacaaaggagaaataccagctctgcctccctgcaaattcacaggaagtgagattcgtgtgagggatgacaagatgcctttggcgcaccttgcaatagctgttgaagctgttggttgggcacatccagatacaatctgtctcatggttgcaaacacgctgattggcaactgggatcgctcttttgggggaggaatgaatttatctagcaagctggcccagctcacttgtcatggcaatctttgccatagctttcagtctttcaacacttcctacacagatacaggattatggggactgtatatggtttgtgaatcatccactgttgcagacatgctacatgttgttcaaaaagaatggatgcgactctgtacaagtgtcacagaaagtgaggttgcacgagccagaaatcttctgaaaacaaacatgttgttgcagcttgatggttcaactccaatttgtgaagatattggtaggcaaatgttatgctataatagaaggattcccatccctgagcttgaagcaagaattgatgctgtgaatgctgagacaattcgagaagtatgtaccaaatacatttataataggagtccagctattgctgctgttggtcccattaagcaactaccagattttaaacagatacgcagtaacatgtgttggcttcgtgattaaaatgctcctaatcaagattgtttgaacacatgtatttataaaacagagctagagaaaaataaaaatgaacatgtatatacatttggaaatttgaattaaatactgtatcatactttcaaagg

SEQ ID NO: 20798 - DNA, 3065 bp, Homo Sapiens
  misc_feature (705)..(794): n is a, c, g, or t
  misc_feature (815)..(824): n is a, c, g, or t
  misc_feature (1187)..(1199): n is a, c, g, or t
ccccgggctgcaggaattcggcacgagggtctggctcccgctctcacagccattgcagtacattgagctccatagagacagcgccggggcaagtgagagccggacgggcactgggcgactctgtgcctcgctgaggaaaaataactaaacatgggcaaaggagatcctaagaagccgagaggcaaaatgtcatcatatgcattttttgtgcaaacttgtcgggaggagcataagaagaagcacccagatgcttcagtcaacttctcagagttttctaagaagtgctcagagaggtggaagaccatgtctgctaaagagaaaggaaaatttgaagatatggcaaaagcggacaaggcccgttatgaaagagaaatgaaaacctatatccctcccaaaggggagacaaaaaagaagttcaaggatcccaatgcacccaagaggcctccttcggccttcttcctcttctgctctgagtatcgcccaaaaatcaaaggagaacatcctggcctgtccattggtgatgttgcgaagaaactgggagagatgtggaataacactgctgcagatgacaagcagccttatgaaaagaaggctgcgaagctgaaggaaaaatacgaaaaggatattgctgcatatcgagctaaaggaaagcctgatgcagcaaaaaagggagttgtcaaggctgaaaaaagcaagaaaaagaannnnnnnnnnnnnnnnnnnnnnnnnnnnnnnnnnnnnnnnnnnnnnnnnnnnnnnnnnnnnnnnnnnnnnnnnnnnnnnnnnnnnnnnnnataagttggttctagcgcagnnnnnnnnnncttgtctataaagcatttaacccccctgtacacaactcactccttttaaagaaaaaaattgaaatgtaaggctgtgtaagatttgtttttaaactgtacagtgtctttttttgtatagttaacacactaccgaatgtgtctttagatagccctgtcctggtggtattttcaatagccactaaccttgcctggtacagtatgggggttgtaaattggcatggaaatttaaagcaggttcttgttggtgcacagcacaaattagttatatatggggatggtagttttttcatcttcagttgtctctgatgcagcttatacgaaataattgttgttctgttaactgaataccactctgtaattgcnnnnnnnnnnnnngttgcagctgttttgttgacattctgaatgcttctaagtaaatacaattttttttattagtattgttgtccttttcataggtctgaaatttttcttcttgaggggaagctagtcttttgcttttgcccattttgaatcacatgaattattacagtgtttatcctttcatatagttagctaataaaaagcttttgtctacacaccctgcatatcataatgggggtaaagttaagttgagatagttttcatccataactgaacatccaaaatcttgatcagttaagaaatttcacatagcccacttacatttacaaactgaagagtaatcaatctactcaaagcatgggattattagaatcaaacattttgaaagtctgtccttgaaggactaatagaaaagtatgttctaacctttacatgaggactctattctttaactcccattaccatgtaatggcagttatattttgcagttcccacattaaagaagacctgagaatgtatccccaaaagcgtgagcttaaaatacaagactgccatattaaattttttgttgacattagtctcagtgaagactatgaaaatgctggctatagatgtcttttcccatttatctaaatatggactgctcaggaaacgagactttccattacaagtatttttaattaattgggccagcttttcaaacaaagatgccacattcaaaatagggtatattttcctatattacggtttgcccctttataaatccaagtagataggaagaaagaagacaaactttgcatctcagtatgaattattcaatttatttgaatgatttttctttacaaaacaaactcattcattagtcatgtttatctgcttaggagtttagggaacaatttggcaattttgtggttttcgagattatcgttttcttaaagtgccagtattttaaaatagcgttcttgtaattttacacgcttttgtgatggagtgctgttttgttatataatttagacttggattctttccatttgcatttgtttatgtaatttcaggaggaatactgaacatctgagtcctggatgatactaataaactaataattgcagaggttttaaatactagttaaatggctttcacttaagaacttaagattttgttacatatttttaaatcttgtttctaataatacctcttagcagtaccttttaaataagtataagggatggcaaagtttttccctttaaaaatactcactttatgcttataaataggttaatgggctgataaaaggttttgtcaaacattgcaagtattcggtgctatatataaaggaggaaaaactagttttactttcagaatgatttaaacaagatttttaaaaacaagatacatgcaagcgaacagcagggttagtgataggctgcaattgtgtcgaacatcagattttttgttaagaggagcaaatgactcaatctgatttagatggaagtttctactgtatagaaatcaccattaatcaccaacattaataattctgatccatttaaaatgaattctggctcaaggagaatttgtaactttagtaggtacgtcatgacaactaccatttttttaagatgttgagaatgggaacagtttttttagggtttattcttgaccacagatcttaagaaaatggacaaacccctcttcaatctgaagattagtatggtttggtgttctaacagtatcccctagaagttggatgtctaaaactcagtaaatggaagtgggagggcatttaaataattaatgtaaagccttgtaactgaagatgattttttttagaaagtggatagaactatttaatgccagatagttacagtgctatggggttaa

SEQ ID NO: 20799 - DNA, 1567 bp, Homo Sapiens
cgaggattctcctttaaaaagaacccagagtggtggcttgcaaatgtggcctgtctgcgaacagggacagttttaattccaggaaccactcagctgacccataaagacattctctacagactacaatcttcaaaagcaaactgcattatcaccaatgatgttttagccccagcagtagacgctgttgcatccaaatgtgaaaatctgcactccaagctgattgtatcagagaactccagagaggggtgggggaacctcaaggagttgatgaaacatgccagtgacagccacacctgtgtgaagacaaaacacaatgattatcatggccatattctttaccagtggaacaagtggatatccgaaaatgactgcacacacccacagcagttttggtttaggattatctgtaaatggaaggttctggctagatttgacaccctcagatgtgatgtggaatacctcagatacgggctgggcaaagtctgcatggagtagtgttttttctccgtggatccagggagcatgtgtattcacacaccatttaccccgttttgagccgacttctatcttgcaaacactctccaagtaccccatcacagtcttctgttcagcaccaactgtataccgaatgcttgtacagaatgatataacagctataagtttaaaagcttaaagcattgtgtgagtgctggggaacaattacccctgacgtgactgaaaatggagaaacaagacgggcctggatatctacgaaggatatggacagactgaaacggtgctaatctgtggaaattttaagggaatgaaaattaaacctggctcaatgggaaaaccttctcctgctttcgatgttaagattgtagatgtaaatggcaatgttctacctcctggacaagaaggagatattggcattcaagttctacccaaccgaccatttggcctttttactcattacgtagataatccttcaaaaacagcttcaactctacgaggcaatttctatatcactggggacagaggatatatggataaagatgggtatttctggtttgttgcaagagcagatgatgtcatattatcctctggctatcgaattggaccatttgaggtagaaaatgccctgaatgaacacccttcagttgcagagtcagctgttgtcagcagcccagaccccatcagaggagaggtagtaaaggcttttgtcgttctaaatcctgattacaagtcacatgatcaagaacaactaataaaggagattcaggagcatgttaaaaaaactacagcaccttacaaatatcccagaaaggtagaatttattcaagagctgccaaagactatcagtgggaagacaaaaagaaatgaactgaggaagaaagaatggaagacaatttaaagttgtttcattaattaccatatctataaaacaaacatagtatctgtcaatctctagaaaccacaagatgatggagaggtcataaaaactgtggtagtatgcttagaaactgttgatttaaaatatctttgtggttatgatatcagaggctaaattttgaaataaaatatttgg

SEQ ID NO: 20800 - DNA, 2895 bp, Homo Sapiens
gcacgaggctgagcctactcaatgtcgcggctctcccgctcactgctttgggccgccacctgcctgggcgtgctctgcgtgctgtccgcggacaagaacacgacccagcacccgaacgtgacgactttagcgcccatctccaacgtaacctcggcgccggtgacgtccctcccgctggtcaccactccggcaccagaaacctgtgaaggtcgaaacagctgcgtttcctgttttaatgttagcgttgttaatactacctgcttttggatagaatgtaaagatgagagctattgttcacataactcaacagttagtgattgtcaagtggggaacacgacagacttctgttccgtttccacggccactccagtgccaacagccaattctacaggtacaacaaataacactgtgactccaacctcacaacctgtgcgaaagtctacctttgatgcagccagtttcattggaggaattgtcctggtcttgggtgtgcaggctgtaattttctttctttataaattctgcaaatctaaagaacgaaattaccacactctgtaaacagacccattgaattaataaggactggtgattcatttgtgtaactcactgaagccaaaatactatcttttaagatgtcccacatggaagacgctattccaggatctttaaatttccatggatgcatataggatgtttgggagcatcatccgtgaagaaaaaatcaattaaatcattgtgttcaacaggaatatttaaaatattctgcatgaatcctgtggctgtcttattttaaatagctgctgctgtgggattatattttttttccttaacatgccaaatataactttctgaaagtgatggaaaatgttgtcttgtgcagacaacatcatggctcttggcagtttaaatttagtaattttaatttagtgaacagaattgagaagaacgtgccaaatgagaatcaattaggtggatttttggctgtcatttcaaaagtggaataaatttattaatttagtagtactaaatggtatccttagattaaaattttgtgcttgataacagctgttttttctacattagaaataagatgccacacaaggaactacattccagatttaaagaaatgaaaggataccattagtgtgtataacagattattgttcatacttgtaaagcatcttatgtcattgagaatataaagaacagtgccttagaagacagtgaaaggtaagctctagcttaatgtctatgatttgttctttgacattaaggaaggtaaggattggtcagaggatgtaacttgatgtgagcagtagtaaacctgttttagatatcatactgttaatattttattgaaaatttatttcagagcggagaaacttaagctaaagtctgttatacagaattgaaagccttcgtatcttgaacctcccaacatttttcttatggctgttgaaaagtatagagctaaattgatttaattacactttcctttgtactttaaaaaaaagtatgctagcactattgtaccttgaaaggatttccaccagactgtcttgagtagtgacttctttggtgaggcaagaaggatatacattattttagaatcatttactatttaaatgagacaatcatattattttagaatcatttattttaaatgagacaatcattttaagttttaagataacagaagtgaccaatgtaatttcacaacacctaaggattttttggttgatcaggttactgtagatttttactgattgtcctggatgaatagactgtgctttttctttttctctcccttccttcttggtttcccatagtataataagcatgcatactttaacttctatagttttctcctttagagggtcgtcttcagttttagaggtttacttctcccttgcctttgactcattggactagtgcagaggctttaagtagtttaaaatgggcttttgcttttctaggtcattaacgttttttatttagtttctttagccaatagtggctgagtttcgcacttgattttcaatattttatagtaagaaatgacaaactgctttgtttcatttcataaacaaactctgcatttagataactattaaaggttgttaagatgaagatttactgtttctttgttactcgttggtacagctgtttgttttacttgcacatttgtacatatacttaatgttttcaagtgccttaattgtttaaaatctctggcttcaaagtttcttggggaaaggtcggtttacctcacattttttgtttccattagtaatattctaggtacctcacaaaatgtattatggtgccatggctgttagtttttagtgagtgctgtaggattaattcgaaaataggcagaattccattcctcccaaggtggcaaaaattagctatactgatgtaattgtcatttacctgggtatgaattccctgacacacattcatgtcaacatatgtagcaaattttgtgaaaacataacaatttgaagcttctgtaattttgagcactgctctaacaacaagcataatataaaattagttagattttgcaagtctacaaatgagctcttgcaacagaactcacagcctttttacttttttcccctaactttagcaatgtagtatcttgagccattaatttttgggtttttttaaaatccagaaggtatatagaaaccttttcagatttttcatctgatttgttcttgcagatgttcttctatcaaataccttattttaccttacagatatttgttgcacaggcagatactgctgtatttagacatttctatttcagttcattaaaaactgcaaaaccaatctgtatcatgtaccaaactgacttaaaataaatctacaaaaagtacctcgtgc

SEQ ID NO: 20801 - DNA, 876 bp, Homo Sapiens
  misc_feature (480)..(488): n is a, c, g, or t
gcacgaggtgacagagcccatgcagggctttagatttggacacacaagagttgataacttcctcatgaactccttgcctgatctaaactcatattatgggttctgactgtttgagtaatcatcttcaaggttaaacctcttggcagttacccttttcacaaagtgcacagtgggaatcgagaatcgatagggttaattttggagcagtggcttataccattcacctctgtttttttgtgattatttcacagataatgagaccttaataacaaataggcgtaaaaaaattttcacattgaaatgatagaaacatttgatgtaataaaacttggttggcttgatattttaaggaattgaaacctagcaatcttattggagagacaagaattggtctccagctgcctttgatcaagattcgggtgcaagtggagcaggagccatatacctggagggaatgtgctttgtcacaccaaagaggannnnnnnnncttcaaacttgtatgttgcctaggtttcaaattctttgccgcaaggctgatctgctttcattaactggaattctgtaggagatactggtgacctaagctaagttgcactcagcatactcagtgtcaagctaatgaggttctattataaaggttctacttttaatctgagggaaaacatgttcagggcttctagaacactaaaaaatttggcttaaaccagtgttcagtctggtgccaaacttcgaatggaatacaaattcacataatctgaactttgttcacaggttatcctaatagagtaattcttcactttgctctattgaactgtcttaaggatttgtttaaacagctaagttacttgattaaaataatgataaaattgtaaaaa

SEQ ID NO: 20802 - DNA, 2061 bp, Homo Sapiens
gtaccggtccggaattcccgggtcctacattaaaagggtccgggaaggctttgtggagtacaccgaacacgttgtcaaactgatggtccctttactgaaattttatttccacgatggtgttcgagtggcagcagcggaatccatgcctcttctcctggagtgtgcaagagtccgtggtcctgagtatctcacacagatgtggcattttatgtgtgatgctctaattaaggccattggtacagaaccagattcagacgtcctctcagaaataatgcattcttttgcaaagtgcattgaagtaatgggagatggatgccttaataatgaacactttgaagaactgggaggtatattgaaagcaaagcttgaataacattttaaaaatcaagaattacgacaagttaaaagacaagatgaagactatgatgaacaggtcgaagagtcactacaagatgaggatgataatgatgtttatattctgaccaaagtgtcagatattttacactcaatattcagtagctacaaagaaaaggtgttaccatggtttgaacagctgcttccattaattgtcaacctcatttgtccacatagaccatggccagacagacaatggggattatgcatctttgatgatgtcatagaacactgtagtccagcctcatttaaatacgcagaatatttcttaagaccaatgctccaatatgtatgtgacaacagcccagaagtcaggcaagcagctgcatatggcctgggagtcatggcacagtacggtggagataattatcgccctttttgtacagaagcacttcccctgctggtaagagttattcagtctgcggattctaagaccaaagaaaatgtcaatgctacagagaactgcatctcagcagtagggaaaatcatgaagttcaagcctgactgtgtaaacgttgaagaggtccttccacactggttgtcttggcttccactacatgaagataaagaagaagctgttcagactttcaattatctgtgtgacctgattgaaagtaatcatccaattgttcttggcccaaacaataccaatctgcccaaaatatttagtataattgcggaaggagaaatgcacgaggggaattaaacatgaagatccttgtgccaaacgtctggccaatgtcgttcgccaagtacagacttctggaggactgtggactgagtgcatagcacagctcagtcctgagcagcaggccgccattcaggagctcctgaactctgcgtgaagggccttaatgtcacccaccagaaaactaactccaaataaacgcttaccctttcctttaggtttctttgttttgtttttgagcaaaagagatcggtagtgttgtgtgtaggccattcttctggagagccacaagcaggaagagcagcgctgtgttgcagaatggagtttccatggatttctaccagaccactgaaggagttcctggaagccctgcggtagctagcactgaagactatttttctattggtataacccgcccacctgaaggggaaagggaaatcaaattaatttttctcgttagacataaggaaatttaaggaaaaacagctttaagaacagttactcagcgtagatgtgtgttcacacaaattgctctgcattcagtgttcattgtgaattgggagtgtgagtctttctgtagggtagaaagaagcctcctacccagcaaaccagtagacccaaaagttgaaaaaaactgatgacagacaacaagcatgaagatggcatatttgatgtcactttggttctttttcccagaaggcttatacagtgactcagtcgggaagctttccagcttccagcccttgaatgtgaagtgtcattggcatgtctggcagtagtctctcattcactcctcaataaacaacattgaatacaaaagaggcttgtgtaaaaactcagtactgtctggcttggattcatttcatgtttttaatataagaatgatctaatatttttttaaagtaatagctatcagtaatagctgagtgtttttcccctaatattttccttgtgcaatt

SEQ ID NO: 20803 - DNA, 2192 bp, Homo Sapiens
  misc_feature (1928)..(1945): n is a, c, g, or t
  misc_feature (1949)..(1989): n is a, c, g, or t
  misc_feature (2129)..(2145): n is a, c, g, or t
gcacgaggaccgccgctgatcaatgaggacgtgaagcgcacagtggacctaagcagccacctggctaaggtgacggccgaggtggtcctggcgcacctgggcggcggctccacgtcccgagctacctctttcctgctggctttggagcctgagctcgaggcccggctggcgcacctgggcgtgcaggtaaagggagaagatgaggaagagaacaatttggaagtacgtgaaaccaaaattaagggtaaaagtgggagattcttcacagtcaagctcccagttgctcttgatcctggggccaagatttcagtcattgtggaaacagtctacacccatgtgcttcatccgtatccaacccagatcacccagtcagagaaacagtttgtggtgtttgaggggaaccattatttctactctccctatccaacgaagacacaaaccatgcgtgtgaagcttgcctctcgaaatgtggagagctacaccaagctggggaaccccacgcgctctgaggacctactggattatgggcctttcagagatgtgcctgcctatagtcaggatacttttaaagtacattatgagaacaacagccctttcctgaccatcaccagcatgacccgagtcattgaagtctctcactggggtaatattgctgtggaagaaaatgtggacttaaagcacacaggagctgtgcttaaggggcctttctcacgctatgattaccagagacagccagatagtggaatatcctccatccgttcttttaagaccatccttcctgctgctgcccaggatgtttattaccgggatgagattggcaatgtttctaccagccacctccttattttggatgactctgtagagatggaaatccggcctcgcttccctctctttggcgggtggaagacccattacatcgttggctacaacctcccaagctatgagtacctctataatttgggtgaccagtatgcactgaagatgaggtttgtggaccatgtgtttgatgaacaagtgatagattctctgactgtgaagatcatcctgcctgaaggagccaagaacattgaaattgatagtccctatgaaatcagccgtgccccagatgagctgcactacacctatctggacacatttggccgccctgtgattgttgcctacaagaaaaatctggtagaacagcacattcaggacattgtggtccactacacgttcaacaaggtgctcatgctgcaggagcccctgctggtggtggcggccttctacatcctgttcttcaccgttatcatctatgttcggctggacttctccatcaccaaggatccagccgcagaagccaggatgaaggtagcctgcatcacagagcaggtcttgaccctggtcaacaagagaataggcctttaccgtcactttgacgagaccgtcaataggtacaagcaatcccgggacatctccaccctcaacagtggcaagaagagcctggagactgaacacaaggccttgaccagtgagattgcactgctgcagtccaggctgaagacagagggctctgatctgtgcgacagagtgagcgaaatgcagaagctggatgcacaggtcaaggagctggtgctgaagtcggcggtggaggctgagcgcctggtggctggcaagctcaagaaagacacgtacattgagaatgagaagctcatctcaggaaagcgccaggagctggtcaccaagatcgaccacatcctggatgccctgtagcccctgcccgcatcctccagggggcccagggtgcctgcactttgctgtggcaggcagattgggtggtagtgggaggttgtgcatggaggccagtgaaagctgacatctgtaaaaggccttcaaggaagagaaaccaggccctgcgtcaggcagtgtgagtttgccgtttgtccttaacnnnnnnnnnnnnnnnnnnaaannnnnnnnnnnnnnnnnnnnnnnnnnnnnnnnnnnnnnnnnatctttgtgttttgaacaaaggaattttcaatatttgattggtattctgttttgaagtctaggatatttttcagcctataaagccccctgttttatgcccttctaattttgatgtttgggtattgtgtgagtgcatgtgnnnnnnnnnnnnnnnnnaaagcgtgtgtgaacaaatggaaataaagcagggactgtgaacattt

SEQ ID NO: 20804 - DNA, 2395 bp, Homo Sapiens
  misc_feature (166)..(175): n is a, c, g, or t
  misc_feature (1185)..(1226): n is a, c, g, or t
gcacgaggcaaacatgtagaatatgctctttaatttagtaaaatatttttttaaaaggtagagatgctttgttattgtaatcataaacttcctgaaattcttgtaatttttttcccatacttatcagaagtgtgtttaccaacttatttttgtttgaaagtgtgannnnnnnnnnccttcccaacctctcttgcaaaaaaagaaatgggtttctgctaatgaattgagcagacatctaatattttatatgccttttgagctgtgtaacttaatatttggatacttgacaatttgttttattatgtaattgataaaatggtgatgtgtattaatgttagttcaaccatatatttatactgtctggggatgtgtggttatagttctgtgggagaaataattttgtcagtgttcaccagcttgtaaaaacttagtgcgagagctgaaacatctaaataaataatgacatgcatttatcatcattgagattggtttgcttaaaattaacttattttgtagaagacaaaatgaattgcacttcacttaatgtgtgtcctcatctttttacaaataaatgaaggattataaatgatgtcagcattttagtaaacttttagacaaaatttgttagggtcattcatgaaaactttaatactaaaagcactttccattatatactttttaaaggtctagataattttgaaccaatttattattgtgtactgaggagaaataatgtatagtagaggacagccttggtttgtaaagctcagttccactagttcatggttttgtgcaacttctgagcctcagttttctcctttgcaaattaataattacatacctttatagattttgaaattaatttaaatattagtatttggtacatgaaggcttaatgttaagtttcctttaatgacccacaataatccctttgatcacgttaatctaaatctagatgtctttgtctaattttttttgaatagcagttataaatgtaaaggactcaaagtttaagtaaaaagtgatactccaccttgtgtttcaaagaatttagttccacctcttcataccagtttaacacttaatatatttcattggattttagacagggcaaaaggaagaacaggggcctctggaggcccttggttatttaaatcttggattatttgtgatagtaatcacaannnnnnnnnnnnnnnnnnnnnnnnnnnnnnnnnnnnnnnnnnaaaggaaatgcagcctagtcttgagaacataattttatataatcaattactaaatgttaaactattaccacacagcccataaaacagcatttgcgtttattgagagagaggatgtgccatcatgattaatgaaaactatcttttgagtttgaaaagaaattaatttgcagtgtttggattgtatatatggtgctaaaaataaattaatttactttataaaccttatctgtacattatacgatgtgatgaaatttgctttttatccaaatattttgtatcttgtaaatatggctaattataggaatgcctataatacatcttagattccttatatctaataagagttcaaagagttatgagttgaagtcttgaatgcaggaaactatctgatagtgttctaaaatttggttacttgggtttggatacccttagtgggatgatgtaaatagaggctagctacctaggcttgtctatagcaaccataatgttgatgtaagtaatgcggttactgaatcataagaaaatgccatctctttttagttgaaggaaaactctggaagtaggtgccattggtcattctgcagtgcactgcaaccattgtttcccctagtgccctcttttccctagggcattgctctcctattcccacgccttaacacagctctatacctagaagcagccagcccaggcatgcagtcacatttaatcacatcccccttctagagtgcttcaaaatgatgtagtccctcaacttggctaaagaatctcaatctcttgaaatttatttttttaatgtcatattcatctggtaaatatctactgtttgccaggcatttaagaatatggcaaagaacataaaagatggtgtcaccagattttggtcaccaatgagtacccgacccgttgccatgattaagagagaatgctttctattggagtttcaggaaatataatttgagaatactttaaagggaagtggaagtataagtgaatgatatttttcttttacatgtaaacaatgaagttatttcaaagttaagttttaaacaaaatacatgaagtagtgtctgccatacatgttaatattctacattcttgcttccttaaattaatatgtttgtgtgtatatatgtgcctcacacctgaattgaaaattaggggcctcgtgc

SEQ ID NO: 20805 - DNA, 1911 bp, Homo Sapiens
cccccgggctgcagggaactggcggaagataaagagaactacaagaaattctatgagcagttctctaaaaacataaagcttggaatacacgaagactctcaaaatcggaagaagctttcagagctgttaaggtactacacatctgcctctggtgatgagatggtttctctcaaggactactgcaccagaatgaaggagaaccagaaacatatctattatatcacaggtgagaccaaggaccaggtagctaactcagcctttgtggaacgtcttcggaaacatggcttagaagtgatctatatgattgagcccattgatgagtactgtgtccaacagctgaaggaatttgaggggaagactttagtgtcagtcaccaaagaaggcctggaacttccagaggatgaagaagagaaaaagaagcaggaagagaaaaaaacaaagtttgagaacctctgcaaaatcatgaaagacatattggagaaaaaagttgaaaaggtggttgtgtcaaaccgattggtgacatctccatgctgtattgtcacaagcacatatggctggacagcaaacatggagagaatcatgaaagctcaagccctaagagacaactcaacaatgggttacatggcagcaaagaaacacctggagataaaccctgaccattccattattgagaccttaaggcaaaaggcagaggctgataagaacgacaagtctgtgaaggatctggtcatcttgctttatgaaactgcgctcctgtcttctggcttcagtctggaagatccccagacacatgctaacaggatctacaggatgatcaaacttggtctgggtattgatgaagatgaccctactgctgatgataccagtgctgctgtaactgaagaaatgccaccccttgaaggagatgacgacacatcacgcatggaagaagtagactaatctctggctgagggatgacttacctgttcagtactctacaattcctctgataatatattttcaaggatgtttttctttatttttgttaatattaaaaagtctgtatggcatgacaactactttaaggggaagataagatttctgtctactaagtgatgctgtgataccttaggcactaaagcagagctagtaatgctttttgagtttcatgttggtttattttcacagattggggtaacgtgcactgtaagacgtatgtaacatgatgttaactttgtgtggtctaaagtgtttagctgtcaagccggatgcctaagtagaccaaatcttgttattgaagtgttctgagctgtatcttgatgtttagaaaagtattcgttacatcttgtaggatctactttttgaacttttcattccctgtagttgacaattctgcatgtactagtcctctagaaataggttaaactgaagcaacttgatggaaggatctctccacagggcttgttttccaaagaaaagtattgtttggaggagcaaagttaaaagcctacctaagcatatcgtaaagctgttcaaaaataactcagacccagtcttgtggatggaaatgtagtgctcgagtcacattctgcttaaagttgtaacaaatacagatgagttaaaagatattgtgtgacagtgtcttatttagggggaaaggggagtatctggatgacagttagtgccaaaatgtaaaacatgaggcgctagcaggagatggttaaacactagctgctccaagggttgacatggtcttcccagcatgtactcagcaggtgtggggtggagcacatgtaggcacagaaaacaggaatgcagacaacatgcatcccctgcgtccatgagttacatgtgttctcttagtgtccacgttgttttgatgttattcatggaataccttctgtgctaaatacagtcacttaattccttggc

SEQ ID NO: 20806 - DNA, 789 bp, Homo Sapiens
gcacgaggctgacattcgtcttgccaagctttatggtgctgatggtttggtttttggggcattgactgaagatggacacattgacaaagagctgtgtatgtcccttatggctatttgccgccctctgccagtcactttccaccgagcctttgacatggttcatgatccaatggcagctctggagaccctcttaaccttgggatttgaacgcgtgttgaccagtggatgtgacagttcagcattagaagggctacccctaataaagcgactcattgagcagaaattcatctgttgccatgggagcctcactttcttgctcagaatattccctaaaggtaacagatgtgaccaaagtaaggactttgaatgctatcgcaaagaacatcctggtgtagccagacctctctgagagacatggatatcacaggatgaaggtagaactataatctgcaattctctatgacacagctttaaccttcttctctggccaggacagtcgcaatctttgttttaagtttcacatgaccatggagaatgtgcccaagaagaaaaagaatttgaaacagagatacagtcacttcctttgcttagtcttaccagtgattgtcatcatggttaaagctggtctgtgcttcttccatagacagaagcttagtctgttttcagtggaattaattgatgaactgggaaaattttaactgcatggtatgaattcagagtgtgacttaagggtcaattcaaagcagtattttgacttttcatttgtaaaataaaaatttccactattac

SEQ ID NO: 20807 - DNA, 1678 bp, Homo Sapiens
gcacgaggctttgacaccttttttgggcagcggaacggggaggaaggcatggacattgatgacccattctctggcttccctatgggcatgggtggcttcaccaacgtgaactttggccgctcccgctctgcccaagagcccgcccgaaagaagcaagatcccccagtcacccacgaccttcgagtctcccttgaagagatctacagcggctgtaccaagaagatgaaaatctcccacaagcgtggaaagaaggaaccaaaatcactttccccaaggaaggagaccagacctccaacaacattccagctgatatcgtctttgttttaaaggacaagccccacaatatctttaagagagatggctctgatgtcatttatcctgccaggatcagcctccgggaggctctgtgtggctgcacagtgaacgtccccactctggacggcaggacgatacccgtcgtattcaaagatgttatcaggcctggcatgcggcgaaaagttcctggagaaggcctccccctccccaaaacacccgagaaacgtggggacctcattattgagtttgaagtgatcttccccgaaaggattccccagacatcaagaaccgtacttgagcaggttcttccaatatagctatctgagctccccaaggactgaccagggacctttccagagctcaaggatttctggacctttctaccagttgtggaccatgagagggtgggagggcccagggagggctttcgtactgctgaatgttttcagagcatatattacaatctttcaaagtcgcacactagacttcagtggtttttcgagctatagggcatcaggtggtgggaacagcaggaaaaggcattccagtctgccccactgggtctggcagccctcccgggatgggcccacatccacctccagtccctggcccaggggtgagaggcagaccagcagatggacttgatccctctgtgtctttttgcttctggctggtagataatgtcaacctgcagtcttgattcccagaccctgtacactcctccttttctgttgtgtgatcagtttgtgctttattctgtatttgtctcccatgtcttgctcttctcctggagaattctgtcttctctttggccatctcaaattgagaacctaaactattcctgcagaactgcctggttggcgtccacaagcaatacctctcgttccagcaggaccaagggagccagcctccagtgagtgactccagcaagtgcagccacctctcccttgatggtctgggagcctggcctcagcaaggggccttcctgacctctggctccagtgaagctgaatgtcctcactttgtgggtcacactctttacatttctgtaaggcaatcttggcacacgtggggcttaccagtggcccaggtaattttttgtttcatggactatggactctttcaaagggatctgatccttttgaattttgcacagccctagatacaatcccttttgataaaagggtctttgcttctgattacaggagcactgtggaacgtctgtaaatatgtttttatatttccatgtatagttggtgtacactcaaaacctgtccccggcagccagtgctctctgtataggggccataatggaattctgaagaaatcttggggagggaaggggagttggaacaaatgtctg

SEQ ID NO: 20808 - DNA, 1465 bp, Homo Sapiens
gcacgagggagtcgttggcgctgtcatggcgggtgtgctgaagaagaccactggccttgtgggattggctgtgtgcaatactcctcacgagaggctaagaatattgtacacaaagattcttgatgttcttgaggaaatccctaaaaatgcagcatatagaaagtatacagaacagattacaaatgagaagctggctatggttaaagcggaaccagatgttaaaaaattagaagaccaacttcaaggcggtcaattagaagaggtgattcttcaggctgaacatgaactaaatctggcaagaaaaatgagggaatggaaactatgggagccattagtggaagagcctcctgccgatcagtggaaatggccaatataattattaagtgactttggtgtgttcatgggaaactgatgtaattaaatattctgttatattaagagcgtgttcttattactgacattttgtaatcaagaaaagtgatatagaaaatatgtaggagactgttaaaattggtgattatggtaatatggtcatgtgaatcaatttttgatttataaagtactcacacaagttgtttcaaagatgatatttctgtgaacagagaggccatgggaagatttgaaaattattaaagaaaaattcctacagattttcaatgcagagaccataatcaaaaagtaaactttctttagtagtatgttcaatacatcatttaattttttaagttatcctgaagaaggaaaggtccttaattattatagtctaaacaaatttatagattactgtttgaagtaaataatacgagtgaatattttcaaatgtgataaaatagcacaagtggctggtgataaaatttgaaattatggttaacctcagctgtgatcttatgtatgtaaagtgaaatttaaatagataattataggttgattacaaaatccatagtgtcattttattttagtcattattgaattataccatttactctggtttcttatagtcttaattttattatattttgttgttactgtattatatttgaaacccttcaaattagaatacattgtacagttaaagaaattgacttggtacttaaaagaaagatttccccttgcatacaggttattggagaaattttccttttgttgcatttgtggaagttagttttctggcccgtggcctttaattttcttaatcaacctaattacatcaggatagaggtagagtttctgtaaaagaagagaccttaagagttcctgaaatttatatctggcataccgataggcttatattcaaaacatcttagtcatacgaccataaattaaaagtggagtccctaaatagtttgcagtacgtttctaatataagtgtaggtgggtatcaaaccaagacaaatgctgttcagggaaagaagttggcaagcttaaggttaaacaaaaataaaattacatgtgttttccccttcct

SEQ ID NO: 20809 - DNA, 2240 bp, Homo Sapiens
  misc_feature (2067)..(2112): n is a, c, g, or t
gcacgaggcctctccaaaatccggattgctgaatcttccctgttgcctataagggctccaaaccacctcttgacaatgggaaactgggtggttaaccactggttttcagttttgtttctggttgtttggttagggctgaatgttttcctgtttgtggatgccttcctgaaatatgagaaggccgacaaatactactacacaaaaaaaatccttgggtcaacattggcctgtgcccgagcgtctgctctctgcttgaattttaacagcaccctgatcctgcttcctgtgtgtcgcaatctgctgtccttcctgaggggcacctgctcattttgcagccgcacactgagaaagcaattggatcacaacctcaccttccacaagctggtggcctatatgatctgcctacatacagctattcacatcattgcacacctgtttaactttgactgctataacaaaaaccgacaggccacagatggctcccttgcttccattctctccaacctatctcatgatgagaagaaggggggttcttggctaaatcccatccagtcccgaaacacgacagtggagtatgtgacattcaccagcattgctggtctcactggagtgatcatgacaatagccttgattctcatggtaacttcagctactgagttcatccggaggagttattttgaagtcttctggtatactcaccacctttttatcttctatatccttggcttagggattcacggcattggtggaattgtccggggtcaaacagaggagagcatgaatgagagtcatcctcgcaagtgtgcagagtcttttgagatgtgggatgatcgtgactcccactgtaggcgccctaagtttgaagggcatccccctgagtcttggaagtggatccttgcaccggtcattctttatatctgtgaaaggatcctccggttttaccgctcccagcagaaggttgtgattaccaaggttgttatgcacccatccaaagttttggaattgcagatgaacaagcgtggcttcagcatggaagtggggcagtatatctttgttaattgcccctcaatctctctcctggaatggcatccttttactttgacctctgctccagaggaagatttcttctccattcatatccgagcagcaggggactggacagaaaatctcataagggctttcgaacaacaatattcaccaattcccaggattgaagtggatggtccctttggcacagcccagtgaggatgttttccagtatgaagtggctgtgctggttggagcaggaattggggtcaccccctttgcttctatcttgaaatccatctggtacaaattccagtgtgcagaccacaacctcaaaacaaaaaaggttggtcatgcagcattaaactttgacaaggccactgacatcgtgacaggtctgaaacagaaaacctcctttgggagaccaatgtgggacaatgagttttctacaatagctacctcccaccccaagtctgtagtgggagttttcttatgtggccctcggactttggcaaagagcctgcgcaaatgctgtcaccgatattccagtctggatcctagaaaggttcaattctacttcaacaaagaaaatttttgagttataggaataaggacggtaatctgcattttgtctctttgtatcttcagtaatttacttggtctcgtcaggtttgagcagtcactttaggataagaatgtgcctctcaagccttgactccctggtattctttttttgattgcattcaacttcgttacttgagcttcagcaacttaagaacttctgaagttcttaaagttctgaagttcttaaagcccatggatcctttctcagaaaaataactgtaaatctttctggacagccatgactgtagcaaggcttgatagcagaggtttggtggttcagagttatacaactaatcccaggtgattttatcaattccagtgttaccatctcctgagttttggtttgtaatcttttgtccctcccacccccacagaagatttctaagtagggtgactttttaaataaaaatttattgnnnnnnnnnnnnnnnnnnnnnnnnnnnnnnnnnnnnnnnnnnnnnntaccgagaaccccatcctcatataacaccaacagtgtacatgtttactgtcacttttgatatggtcttatccagtgtgaacagcaattattattttgctcatccaaaaataaagggattttcttcttc

SEQ ID NO: 20810 - DNA, 1380 bp, Homo Sapiens
gcacgaggttttttttcagtttaaaatgttttatttcatagctcataaaaaagtatgtatgtacaagactcaagtaaatagaaaggcagctttcaatcacaaatcagtttttcagattttactgtggaagcatatttaatgcacacatttgaatgttacacataaataattttaacgatggagtccaagttctggattttacattagatctgcatatataagacacttgtggtcaaatttcaagattggtaaagccagtttcaagctgcttatattttgagtacaggtttcactattacaaatatatgatgttaaactaacaaactcatgaccttcaaagatgtcttcgtcccacgcacacacatttgtaatttgtgtccatttgctatttcccttcttctataatcttcaaattatatagttatgcattgagttccctatgcatctcacccatctcctttatctcagccttctcatactttgccattctcttctttctggaaataaccagcacaacaattccagcaacaactgctatcaccacaaccacaataacagcaataacaccagcttttagaccctgcattgagaattcaggtgctttttcatcaacataataaattaaagtttgaccaggatccagatccagttgttccccatttactgtcaggtccattttcttagaatgaaacaaggattcacctttaacatctttttcaaaataataagccacatcagctatgtccacatcattctgagttttttgagaagaattttgaaccagatcaatagtgataacattattctcatacaaaatactcgtgataaattttggatccagttgataacgcgttgtgatctccttctgaagtgcagtccgcaaacttttactatcataaggtttttctcttgctttgtgttttagttcaatgatgatccagtaggttctcactcgctcagagcaggttatttcagtgtccttgtctgttcttctgaccccagcagtgttcacacaccagcacatggaggtgccgttgcactgcttggccttaaagagcccgctctcatcgcagtcaggatcataaagcccatcattgttctggagggccccttcaggttttgctcttctcccaagttttgagccattcatttctgccttcatcaccaaacatttggcagccagctttgagcaaatgacagtattttgtgcaccaactgaagtacactggcattgacgattattattcacaaagcagtttacggccagcttgtagttttcacagacacattcttcctgagctgcggcaaaagtcgccgtcgccgcggcaagcagaagcccgaacgcgaggactagcgctctgtgcgcgcggcggggcggag

SEQ ID NO: 20811 - DNA, 1385 bp, Homo Sapiens
ccacgcgtccgcagaccgctcccactatgcaaaatgtaacccatacatggattctccacaatcaataggtttccaagcaacaatcagtgctccacacatgcatgcatatgcgctagaacttctatttgatcagttgcatgaaggagctaaagctcttgatgtaggatctggaagtggaatccttactgcatgttttgcacgtatggttggatgtactggaaaagtcataggaattgatcacattaaagagctagtagatgactcagtaaataatgtcaggaaggacgatccaacacttctgtcttcagggagagtacagcttgttgtgggggatggaagaatgggatatgctgaagaagccccttatgatgccattcatgtgggagctgcagcccctgttgtaccccagacgctaatagatcagttaaagcccggaggaagattgatattgcctgttggtcctgcaggcggaaaccaaatgttggagcagtatgacaagctacaagatggcagcatcaaaatgaagcctctgatgggggtgatatacgtgcctttaacagataaagaaaagcagtggtccagggatgaattgtaaaagcaacatcagcttgaccagtataaaattacagtggattgctcatctcagtcctcaaagctttttgaaaaccaacaccatcacagcttgttttggactttgttacactgttattttcagcatgaaaatgtgtgtttttttagggtttctgattcttcaagaggcacagagccaaattggtagaggaaggatgcaaagtataaatttgtgtaatattactttaacatgcccatattttacttggaaatattaaaagaaagggttctgtaaaatggaaaacttagtttgtgaattgattttgaggagtggtttttcttttcttggacacttaattctgttctgatattaatttatcagattgcttttgtgcattggataacaccaccattcacaagttaagattcttggtatttggatatctgttagatgctactaagaaaatagagatgagctttctttttaaagcttttgatgtggtgtcatagaatagcatgttgtagatacaatcagctgctttgttaccttaaaactaggcatttgtaaatattaaaccataagatggcaggtgatgtcctgtaaacactcagctgttcagattggacataactgacttagttcttcccttctctctctctcaaaattataggagacttgtagtttagtgtggttttctgtttctaatttgctgctgataatgtatatgaacttaacatgctgtgtaagctgtgtcctagttcttgaacagtttatgcagtgctgctttgccaaataaagttaaaagtaaaagagg

SEQ ID NO: 20812 - DNA, 1486 bp, Homo Sapiens
  misc_feature (1297)..(1341): n is a, c, g, or t
tcccccgggctgcaggaattcggcaagagggaagagcgtcacctgaacaagatgcagaaccatggctatgagaaccccacctacaaatacctggagcagatgcagatttaggtggcagggagcgcggcagccctggcggagggatgcaggtgggccggaagatcccacgattccgatcgactgccaagcagcagccgctgccaggggctgcgtctgacatcctgacctcctggactgtaggactatataaagtactactgtagaactgcaatttccattcttttaaatgggtgaaaaatggtaatataacaatatatgatatataaaccttaaatgaaaaaaatgatctattgcagatatttgatgtagttttcttttttaaattaatcagaaaccccacttccattgtattgtctgacacatgctctcaatatataataaatgggaaatgtcgattttcaataatagacttatatgcaggctgtcgttccggttatgttgtgtaagtcaactcttcagcctcattcactgtcctggcttttatttaaagaaaaaaaaggcagtattccctttttaaatgagctttcaggaagttgctgagaaatggggtggaatagggaactgtaatggccactgaagcacgtgagagaccctcgcaaaatgatgtgaaaggaccagtttcttgaagtccagtgtttccacggctggatacctgtgtgtctccataaaagtcctgtcaccaaggacgttaaaggcattttattccagcgtcttctagagagcttagtgtatacagatgagggtgtccgctgctgctttccttcggaatccagtgcttccacagagattagcctgtagcttatatttgacattcttcactgtctgttgtttacctaccgtagctttttaccgttcacttccccttccaactatgtccagatgtgcaggctcctcctctctggactttctccaaaggcactgaccctcggcctctactttgtcccctcacctccaccccctcctgtcaccggccttgtgacattcactcagagaagaccacaccaaggaggcggccgctggcccaggagagaacacggggaggtttgtttgtgtgaaaggaaagtagtccaggctgtccctgaaactgagtctgtggacactgtggaaagctttgaacaattgtgttttcgtcacaggagtctttgtaatgcttgtacagttgatgtcgatgctcactgcttctgctttttctttctttttattttaaatctgaaggttctggtaacctgtggtgtannnnnnnnnnnnnnnnnnnnnnnnnnnnnnnnnnnnnnnnnnnnncctcccctttgaccctattcatgtctctacccactatgcacagattaaacttcacctacaaactccttaatatgatctgtggagaatgtacacagtttaaacacatcaataaatactttaacttccaccgagaaaaacctcgtgc

SEQ ID NO: 20813 - DNA, 1148 bp, Homo Sapiens
ggcggccgctctagccttttaaaaggatcccccgggctgcaggaattcggcacgagggcacgagggtgacatcgtctttaaaccctgcgtggcaatccctgacgcaccgccgtgatgcccagggaagacagggcgacctggaagtccaactacttccttaagatcatccaactattggatgattatccgaaatgtttcattgtgggagcagacaatgtgggctccaagcagatgcagcagatccgcatgtcccttcgcgggaaggctgtggtgctgatgggcaagaacaccatgatgcgcaaggccatccgagggcacctggaaaacaacccagctctggagaaactgctgcctcatatccgggggaatgtgggctttgtgttcaccaaggaggacctcactgagatcagggacatgttgctggccaataaggtgccagctgctgcccgtgctggtgccattgccccatgtgaagtcactgtgccagcccagaacactggtctcgggcccgagaagacctcctttttccaggctttaggtatcaccactaaaatctccaggggcaccattgaaatcctgagtgatgtgcagctgatcaagactggagacaaagtgggagccagcgaagccacgctgctgaacatgctcaacatctcccccttctcctttgggctggtcatccagcaggtgttcgacaatggcagcatctacaaccctgaagtgcttgatatcacagaggaaactctgcattctcgcttcctggagggtgtccgcaatgttgccagtgtctgtctgcagattggctacccaactgttgcatcagtaccccattctatcatcaacgggtacaaacgagtcctggccttgtctgtggagacggattacaccttcccacttgctgaaaaggtcaaggccttcttggctgatccatctgcctttgtggctgctgcccctgtggctgctgccaccacagctgctcctgctgctgctgcagccccagctaaggttgaagccaaggaagagtcggaggagtcggacgaggatatgggatttggtctctttgactaatcaccaaaaagcaaccaacttagccagttttatttgcaaaacaaggaaataaaggcttacttctttaaaaagcctcgtgc

SEQ ID NO: 20814 - DNA, 1643 bp, Homo Sapiens
cccccgggctgcaggaattcggcacgaggcgactcttagcttgtcggggacggtaaccgggacccggtgtctgctcctgtcgccttcgcctcctaatccctagccactatgcgtgagtgcatctccatccacgttggccaggctggtgtccagattggcaatgcctgctgggagctctactgcctggaacacggcatccagcccgatggccagatgccaagtgacaagaccattgggggaggagatgactccttcaacaccttcttcagtgagacgggcgctggcaagcacgtgccccgggctgtgtttgtagacttggaacccacagtcattgatgaagttcgcactggcacctaccgccagctcttccaccctgagcagctcatcacaggcaaggaagatgctgccaataactatgcccgagggcactacaccattggcaaggagatcattgaccttgtgttggaccgaattcgcaagctggctgaccagtgcaccggtcttcagggcttcttggttttccacagctttggtgggggaactggttctgggttcacctccctgctcatggaacgtctctcagttgattatggcaagaagtccaagctggagttctccatttacccagcaccccaggtttccacagctgtagttgagccctacaactccatcctcaccacccacaccaccctggagcactctgattgtgccttcatggtagacaatgaggccatctatgacatctgtcgtagaaacctcgatatcgagcgcccaacctacactaaccttaaccgccttattagccagattgtgtcctccatcactgcttccctgagatttgatggagccctgaatgttgacctgacagaattccagaccaacctggtgccctacccccgcatccacttccctctggccacatatgcccctgtcatctctgctgagaaagcctaccatgaacagctttctgtagcagagatcaccaatgcttgctttgagccagccaaccagatggtgaaatgtgaccctcgccatggtaaatacatggcttgctgcctgttgtaccgtggtgacgtggttcccaaagatgtcaatgctgccattgccaccatcaaaaccaagcgcagcatccagtttgtggattggtgccccactggcttcaaggttggcatcaactaccagcctcccactgtggtgcctggtggagacctggccaaggtacagagagctgtgtgcatgctgagcaacaccacagccattgctgaggcctgggctcgcctggaccacaagtttgacctgatgtatgccaagcgtgcctttgttcactggtacgtgggtgaggggatggaggaaggcgagttttcagaggcccgtgaagatatggctgcccttgagaaggattatgaggaggttggtgtggattctgttgaaggagagggtgaggaagaaggagaggaatactaattatccattccttttggccctgcagcatgtcatgctcccagaatttcagcttcagcttaactgacagacgttaaagctttctggttagattgttttcacttggtgatcatgtcttttccatgtgtacctgtaatatttttccatcatatctcaaagtaaagtcattaacatcctcgtgc

SEQ ID NO: 20815 - DNA, 1247 bp, Homo Sapiens
ccacgcgtccgcggacgcgtgggcccgcggcccgctgaggcccccggttcgctgtcccgcctggcgtcccttcgcctcgggtgctaactttgagtacatcatcgcagaaaaaagagggaagaataacaccgtggggttgatccaactgaaccgccccaaggccctcaatgcactttgcgatggcctgattgacgagctcaaccaggccctgaagatcttcgaggaggacccggccgtgggggccattgtcctcaccggcggggataaggcctttgcagctggagctgatatcaaggaaatgcagaacctgagtttccaggactgttactccagcaagttcttgaagcactgggaccacctcacccaggtcaagaagccagtcatcgctgctgtcaatggctatgcctttggcgggggctgagagcttgccatgatgtgtgatatcatctatgccggtgagaaggcccagtttgcacagccggagatcttaataggaaccatcccaggtgcgggcggcacccagagactcacccgtgctgttgggaagtcgctggcgatggagatggtcctcaccggtgaccggatctcagcccaggacgccaagcaagcaggtcttgtcagcaagatttgtcctgttgagacactggtggaagaagccatccagtgtgcagaaaaaattgccagcaattctaaaattgtagtagcgatggccaaagaatcagtgaatgcagcttttgaaatgacattaacagaaggaagtaagttggagaagaaactcttttattcaacctttgccactgatgaccggaaagaagggatgaccgcgtttgtggaaaagagaaaggccaacttcaaagaccagtgagaaccagctgcccctgcttcacacctctgcttggagaggacaagtgcagcctgtcagttttagaagcaagtaaatcatcctcttttcaagagcagtgtccgtggtgtgcagttcctctccaattgctgcgtggtcgtggcccgacctctcacggcatgacagccttcgtcacccagcctgtgagggtcctgactggagcaccttctaaatctaagattctgctgaggagcccccgctggtccctctgggcatgctgtgctcggacggaaagcggggcctgtgggtccttgtgtccctgccgctgaagaatggggctgctctgagggaaacgctgtctgctgccttcatacagatgctgattaaagtgatagcgattcagatt

SEQ ID NO: 20816 - DNA, 1342 bp, Homo Sapiens
  misc_feature (1245)..(1281): n is a, c, g, or t
gcacgaggattgcttcggtgggtgacgcggtacagctgcccaagggcgttcgtaacgggaatgccgaagcgtgggaaaaagggagcggtggcggaagacggggatgagctcaggacaggtaagggaatgaaatcagcccttcttcctagaagctgcggcgggggtgtttgtcattcccttgatgtacgagccagaggccaagaagagtaagacggccgcaaagaaaaatgacaaagaggcagcaggagagggcccagccctgtatgaggaccccccagatcagaaaacctcacccagtgggaaacctgccacactcaagatctgctcttggaatgtggatgggcttcgagcctggattaagaagaaaggattagattgggtaaaggaagaagccccagatatactgtgccttcaagagaccaaatgttcagagaacaaactaccagctgaacttcaggagctgcctggactctctcatcaatactggtcagctccttcggacaaggaagggtacagtggcgtgggcctgctttcccgccagtgcccactcaaagtttcttacggcataggcgaggaggagcatgatcaggaaggccgggtgattgtggctgaatttgactcgtttgtgctggtaacagcatatgtacctaatgcaggccgaggtctggtacgactggagtaccggcagcgctgggatgaagcctttcgcaagttcctgaagggcctggcttcccgaaagccccttgtgctgtgtggagacctcaatgtggcacatgaagaaattgaccttcgcaaccccaaggggaacaaaaagaatgctggcttcacgccacaagagcgccaaggcttcggggaattactgcaggctgtgccactggctgacagctttaggcacctctaccccaacacaccctatgcctacaccttttggacttatatgatgaatgctcgatccaagaatgttggttggcgccttgattactttttgttgtcccactctctgttacctgcattgtgtgacagcaagatccgttccaaggccctcggcagtgatcactgtcctatcaccctatacctagcactgtgacaccacccctaaatcactttgagcctgggaaataagccccctcaactaccattccttctttaaacactcttcagagaaatctgcattctatttctcatgtataaaactaggaatcctccaaccaggctcctgtgatagagttcttttaagcccaagannnnnnnnnnnnnnnnnnnnnnnnnnnnnnnnnnnnnttgaacaaagactactaatgactttgtttgaattatccacatgaaaataaagacctcgtgc

SEQ ID NO: 20817 - DNA, 1909 bp, Homo Sapiens
gcacgagggcggtctccgccggttgggggaaagtaattccggctgttgcaccatggcgtccatggggaccctcgccttcgatgaatatgggcgccctttcctcatcatcaaggatcaggaccgcaagtcccgtcttatgggacttgaggccctcaagtctcatataatggcagcaaaggctgtagcaaatacaatgagaacatcacttggaccaaatgggcttgataagatgatggtggataaggatggggatgtgactgtaactaatgatggggccaccatcttaagcatgatggatgttgatcatcagattgccaagctgatggtggaactgtccaagtctcaggatgatgaaattggagatggaaccacaggagtggttgtcctggctggtgccttgttagaagaagcggagcaattgctagaccgaggcattcacccaatcagaatagccgatggctatgagcaggctgctcgcgttgctattgaacacctggacaagatcagcgatagcgtccttgttgacataaaggacaccgaacccctgattcagacagcaaaaaccacgctgggctccaaagtggtcaacagttgtcaccgacagatggctgagattgctgtgaatgccgtcctcactgtagcagatatggagcggagagacgttgactttgagcttatcaaagtagaaggcaaagtgggcggcaggctggaggacactaaactgattaagggcgtgattgtggacaaggatttcagtcacccacagatgccaaaaaaagtggaagatgcgaagattgcaattctcacatgtccatttgaaccacccaaaccaaaaacaaagcataagctggatgtgacctctgtcgaagattataaagcccttcagaaatacgaaaaggagaaatttgaagagatgattcaacaaattaaagagactggtgctaacctagcaatttgtcagtggggctttgatgatgaagcaaatcacttacttcttcagaacaacttgcctgcggttcgctgggtaggaggacctgaaattgagctgattgccatcgcaacaggagggcggatcgtccccaggttctcagagctcacagccgagaagctgggctttgctggtcttgtacaggagatctcatttgggacaactaaggataaaatgctggtcatcgagcagtgtaagaactccagagctgtaaccatttttattagaggaggaaataagatgatcattgaggaggcgaaacgatcccttcacgatgctttgtgtgtcatccggaacctcatccgcgataatcgtgtggtgtatggaggaggggctgctgagatatcctgtgccctggcagttagccaagaggcggataagtgccccaccttagaacagtatgccatgagagcgtttgccgacgcactggaggtcatccccatggccctctctgaaaacagtggcatgaatcccatccagactatgaccgaagtccgagccagacaggtgaaggagatgaaccctgctcttggcatcgactgtttgcacaaggggacaaatgatatgaagcaacagcatgtcatagaaaccttgattggcaaaaagcaacagatatttcttgcaacacaaatggttagaatgattttgaagattgatgacattcgtaagcctggagaatttgaagaatgaagacattgagaaaactatgtagcaagatccacttctgtgattaagtaaatggatgtctcgtgatgcgtctacagttatttattgttacatccttttccagacactgtagatgctataataaaaatagctgtttggtaaccatagtttcacttgttcaaagctgtgtaatcgtgggggtactatctcaactgcttttgtattcattgtattaaaagaatctgtttaaacaac

SEQ ID NO: 20818 - DNA, 1316 bp, Homo Sapiens
ccccgggctgcaggaattcggcacgaggatggccctttagcttctatactaccaggtgtcttgcgcccatgatgtctgaagtcatccgaatcctccaggaaggagttgacccgaagaagctggattccctgaccacaagctttggctttcctgtgggtgccgccacactggtggatgaagttggcgtggatgtagcgaaacatgtggcggaagatctgggcaaagtctttggggagcggtttggaggtggaaacccagaactgctgacacagatggtgtccaagggcttcctaggtcgtaaatctgggaagggcttttacatctatcaggagggtgtgatgaggaaggatttgaattctgacatggatagtattttagcgagtctgaagctgcctcctaagtctgaagtctcatctgacgaagacatccagttccgcctggtgacaagatttgtgaatgaggcagtcatgtgcctgcaagaggggatcttggccacacctgcagagggagacatcggagccgtctttgggcttggcttcccgccttgtctgggagggcctttccgctttgtggatctgtatggcgcccataagatagtggaccggctcaagaaatatgaagctgcctatggaaaacagttcaccccatgccagctgctagctgaccatgctaacagccctaacaagaagttctaccagtgagcaggcctcatgcctcgctcagtcagtgcactaaccccagctgccggcagtgctggttctccaacagagtggtgtctagatttatcagagtaacgagaagacaaactccggcactgggtttgctccctgattaaagtgccttcagccaagaccatctctccctcctggtgaagtgtgacttcgaattagtttgcacttcctattggaaggtagagcccactgctcattgtataagccccgaggcctagagtggcagccaagagccatctgaagccacctctctgcctgttcctcccaagaggccagggtggccaggggtggtgagggcagttctgcacccagccaaacacataacaataaaaaccaaactctgtgtcagcatctttgcccttctggtttaaacgcctccttcaaaaagcaatctggaagaaagccctgtgctttgggggagtaagaatgtgtgtgcagaattctaggcagcaccttagggagggactgggatgagagaaagtgggacctggtgggctcaaccacacacacctgtctgtgcagatgctttgcccaggcttctcaccacggtgtaccgggatattaaacctctttccccagcctgga

SEQ ID NO: 20819 - DNA, 965 bp, Homo Sapiens
atcccccgggctgcaggaattcggcacgaggatagccacagtttgcaaaaagtgcagctattgattaatgcaatgtagtgtcaattagatgtacattcctgaggtcttttatctgttgtagctttgtctttttctttttcttttcattacatcaggtatattgccctgtaaattgtggtagtggtaccaggaataaaaaattaaggaatttttaacttttcaatatttgtgtagttcagtttttctacattttagtacagaaactttaacaaaatgcagtttcgaaggtgtttccttgtgagttaacaagtaaagaagatcattgttaattactattttgtatgaattttgctaaagttaactgtaaagaaacacctgctgacttgcagtttaaggggaatctattctccccatttccaaaccatgatatgaatgggcgctgacatgtggagagaatagataatttgtgtgtttgcaatgtgtgttttagataaataggattgggtatttaaattagcatttgtgaatttaatagcattaagattaccttcaaatgaaaaaaaatctcaaaatttctatttggtttttgtgcattttcttttaaaatgtaatcatatgattttagtgtgttagacttgctgagtcctagctgtgtttagaacatctctattctacatttaccttggtcaaatttgaactgctgccataggttttgggtgtaaagaatgtttactgccctccatttaaattctgaaaagggatggtggatgttttccctctcctacgttagaaaccattcttaaaaacttttgaaaatatagaaccattaagcctgctatatctgagcaaattagtgggtaccttttttttcttatttaaagcacaagaggcccataaatcttgagttactttaaattcttttttttgatacaagttttcagagcaagagaaggaaaacctcgtgc

SEQ ID NO: 20820 - DNA, 1810 bp, Homo Sapiens
  misc_feature (220)..(233): n is a, c, g, or t
  misc_feature (257)..(358): n is a, c, g, or t
  misc_feature (382)..(492): n is a, c, g, or t
  misc_feature (644)..(656): n is a, c, g, or t
gcacgaggcaaaagatacccaaattttaatattccagaagaacaactttagcatcagaaggttcacccagcaccttgcagattttcttaaggaattttgtctcacttttaaaaagaaggggagaagtcagctactctagttctgttgttttgtgtatataattttttaaaaaaaatttgtgtgcttctgctcattactacactggtgtgtccctctgccnnnnnnnnnnnnnnaagacagggtctcattctatcggnnnnnnnnnnnnnnnnnnnnnnnnnnnnnnnnnnnnnnnnnnnnnnnnnnnnnnnnnnnnnnnnnnnnnnnnnnnnnnnnnnnnnnnnnnnnnnnnnnnnnngcatgcaccactacgcatgactannnnnnnnnnnnnnnnnnnnnnnnnnnnnnnnnnnnnnnnnnnnnnnnnnnnnnnnnnnnnnnnnnnnnnnnnnnnnnnnnnnnnnnnnnnnnnnnnnnnnnnnnnnnnnnatgagccactgcacctgcccagctccccaactccctgccattttttaagagacagtttcgctccatcgcccaggcctgggatgcagtgatgtgatcatagctcactgtaacctcaaactctggggctcaagcagttctcccaccagcctccnnnnnnnnnnnnngtacaatggggtcttgctatgttgcccaagctggccatactgtcctggcccctgccaatccttctggcttggccccccatagtgctgagattgatgggcatgagctgctgtgcccagcctccatgttttaatatcaactctcactcctgaattcagttgctttgcccaagataggagttctctgatgcagaaattattgggctcttttagggtaagaagtttgtgtctttgtctggccacatcttgactaggtattgtctactctgaagacctttaatggcttccctctttcatctcctgagtatgtaacttgcaatgggcagctatccagtgacttgttctgagtaagtgtgttcattaatgtttatttagctctgaagcaagagtgatatactccaggacttagaatagtgcctaaagtgctgcagccaaagacagagcggaactatgaaaagtgggcttggagatggcaggagagcttgtcattgagcctggcaatttagcaaactgatgctgaggatgattgaggtgggtctacctcatctctgaaaattctggaaggaatggaggagtctcaacatgtgtttctgacacaagatccgtggtttgtactcaaagcccagaatccccaagtgcctgcttttgatgatgtctacagaaaatgctggctgagctgaacacatttgcccaattccaggtgtgcacagaaaaccgagaatattcaaaattccaaatttttttcttaggagcaagaagaaaatgtggccctaaagggggttagttgaggggtagggggtagtgaggatcttgatttggatctctttttatttaaatgtgaatttcaacttttgacaatcaaagaaaagacttttgttgaaatagctttactgtttctcaagtgttttggagaaaaaaatcaaccctgcaatcactttttggaattgtcttgatttttcggcagttcaagctatatcgaatatagttctgtgtagagaatgtcactgtagttttgagtgtatacatgtgtgggtgctgataattgtgtattttctttgggggtggaaaaggaaaacaattcaagctgagaaaagtattctcaaagatgcatttttataaattttattaaacaattttgttaaaccaaaacctcgtgc

SEQ ID NO: 20821 - DNA, 1148 bp, Homo Sapiens
  misc_feature (1007)..(1015): n is a, c, g, or t
gcacgaggcaacctttagggtgttctaatcaaagagctgatgaaatctcagtcttttgtatctagaggtggttctgctaattcacacaacacgttaaactgaacagtcgtgattcccagcttcattaccttgcaggaatgggaatgagagctgaatgtagggacaattttctagtgctgtataaagtagcctcgcatctgtttctcaaccttatccatcatttctgacattcatgcaggacttgccctgttgccaccaatgttctcggtatttcacatgcagctctctttctgccactggatacatgggttcaatccatttgtgaagctgtgatagtgtaactggaaagctagtgtggtgaaaattcctttattattttttgttaacatgctgatctttcccggacaaatgaactgaagggtaatttactggaactctcgtgtacagcttcatcaactgtaaccatataaatataactggaatattcttaaacaaaaagaaactaggggtttttttaagtgtaaatttattactagccaacagagttttactattttgattgtctggttggtttaacaaagagcctagctgactttccttctgtaaagtcctccttgtaggcttttttaaagtactgtacatatttgcaatcacattgtgcatagattcttaatggtagatatgatttcttttgtcaggctacaacaatgaactgcagattccttgtttgtaatgtaaatgattgaatacattttgttaatatgtttttattcctatgttttgctattaaaaattttataacatttccaagacaaaaattccaagtttatgctttgaagaatttatgtaattaaaatttcactaaactaatctttttagtttaggaattatttgggttttgacactggaagttgcgccaaataagcatcagaaataggagatgcttaacattgctatactacttgtgttggttaggggtttggatttgggggttctttggttttaannnnnnnnnccacatttaaaagccttaaatgtactgtaagcctcagatcgttgtacaactggactgcggttgattgccagtttgtgtactgttgcttggatgcggcacagtggttggtaatggaataaaggatgcatggatc

SEQ ID NO: 20822 - DNA, 1436 bp, Homo Sapiens
gcacgaggttttttttgtttaaaatgaaaagtttatttgctgagtacaccaaataggatgcaagcactgtcatgacaaatatacagaaatatgcagatcaacataaaacagtaatttagtttaaatgaagggaaatctctttaaatgttatgacaacatactcccaagaagaaccttttcttcagttaagttaattatacatttcaataaaataaaggataatggattagtggaagttagcttgtgaatttttcttaaaaataaaactccaactctattaatccatgccagttaaacactataactaaaatttccaaataagcgcaaaaggagatgaagcagttagttaccttttttgcttgaacagtccaaaggaaaatggttactataaatacagcaggcaaactgttagactgacctagaacatagtgtactaaatttcagtctcaaattgtgctaaatgctcatcattagtatggcacatttggtccatgatgtggtttaatgccaagacagatcccaatttgttacagaaacacatagattactgttgctttttgtttttaaatacatatattttaaaaagccaggtatacttccacatacaaaggcaggtttcccaggagaaatttataggaagtagtctggggtgcgccgtgtaacatgaggctcaccacgacgaggcgctgggtcaaattgaaggaaggaatattttaaagtgtcatctaattccatgatagcagcctggttcccacaacgataacagtaattgggtgcactgaaaatggtaaccacattccgatcatgacaccaattgtatccctccattacaagctggtgggcacgagaaaccagtgtgagaccattggcatggttaaaggtttcagaaatgtcttgtccaaatgtgtagccagcaccacgtggtgaaataccccatccaccacgatcatctggatctgaccataacagatcacacattgggccctcatgtggaacttcctgtaaacgatccagggctcttatatgatccagtgtgtctatggatggagagaggccaccatggaggcagaatatctgtccatctactaaagctgtaagtggaagataatcaaagagatctgtaaaatatttccaaacgttggcattcccatactttcgcagacattcatcataaaagccatatacttgggtaatttgtcggctttcgtgatttcctctcaatattgtaatgcgttctggataacgcacctttaatgctacaagaagagtcacagtctccactgaataatatcctctgtctacatagtcacccatgaataagtagtttgtatccggtgattttccaccaattctaaagagttccataagatcatgaaattgaccatgcacatctccacagacagtaaccctcgtgccgaattcctgcagcccggggg

SEQ ID NO: 20823 - DNA, 1149 bp, Homo Sapiens
ccgggctgcaggaattcggcacgaggatttgacagacatccttgcagtttaagatgacacttttaaaataaattctctcctaatgatgacttgagccctgccactcaatgggagaatcagcagaacctgtaggatcttatttggaattgacattctctattgtaattttgttcctgtttatttttaaattttctttttgtttcactggaaaggaaagatgatgctcagttttaaacgttaaaagtgtacaagttgctttgttacaataaaactaaatgtgtacacaaaggatttgatgcttttctctcagcataggtatgcttactatgaccttccaagtttgacttgtataacatcactgtcaaactttgtcaccctaacttcgtattttttgatacgcactttgcaggatgacctcagggctatgtggattgagtaatgggatttgaatcaatgtattaatatctccatagctgggaaacgtgggttcaatttgccattggtttctgaaagtattcacatcatttgggataccagatagctcaatactctctgagtacattgtgcccttgatttttatctccaagtggcagtttttaaaattggccttttacctggatataaattaattgtgcctgccaccaccatccaacagacctggtgctctaatgccaagttatacacgggacagttgctggcatgtcttcattggctatataaaatgtggccaagaagataggctctcagtaagaagtctgatggtgagcagtaactgtccctgctttctggtataaagctctcaaatgtgaccatgtgaatctgggtgggataatggactcagctctgtctgctcaatgccattgtgcagagaagcaccctaatgcataagctttttaatgctgtaaaatatagtcgctgaaattaaatgccactttttcagaggtgaattaatggacagtctggtgaacttcaaaagctttttgatgtataaaacttgataaatggaactattccatcaataggcaaaagtgtaacaacctatctagatggatagtatgtaatttctgcacaggtctctgtttagtaaatacatcactgtataccgatcaggaatcttgctccaataaaggaacataaagatttaaaaaa

SEQ ID NO: 20824 - DNA, 1308 bp, Homo Sapiens
  misc_feature (1205)..(1225): n is a, c, g, or t
cccgggctgcaggaactcggcacgagggaagcccttttaaaaaaacgctggacatgatcaagaagattgctgatgataaatacaatgatactttttggaaagaatttggtaccaacatcaagcttggtgtgattgaagaccactcgaatctaacacgtcttgctaaacttcttaggttccagtcttctcatcatccaactgacattactagcctagaccagtatgtggaaagaatgaaggaaaaacaagacaaaatctacttcatggctgggtccagcagaaaagaggctgaatcttctccatttgttgagcgacttctgaaaaagggctatgaagttatttacctcacagaacctgtggatgaatactgtattcaggcccttcccgaatttgatgggaagaggttccagaatgttgccaaggaaggagtgaagttcgatgaaagtgagaaaactaaggagagtcgtgaagcagttgagaaagaatttgagcctctgctgaattggatgaaagataaagcccttaaggacaagattgaaaaggctgtggtgtctcagcgcctgacagaatctccgtgtgctttggtggccagccagtacggatggtctggcaacatggagagaatcatgaaagcacaagcgtaccaaacgggcaaggacatctctacaaattactatgcgagtcagaagaaaacatttgaaattaatcccagacacccgctgatcagagacatgcttcgacgaattaaggaagatgaagatgataaaacagttttggatcttgctgtggttttgtttgaaacagcaacgcttcggtcagggtatcttttaccagacactaaagcatatggagatagaatagaaagaatgcttcgcctcagtttgaacattgaccctgatgcaaaggtggaagaagagcccgaagaagaacctgaagagacagcagaagacacaacagaagacacagagcaagacgaagatgaagaaatggatgtgggaacagatgaagaagaagaaaccgcaaaggaatctacagctgaaaaagatgaattgtaaattatactctcaccatttggatcctgtgtggagagggaatgtgaaatttacatcatttctttttgggagagacttgttttggatgccccctaatccccttctcccctgcactgtaaaatgtgggattatgggtcacaggaaaaagtgggnnnnnnnnnnnnnnnnnnnnnaacattcctcatgaatgtaaatttgtactatttaactgactattcttgatgtaaaatcttgtcatgtgtataaatataaaaaa

SEQ ID NO: 20825 - DNA, 1537 bp, Homo Sapiens
cccccgggctgcaggaattcggcacgaggcgagcttctgcatggatgctaaaactgtatgcaatgtttctgactctcgtttttttggtcgaactggtcgctgccatcgtaggatttgttttcagacatgagattaagaacagctttaagaataattatgagaaggctttgaagcagtataactctacaggagattatagaagccatgcagtagacaagatccaaaatacgttgcattgttgtggtgtcaccgattatagagattggacagatactaattattactcagaaaaaggatttcctaagagttgctgtaaacttgaagattgtactccacagagagatgcagacaaagtaaacaatgaaggttgttttataaaggtgatgaccattatagagtcagaaatgggagtcgttgcaggaatttcctttggagttgcttgcttccaactgattggaatctttctcgcctactgcctctctcgtgccataacaaataaccagtatgagatagtgtaacccaatgtatctgtgggcctattcctctctacctttaaggacatttagggtcccccctgtgaattagaaagttgcttggctggagaactgacaacactacttactgatagaccaaaaaaactacaccagtaggttgattcaatcaagatgtatgtagacctaaaactacaccaataggctgattcaatcaagatctgtgctcgcagtgggctgattcaatcaagatgtatgtttgctatgttctaagtccaccttctatcccattcatgttagatcgttgaaaccctgtatccctctgaaacactggaagagctagtaaattgtaaatgaagtaatactgtgttcctcttgactgttatttttcttagtagggggcctttggaaggcactgtgaatttgctattttgatgtagtgttacaagatggaaaattgattcctctgactttgctattgatgtagtgtgatagaaaattcacccctctgaactggctccttcccagtcaaggttatctggtttgattgtataatttgcaccaagaagttaaaatgttttatgactctctgttctgctgacaggcagagagtcacattgtgtaatttaatttcagtcagtcaatagatggcatccctcatcagggttgccagatggtgataacagtgtaaggccttgggtctaaggcatccacgactggaagggactactgatgttctgtgatacatcaggtttcagcacacaacttacatttctttgcctccaaattgaggcatttattatgatgttcatactttccctcttgtttgaaagtttctaattattaaatggtgtcggaattgttgtattttccttaggaattcagtggaacttatcttcattaaatttagctggtaccaggttgatatgacttgtcaatattatggtcaactttaagtcttagttttcgtttgtgcctttgattaataagtataactcttatacaataaatactgctttcctccctcgtgccgaattcctgcagcc

SEQ ID NO: 20826 - DNA, 1404 bp, Homo Sapiens
gtaaaaattacttttattatgttaaaatattccttaataaactagcaattatttatgtggaggagcatccagaaaacaggttcatgactgaattatccttgtccttgattatagagattcatgaatgacacacataaccctattttctggagtagctgtgaagctctacgaggctgtgaggttggaggcgcttctccctgcctgttaagctgctcctatcacatcacgacaggatggacattatttttctcttttgaattaaatctttacaacagttcgaatgctctttccagaatgcatcagttcaaaggctttgttgatttcatcaaaagacagattgtgagtcacaaattcatcaacttttatctttttggacatatattcagacaccaactttgggacactttctacactcttccatcctccaaaggcagtgcctttccatgtgcgacctgttaccagctggaatggacgagtggcaatttcttcacctgaagcagctactccaaccacgacgctgacgccccagcccttgtgacatgcctcaagtgctgctctcatgaccttcacattaccaatacattcaaggaatagtccactcctccatcggtcatctcaatgagcacttcctggatgggtttactaaaatcctgaggggttaatacattcagtggctccaaactctttggcccttgcaaatttatctttattgatgtccacaccaatgatccgggaagcaccagccactttacagcccatgataactgccaatccgactcctcccagaccaaagacggcacaaacagagccaggctccaacttggcagtgttcacagcagcaccataaccggttgaaatgccacaacctagaaggcagactttatccaaaggtgctaaaggatctattttagcaacagagatatcagccacaactgtgtattcagaaaatgtgctggttcccatgtaatgcaaaattgtctttcctttgcaagtaaatctgctggtaccatctggcattaatcctttcccttgagtgactcttatcttctggcaaaggttagttttaggatttagacaaaatttgcattctccacactgtgggatgtaaagtgggatgacagtgtcacccgccttcagcttagtaactccctcaccaacactttccacaattccagcaccttcatgtcccaagatcactggaaaacaaccctcaggatcagctccactcagggtataggcatcggtgtggcaaaccgcagtggcaatgatcttgattcgaacttcatgagcctttgggggtgccacctctatctcctctatggagagaggctttccagcctcccaagcaactgcagccttgcacttgataacctcgcctcgtgccgaattcctgcagcccggggg

SEQ ID NO: 20827 - DNA, 1081 bp, Homo Sapiens
  misc_feature (201)..(244): n is a, c, g, or t
gcacgagggggtattgaagtaacccatcaaaatatgctctgcagtgattccgcttaatgtttaaattcagtaacgtacttgaaaggcaaatttcagtgcttttgtatgttggaggagggcttactgatgcgtgctaagaccgatttctgattgagggatgaaccttgggctcatttttttcttgtgaagtctctttctagnnnnnnnnnnnnnnnnnnnnnnnnnnnnnnnnnnnnnnnnnnnngaatgtatcatgtcttcattaacaacagaaaatccacatggtgtttactaaacttgtttacgacattaaaaatttcctttttatttttagtagcccaggttgagtttttcacaagagatttttttcttagctgaggtatagttgtatagcaagaagaattaagccagatttttgtgtgtggaaagacagttttctatccacgtctttttctgtttgtcagaaggtgggagtatggtccaaataaatccattaggttactcctgcagcatgcgcttttagcttctctcttgactgaggatcaaatatccctttgtgagctggccctcagctcctttgctcatgtgtacaaacctcagatgttactacattttatatctaccagagctattcaagcaatagtatttgaaccactagccttttaaataaaattctgccccattactgatgtgcagatattgagttcactttcattttttgccagatttctttgcactactttaggtaaaaatagttaatctatttttctttgacatcctagtttgcgtcagtgacagaacttactgcttagtctttgtactttttaaaaaatctataaatttaatgcactgtccaagtgaaatgtcctagttgtcattgtgattaaggggccaactttccaggcagctagcagagatactattctcttcctctcccagcaaatttgtattccttcgcccacgcattcctgctatactagatggcagccagtgatggaactataaagatgtctgtggtcatatgttgaatgtggcagcttgaagatgtactgccacgggtgatctagggcaggctgtcttc

SEQ ID NO: 20828 - DNA, 1777 bp, Homo Sapiens
  misc_feature (1494)..(1512): n is a, c, g, or t
gcctcgggccagccgcggcggcgcgactcgggctccggacccgggcactgctggcggctggagcggagcgcaccgcggcggtggtgcccagagcggagcgcagctccctgccccgcccctccccctcggcctcgcggcgacggcggcggtggcggcttggacgactcggagagccgagtgaagacatttccacctggacacctgaccatgtgcctgccctgagcagcgaggcccaccaggcatctctgttgtgggcagcagggccaggtcctggtctgtggaccctcggcagttggcaggctccctctgcagtggggtctgggcctcggccccaccatgtcgagcctcggcggtggctcccaggatgccggcggcagtagcagcagcagcaccaatggcagcggtggcagtggcagcagtggcccaaaggcaggagcagcagacaagagtgcagtggtggctgccgccgcaccagcctcagtggcagatgacacaccaccccccgagcgtcggaacaagagcggtatcatcagtgagcccctcaacaagagcctgcgccgctcccgcccgctctcccactactcttcttttggcagcagtggtggtagtggcggtggcagcatgatgggcggagagtctgctgacaaggccactgcggctgcagccgctgcctccctgttggccaatgggcatgacctggcggcggccatggcggtggacaaaagcaaccctacctcaaagcacaaaagtggtgctgtggccagcctgctgagcaaggcagagcgggccacggagctggcagccgagggacagctgacgctgcagcagtttgcgcagtccacagagatgctgaagcgcgtggtgcaggagcatctcccgctgatgagcgaggcgggtgctggcctgcctgacatggaggctgtggcaggtgccgaagccctcaatggccagtccgacttcccctacctgggcgctttccccatcaacccaggcctcttcattatgaccccggcaggtgtgttcctggccgagagcgcgctgcacatggcgggcctggctgagtaccccatgcagggagagctggcctctgccatcagctccggcaagaagaagcggaaacgctgcggcatgtgcgcgccctgccggcggcgcatcaactgcgagcagtgcagcagttgtaggaatcgaaagactggccatcagatttgcaaattcagaaaatgtgaggaactcaaaaagaagccttccgctgctctggagaaggtgatgcttccgacgggagccgccttccggtggtttcagtgacggcggcggaacccaaagctgccctctccgtgcaatgtcactgctcgtgtggtctccagcaagggattcgggcgaagacaaacggatgcacccgtctttagaaccaaaaatattctctcacagatttcattcctgtttttatatatatattttttgttgtcgttttaacatctccacgtccctagcatnnnnnnnnnnnnnnnnnnntttaaactgctttttcggaagaacaacaacaaaaaagaggtaaagacgaatctataaagtaccgagacttcctgggcaaagaatggacaatcagtttccttcctgtgtcgatgtcgatgttgtctgtgcaggagatgcagtttttgtgtagagaatgtaaattttctgtaaccttttgaaatctagttactaataagcactactgtaatttagcacagtttaactccaccctcatttaaacttcctttgattctttccgaccatg

SEQ ID NO: 20829 - DNA, 1360 bp, Homo Sapiens
  misc_feature (25)..(42): n is a, c, g, or t
gggctgcaggaattcggcacgaggnnnnnnnnnnnnnnnnnnggaatgattaaagatgtctttataaagtttttttcaagacttcattctaaatacacagaataaaaaatggtgtcagctcacttgtaagacaccaaccagattttccttatactgtctcaaaatttaaagatcaatttccccagagggtgtgcaatgcatcataaaatggcccttttttgaggatgggagaggaagggttgggcaggatggaatattaaattgtaacatgataaacatgcaagactgttatccaatctagataatttatatacattttgatgacttaggaaaacaaagcaatcatttgtgacaagcctaaaaagcttgacatatttaacatacttaggaactttttttgtgcggtgggaattctctaattgtatcatgtgggccttttgaaagtaacaaacagaaggccagtctgttgcaagtttgctgctgaacatcacattccaccctaagaaaacacaaggtggattgcatcgagggtggataccttaccttagcacagaaggaaaaagtatgtcagtgcaaagtatggactaaactgctttcaggaaaaaagttgtaaaaattgatacaggttggaaaagggaattttccttcccggcttggagtcctcccaatttaaggcagaacccatccactccaatttctgcagtttaaaactttctctacttatttagttttctcctctgagttcaaccgctgctggattcgtttggcataactttgtgccatggagttaatgatagataggatgaagtaacacaccatgacaacgaccaacttttcaaacatccaggacaaccagttttctccctgtagaaataaatgcagaacaatgcaatgaaaaaggcttcattagttcagtagtaaaaagaggatcatctataatgcttgaagtgtgtaacttacaaaacctaaagaattaaaaatgaaaagtaagcaaccccaactactctgaaatctccattactctcctttttacacccaactatcaagatttcactttgttggatgtaaaatcagtgttgaatcacatagtttagaatgggatgagtgtgaggttagctcttctactaggacctaagaataaactctttgattaaactcaactctgaagtcgccatgcagatactcatgagtattgtcaagacagttaaatatttttgttccagtattaggagctgtttttaaaacacacaaatgtatctgtttctgatgtcatgtttggtcaactgagggcagcaaaggtccataagaagagtgcaaggccattaaaaaaaacagtgctctggccgggcgcggtggctca

SEQ ID NO: 20830 - DNA, 2707 bp, Homo Sapiens
  misc_feature (2148)..(2160): n is a, c, g, or t
ggcggccgctctatcccatttaaaagatcccccgggctgcaggaattcggcacgagggcgtgattgaaaataaccagactatttgttgtttcaaccaaattaggtactgggaacagcttttgatcctttcttaggaggaaaaaacttcgatgaaaagttagtggaacatttttgtgcagaatttaaaactaagtacaagttggatgcaaaatccaaaatacgagcactcctacgtctgtatcaggaatgtgaaaaactgaaaaagctaatgagctctaacagcacagaccttccactgaatatcgaatgctttatgaatgataaagatgtttccggaaagatgaacaggtcacaatttgaagaactctgtgctgaacttctgcaaaagatagaagtacccctttattcactgttggaacaaactcatctcaaagtagaagatgtgagtgcagttgagattgttggaggcgctacacgaattccagctgtgaaggaaagaattgccaaattctttggaaaagatattagcacaacactcaatgcagatgaagcagtagccagaggatgtgcattacagtgtgcaatactttccccggcatttaaagttagagaattttccgtcacagatgcagttccttttccaatatctctgatctggaaccatgattcagaagatactgaaggtgttcatgaagtctttagtcgaaaccatgctgctcctttctccaaagttctcacctttctgagaagggggccttttgagctagaagctttctattctgatccccaaggagttccatatccagaagcaaaaataggccgctttgtagttcagaatgtttctgcacagaaagatggagaaaaatctagagtaaaagtcaaagtgcgagtcaacacccatggcattttcaccatctctacggcatctatggtggagaaagtcccaactgaggagaatgaaatgtcttctgaagctgacatggagtgtctgaatcagagaccaccagaaaacccagacactgataaaaatgtccagcaagacaacagtgaagctggaacacagccccaggtacaaactgatgctcaacaaacctcacagtctcccccttcacctgaacttacctcagaagaaaacaaaatcccagatgctgacaaagcaaatgaaaaaaaagttgaccagcctccagaagctaaaaagcccaaaataaaggtggtgaatgttgagctgcctattgaagccaacttggtctggcagttagggaaagaccttcttaacatgtatattgagacagagggtaagatgataatgcaagataaattggaaaaagaaaggaatgatgctaaaaatgcagttgaggaatatgtgtatgagttcagagacaagctgtgtggaccatatgaaaaatttatatgtgagcaggatcatcaaaattttttgagactcctcacagaaactgaagactggctgtatgaagaaggagaggaccaagctaaacaagcatatgttgacaagttggaagaattaatgaaaattggcactccagttaaagttcggtttcaggaagctgaagaacggccaaaaatgtttgaagaactaggacagaggctgcagcattatgccaagatagcagctgacttcagaaataaggatgagaaatacaaccatattgatgagtctgaaatgaaaaaagtggagaagtctgttaatgaagtgatggaatggatgaataatgtcatgaatgctcaggctaaaaagagtcttgatcaggatccagttgtacgtgctcaggaaattaaaacaaaaatcaaggaattgaacaacacatgtgaacccgttgtaacacaaccgaaaccaaaaattgaatcacccaaactggaaagaactccaaatggcccaaatattgataaaaaggaagaagatttagaagacaaaaacaattttggtgctgaacctccacatcagaatggtgaatgttaccctaatgagaaaaattctgttaatatggacttggactagataaccttaaattggcctattccttcaattaataaaatatttttgccatagtatgtgactctacataacatactgaaactatttatattttcttttttaaggatatttagaaattttgtgtattatatggnnnnnnnnnnnnngcttaagtctgtagtctttatgatcctaaaagggaaaattgccttggtaactttcagattcctgtggaattgtgaattcatactaagctttctgtgcagtctcaccatttgcatcactgaggatgaaactgacttttgtcttttggagaaaaaaaactgtactgcttgttcaagagggctgtgattaaaatctttaagcatttgttcctgccaaggtagttttcttgcattttgctctccattcagcatgtgtgtgggtgtggatgtttataaacaagactaagtctgacttcataagggctttctaaaaccatttctgtccaagagaaaatgactttttgctttgatattaaaaattcaatgagtaaaacaaaagctagtcaaatgtgttagcagcatgcagaacaaaaactttaaactttctctctcactatacagtatattgtcatgtgaaagtgtggaatggaagaaatgtcgatcctgttgtaactgattgtgaacacttttatgagctttaaaataaagttcatcttatggtgtcatttct

SEQ ID NO: 20831 - DNA, 1726 bp, Homo Sapiens
gcacgaggggctgcaagagggagccggcccgacgcggaccgcttccctgcagtgccccgagtcccgggcccgcgccgccgccgcccggctccgctcgcggcccctctgtctgcaggcgtgccccggcggcggcggagagccgtcctcggccgaggaggctgggaaacgcgagcgcaggcggcagagaggcctcaacgccgtccctttcgccaccgccttttccttgcctcgcgccgctgtgcatttctctccttttcctttgtttttttggcccctcgcgggtgtgggcattgttggttagcaaaagtgcagcctcaagatggctgatggcaacgaggatctgcgggctgacgacttgcctgggccagccttcgagagctatgagtccatggagcttgcctgccccgctgagcgcagcggccacgtagccgtcagcgacgggcgccacatgttcgtctggggcggctacaagagtaatcaagtcagaggattatatgacttttatctgcctagagaagaactatggatctacaacatggagactggaagatggaaaaaaatcaacactgaaggtgatgttcctccttctatgtcaggaagctgtgctgtgtgtgtagacagggtgctgtacttgtttggaggacaccattcaagaggcaataccaataagttctacatgctggattcaaggtctacagacagagtgttacagtgggaaagaattgattgccaaggaattcctccatcatcaaaggacaaacttggtgtctgggtatataaaaacaagttaatattttttggagggtatggatatttgcctgaagataaagtattgggaacttttgaattcgatgaaacatctttttggaattcaagtcatccaagaggatggaatgatcatgtacatattttagatactgaaacatttacctggagccagcctataactactggtaaagcaccttcacctcgtgctgcccatgcctgtgcaactgtcggaaatagaggcttcgtgtttggaggcagatatcgagatgctagaatgaatgatcttcactatcttaatctggatacatgggagtggaatgaattaattccacaaggcatatgcccagttggtcgatcttggcactcactaacaccagtttcttcagatcatctttttctctttggaggatttaccactgataaacagccactaagtgatgcctggacttactgcatcagtaaaaatgaatggatacaatttaatcatccatataccgaaaaaccaaggttatggcacacagcttgtgccagcgatgaaggagaagtaattgtttttggtggatgtgccaacaacttgcttgtccatcacagagctgcacacagtaatgaaatactaatattttcagttcaaccaaaatctcttgtacggctaagcttagaagcagtcatttgctttaaagaaatgttagccaactcatgggactgccttccaaaacacttacttcacagtgttaatcagaggtttggtagtaacaacacttctggatcttaaggcttcataattaatgcctatgatcaccttgcatggacagcaatcctgtaaacatcacagagtggcatcatttgtataattatatgcattgtggagttgcacctgttggttttaatgtggcatgtgaatgggccaggacccatttttgggtctaaagtttacaataattgtgattttatcaccaag

SEQ ID NO: 20832 - DNA, 1937 bp, Homo Sapiens
  misc_feature (358)..(371): n is a, c, g, or t
acccccgggctgcaggaattcggcacgaggtctcaccacatggtggtccctcgatcaaccaaactcattactgaggacaaggaagggggccttttcactgtgactctgtttcgaaaagtgattgaagatttcaaaaccaaggccaaagaaaacaagttcactgttcgtgaattttactatgatgagaaggaaattgaaagggaaagggaggagatggccagattgctgtctgataagaagcaacagtatcaaacttcctgtgttgctcttaaaaagggatcatccaccttcccggaccacaaggttaaggtaaccccgctaggtaaccctgataggcctgctgcggggcagaccgacnnnnnnnnnnnnnntgagggcgagggtgagggccccctgctgcgctggctcaaggtgaacttcagtgaagccttcattgcctggatccacatcaaggccctgagagtgtttgtggagtccgtgctcaggtatggactaccagtgaacttccaggcagtgctcctgcagccgcataagaagtcatccaccaagcgtttaagagaggttctaaactctgtcttccgacatctggatgaagtagccgctacaagtatactggatgcatctgtggagatcccgggactgcaactcaataaccaagactattttccttatgtctacttccatattgaccttagtcttcttgactagaaaggccagctggcacctctgtctcatgttcgtgcagattattacagacacctctttcctttagccagagaatggttcaaatgtcttacagaactaagatctttttcagagaaattgctcacaaaagttagtgacagttgtatttatttttttaagttacaataaaatgctctcaagtcctttgaatgttccaacaaattcaaaacttcattttctgaatgttttacataaatgcgaactacctgttcgcattggtaacctgctgctgtatttcatgtcttaacggctattttgaggttcattaacaacatagaaagccttgaactgtataaccagctagattccttaataattagtcactagagacagcccaaagacaaatattgggcaggaaatcagttctcactgagcccggtttccatgtaaaatctctgttgtggtgggcataggtggcaccatctaaagaaaagaggtcttgttttttgtttaaaaaagtttgtggggaggaaagacatctgtgtatcacttcaaaatattgatttactgctaaacatcactctgaatttatgatgtggatactaacttcatacatttatcggcattgtccaaaatattttattctttaatggaaaaagccattaatattcaaatgaagggatcacattaaaaaaaacccatacataagaaacagcctccaagaacattcaagcagcagtcagagagaaaaatgtttcgacagccaagttttcttcaaaatattatgtgacagaatacgactcaattcaccggctacaacaattcatagaatttttcaatgttttcttgagatgcaaaagttcactgttgcagtgttttcaaatgaccaatcaagtactacttcttggttaaaaggccactggtagagtcatctgagtgtagagaatgtcccttcactgctggaaaaatccactggctcccaagaaaagaaaatggtctgaagcctctgttgtggctctcacaactcatctttccctaagtcatcaagctccacatcactgaggtcaatgtcatcctccacgggaagctcgccatccctgccgtcccaaggctctctctcaacgatggtagggaaagccccgcctcctacaggtgccgtggagccacgcccaaaagagagctccctgagaaactcgttgatgccttgctcactgaaggagccttttagcctgcagcccgggggattcttaagg

SEQ ID NO: 20833 - DNA, 1521 bp, Homo Sapiens
  misc_feature (1301)..(1319): n is a, c, g, or t
gcacgagggtgacacagggggacaggaaaacccatttctcaacccagatccatgtctccactgcttctactctgggttgggattcaggaagacaggcacagtcctctctgttcatagaaacacctgccagtgtcaaggattccagtcaggtgtctatcccaactggtcagggagagaagggcagacccattctcaaagaccaccatgtccaagcgtccctcttatcgctggtctgtgttctcctggatttggtatctatgttggtacgactcctggccttttatctaaaggactttggcttttgtaaatcacaagccaataatagacttttttctccccctctgtcttttgctgtgtcatctctgccttgagactgccttgagacagtgcttgccttgagagagtgagccaattaacagctgcctgaattgtcattttccattttggtttgttagaggtgggaggggtgggttttgagaaggtcaaaagcaataccagaagtaaagggaaatatcagacaatattttattattttttcatagatgttctgccacacaaagaacttggggtgtaaggataaggcaaaagctccaatcccatttttcagttctcctaggatgcacccctcagggagcctggccagagttccgaggcccgtgagcgtcagctgttgctttattttccatcaaagccctctgagaagtgagacctcagcaattccgggagccacatagagacagacttggcaagggaccccctggttctgagccagtagctgccatctggaaattcctcttttagcctctccttagaggtgaatgtgaatgaagcctcccaggcacccgctgaatttctgaggccttgcttaaagctcagaagtggtttaggcatttggaaaatctggttcacatcataaagaacttgatttgaaatgttttctatagaaacaagtgctaagtgtaccgtattatacttgatgttggtcatttctcagtcctatttctcagttctattattttagaacctagtcagttctttaagattataactggtcctacattaaaataatgcttctcgatgtcagattttacctgtttgctgctgagaacatctctgcctaatttaccaaagccagaccttcagttcaacatgcttccttagcttttcatagttgtctgacatttccatgaaaacaaaggaaccaactatgttttaaccaaactttgtttggttacagttttcaggggagcgtttcttccacgacacacagcaacatcccaaagaaataaacaagtgtgacnnnnnnnnnnnnnnnnnnncctaaatgctactgttccaaagagcaacttgatggttttttttaatactgagtgcaaaaggtcacccaaattcctatgatgaaattttaaattaatgggcacctttcaacatcatttgcttccttatctacagttgattcagaaatctgcattttttattcttttatatgacttttaagtaaaagatttatatggatttgaa

SEQ ID NO: 20834 - DNA, 656 bp, Homo Sapiens
gcacgaggagacggtgaggtcagcttcacattctcaggaactctccttctttggggagcctcagatgggaagggactcgagccccacctgtccctggactctggaatgccacggaattaacccgagcaggcatggaggcctctgctctcacctcatcagcagtgaccagtgtggccaaagtggtcagggtggcctctggctctgccgtagttttgcccctggccaggattgctacagttgtgattggaggagttgtggctgtgcccatggtgctcagtgccatgggcttcactgcggcgggaatcgcctcgtcctccatagcagccaagatgatgtccgcggcggccattgccaatgggggtggagttgcctcgggcagccttgtggctactctgcagtcactgggagcaactggactctccggattgaccaagttcatcctgggctccattgggtctgccattgcggctgtcattgcgaggttctactagctccctgcccctcgccctgcagagaagagaaccatgccaggggagaaggcacccagccatcctgacccagcgaggagccaactatcccaaatatacctggggtgaaatataccaaattctgcatctccagaggaaaataagaaataaagatgaattgttgcaact

SEQ ID NO: 20835 - DNA, 1482 bp, Homo Sapiens
  misc_feature (114)..(126): n is a, c, g, or t
gcacgaggctgtaatatttattaagtagatgacttacaagagggatattgatgaatgtaaaaattttcactcacagtgaacatgaaacctttacacatgtaaggtttagattcnnnnnnnnnnnnnaatctgcccctttcagattatatcatggtatatgaagcactggtgaggtctatgtcaccagaaattcccagtttgctgatttcattgagttttttaacccgatgattgtactgcaacaagtgagcatcattcactgcaaccttgaagtggtcaggttcaaccagtacttgtattttgaatggtttcccactttcaaatgggaaaaccgactgtctttcttcccttccccagttattatccagctttgtattgcaaacaatgactctcctgttgttctcattgaagcgtgggttaaagtggaaggcaacatcattccctctttggaaatctaaagcaattctgtttgcattgggcttcaccgtgcccagaattgttatcagcatgcgaggcaccactcccccaggcaaaggcaggttataaggcacaatcagtggcccagcaggggcgccataggggccagtggcagggtaggctccggtggcacttggctgtccagaagatgggtaggccccagggccgctgggtggccctgggtagactccaggtgcaggtgctccgggataagctccaggtgctccagggtaggcgcctggaggtgcctgtccaggataagcccctgggggtgcctgcccggggtaggcccccaggataggaagcccctgggtagccccctgcccccagcaggctggttcccccatgcgccaggccatccttgagggtttgggtttccagacccagataacgcatcatggagctggaaagaaagacatacacaattacgggacagaaagcattctcaaaagcagaattttcaggaaaataggaatatgtgatctaagaaggagaggaatatggcaaaggcattacatgcatatcattaaactttttccacttattaatagtttgagtttctaagactaaaattagatgttgggattacatatactttttcactttattcttgcctcccaacgtctcagatcagggagggctgcattttcataattagctcaagtcaggagttagcgctcctctacttatagcacatactttttcatcaccgtgagaaaaacaatcacaaacatcagaatgcccagactgtaccgcacttcccgctactcagaggatttctcagctcctgccggcagagtccactcccttccgccctgggccttttggtgaaagggttactgtgagtgagtcccaggcctcgctctgcctggctttcttcccaaatctgctgctggaaaaacaaggctccagcttgcaagccctcattggacaaatgagtccaggggaagccacgcagtgggagagtgaaaagggaaagtcatggtaaaaacaaaaccctcgtgc

SEQ ID NO: 20836 - DNA, 866 bp, Homo Sapiens
gcacgagggtcaactccagggtttgggcttgattcctgttgaataatagttttgagcattctttgtggttaaataaattcttaaatctgcctagttttgatgaattcttttgtgaaacttgaaagagaatagacagtatgacatatagaattaatacaaaacagtttaacaaccatttaactgcagtgtaagaaaattggactgtaatcatatcgctactggcatctgttatctagtatgcatttctggtgtgtatctgaaaggaagacattttctaccctagatccaattgcatttatttatcaataagtgccattaaattgaaattatattacattttacactttctcaatgaatgaacaaattagtctgtagaatctagccacctgtttagcctagtcatgtgccttgaacatatatgtgtcccataatctggctcatggtacctgttcttctatccaaacctttcaattcatgctacctgattcatttatttgacatagatcttaggcccacttgaactcttttcttgtttatctagcatagcacaaacgtttttccagtcttctttatcaacactaatgcctcttaattgcatcagtatttcctattggaaaatacatctgttccagaaaaacatttggcattcctgaataatttccaaatgtttttaatccaaagaaaaaggtttaaagcttatttccctttcttatacacacctgaataaaattgatgtgcatgttttagggatcaattacctaactgttccttggtctatttatgtataaaatgctttttaaagcacatgtctcattttaaatgacgcacaaactgaagatgttaataaaatttaaagtaatacaaaa

SEQ ID NO: 20837 - DNA, 1372 bp, Homo Sapiens
gcacgaggtgtatctcattgtttatatttttattttcagaaaaacagagttcacttgaatacaattctcactagttaaatcacaattcaccttatagttaattaacttatgttcaaagatagtcctttcctgctatataatttcattttcttaaaaagcaaaacactttcagtagaaaaaatttacatatgaaagtcaaaaacaattatttcagcaaaaatggaaatcaaccaccgtatcttttcttgagttcttcgacagaactatccttcaatcctgacttgtctatgtgattaaataatgcacgtgcaatctttttctctgtttctgacataaacatcactgccatatcaaacctttttagttcagaaagtctttgtaagatttcaaagatgagtaatggcttttctttctcaatgtaaaagtcatgcagaattttaacgatctggttgaatacatctggatccagatttttctgaaacaacttaggatacaaagatggttcaatttgctttaaatactgatacaacatatctggagaacttttcaattgtctgaaatcagattcgagctggaacgagtttgcaggaattggaggaagaacagttgtggcaaactgagcaggtttttgttctatctctatgggcattttctcgctgtaagactgacatacatcctgcttcaaactggcttgaggttgcagggatgaagtatcactgacttcttctattttcaatacttttgctcttggagtatcacttgtgggaaaaaggtcatcttggcttgaattcttcttacttgtggtgcctgtggctgctattacatttgctagataataggattattctctggagcagcagcagtagtgctatctggcacatcaatagtctgtatcaaattaccagtctcatcaataataaccttcctgagtggattagttgacattcaacatcagggattatcaatgggaactccacagtagtccatcaaaaaaatccagaaagccatcattaaaagttcctttttcacagagaatcttatcaattatgcagaaatcagttcaggcttgattatgaacatagtccagaagtaaaactgaatcaaaatcttagcaaaatcatgcctgagcacacacacacattccacacgcatcattaaaggataaccatttgtttttcatcctcatcctcttcctcctcatgttcattttctttttcctcctcctcctcttcatattctggttcgttcttcttctttgagcctgttggcctgccagggcccttctttcctgcttcacttttgcccttggcccgatatgcagcaatatccttttcatatttctcctttagcctagctgctttttgccttgtgc

SEQ ID NO: 20838 - DNA, 826 bp, Homo Sapiens
  misc_feature (209)..(219): n is a, c, g, or t
gcacgaggcaacaaccaacagaactggggttcccaacccatcgctcagcagccgcttcagcaaggtggtgactattctggtaactatggttacaataatgacaaccaggaattttatcaggatacttatgggcaacagtggaagtagacaagtaagggcttgaaaatgatactggcaagatacgattggctctagatctacattcttcnnnnnnnnnnnttggcttaactgtttcatctttaagtagcattttgctgccatttgtattgggctgaagaaatcactattgtgtatatactcaagtctttttatttttcctcttttcataaatgctcttggacattattgggcttgcagagttcccttattctggggattacaatgcttttatcgtttcaggcttcattttagcttcaaaacaagctgggcacactgttaaatcatgattttgcagaacctttggttttggacagtttcatttttttggatttgggatagattacataggagtatggagtatgctgtaaataaaaatacaagctagtgctttgtcttagtagttttaagaaattaaagcaaacaaatttaagttttcttgtattgaaaataacctatgattgtatgttttgcattcctagaagtaggttaactgtgtttttaaattgttataacttcacacctttttgaaatctgccctacaaaatttgtttggcttaaacgtcaaaagccgtgacaatttgttctttgatgtgattgtatttccaatttcttgttcatgtaagatttcaataaaactaaaaaatctattcaaaacattacctatttc

SEQ ID NO: 20839 - DNA, 1884 bp, Homo Sapiens
  misc_feature (1695)..(1708): n is a, c, g, or t
gcgctcggggttggagccagcgaccgtcggtagcagcatggctctcctctttctcctaccccttgtcatgcagggtgtgagcagggctgagatgggcaccgcggatctggggccgtcctcagtgcctacaccaactaatgttacaattgaatcctataacatgaaccctatcgtatattgggagtaccagatcatgccacaggtccctgtttttaccgtagaggtaaagaactatggtgttaagaattcagaatggattgatgcctgcatcaatatttctcatcattattgtaatatttctgatcatgttggtgatccatcaaattctctttgggtcagagttaaagccagggttggacaaaaagaatctgcctatgcaaagtcagaagaatttgctgtatgccgagatggaaaaattggaccacctaaactggatatcagaaaggaggagaagcaaatcatgattgacatatttcacccttcagtttttgtaaatggagacgagcaggaagtcgattatgatcccgaaactacctgttacattagggtgtacaatgtgtatgtgagaatgaacggaagtgagatccagtataaaatactcacgcagaaggaagatgattgtgacgagattcagtgccagttagcgattccagtatcctcactgaattctcagtactgtgtttcagcagaaggagtcttacatgtgtggggtgttacaactgaaaagtcaaaagaagtttgtattaccattttcaatagcagtataaaaggttctctttggattccagttgttgctgctttactactctttctagtgcttagcctggtattcatctgtttttatattaagaaaattaatccattgaaggaaaaaagcataatattacccaagtccttgatctctgtggtaagaagtgctactttagagacaaaacctgaatcaaaatatgtatcactcatcacgtcataccagccattttccttagaaaaggaggtggtctgtgaagagccgttgtctccagcaacagttccaggcatgcataccgaagacaatccaggaaaagtggaacatacagaagaactttctagtataacagaagtggtgactactgaagaaaatattcctgacgtggtcccgggcagccatctgactccaatagagagagagagttcttcacctttaagtagtaaccagtctgaacctggcagcatcgctttaaactcgtatcactccagaaattgttctgagagtgatcactccagaaatggttttgatactgattccagctgtctggaatcacatagctccttatctgactcagaatttcccccaaataataaaggtgaaataaaaacagaaggacaagagctcataaccgtaataaaagcccccacctcctttggttatgataaaccacatgtgctagtggatctacttgtggatgatagcggtaaagagtccttgattggttatagaccaacagaagattccaaagaattttcatgagatcagctaagttgcaccaactttgaagtctgattttcctggacagttttctgctttaatttcatgaaaatattatgatctcagaaattgtatcttagttggtatccaccaaatggagtgacttagtgtacatgaaagcgtaaagaggatgtgtggcattttcatttttggcttgtaaagtacagacnnnnnnnnnnnnnnaaacaaaaaaaagcattgtaacttatgaacctttacatccagataggtttaccagtaacggaacagtatccagtactcctggttccctaggtgagcaggtgatgccccaggaacttttgtagcacctcacttttttcctttctctggcttggtatagcatatgtttttgtaatttt

SEQ ID NO: 20840 - DNA, 1878 bp, Homo Sapiens
  misc_feature (762)..(799): n is a, c, g, or t
gcacgaggttcatttcatgaaagccttccagaaaatagtggtgcttttttataaagctgaagtcctgagcgaggagcccattttgaagtggtataaagatgcacatgttgcaaaggggaagagtgttttccttgagcaaatgaaaaagtttgtagaatggctcaaaaatgctgaagaagaatctgaatctgaagctgaagaaggtgactgaattttgaaactacaccctcagtaaagcaaacaggagttgtagataaaatgtcatgtctcatgtgtcctggttcttacatcttcctacctccctgtatcaagcatgatataagggctttcatggcaaattttattttaactgtttctatggttgctggaaatgttgggtttagtttctaaaaccatgttttaagtagctacaggagctatagatttgaatctaatgttgcattagtcttttcagttatcttctacctcctgtattttctactgtaataatgtaatttaaggccttccacaatgaacagttcactttattccctgggttttctataaacagttttaaggatatgatttggttaaaaaataatttgttataaaaattctgtttgcaaattaaactggaaaagtatccagagtctcaaaaggcaatgatttgtgagataatatggcatgcccggagccctgctcatcaatgaaaaacccatatgtaataatcgaattcatttaacatgaatcttgagtacgtggaccattgcttgcatgttaacnnnnnnnnnnnnnnnnnnnnnnnnnnnnnnnnnnnnnnaactccagatatcctaaagctcaattgtttggtctctggttttcatccttagagaagccatggagaacagacttgaaaagtttaggaaatcataatgtggcagaggtggtgggaagaagaaagttgagctttttccccttgagaaacttctgcatttagtttctatctttccaggcaaaacaaatgggtattcttttcatacaaccattttcaaatgaaccttagaaaagtcttaacatttaaggtattttatgcacagaatacacttagattgataggaaagaactcgtaatggagtttgagtaaagaaaatgactgatgtactaaacccagtaaaaattgttgaaaatgttaaaggtcagcatgttctaattgggaatctagatatagcttagatttcctattggcttagagtatttgctataacaaatgaagtgcaatgacaattatatattcctactcggtcatactggactggcttcgttctcttaatatactcagtaatgactcaagcctctggctattaacataccctagttgccgttttttaattgccatgagccaaatacttcttggtatacaattgatccatttattttaatggctgccttttcattttcatcttttcttgctgctacccatctatgtatgtagtcattggggggaaaatgtagccacattttttatgggaagactttgtgttaaaagtgaacattttgaaggtttttaactggtgaaactagcctggaataatgccaccagagactgagtggaaatcgccccttttgaaggtgccattcttatgagccaaaagtttgtcatttaaaagttcattttgagggaataacatgtaatataatttgaaataaaggtatagtaaccttaaaaagaacattataactgattgttgtgaatggggtgaatttgttaaaatgagtaactttgataaagtttttcatgcacaggcaaaatgtattcactagatttctacgtagtgatctgcttttactttgtaatttgtagttctcaaaagacttttttttaaaaaaataaagtccatacttacacttaggctttat

SEQ ID NO: 20841 - DNA, 1115 bp, Homo Sapiens
  misc_feature (153)..(166): n is a, c, g, or t
gcacgaggcttaccactaagccattctgtctctgtactgttgggaagttttggaaacccctgccagtgatctggtgatgatctgatgatttatttaaagagccgttgatgcctccaggaaacttaagtattttattaatatatatataggaannnnnnnnnnnnnngctttgtctttctctcccttcttttatcctcatgttcattcttcaaaccagtgttttggaagtatgcatgcaggcctataaatgaaaaacacaattctttatgtgtatagcatgtgtattaatgtctaactacatacgcaaaaacttcctttacagaggttcggactaacatttcacatgcacatttcaaaacaagatgtgtcatgaaaacagcccctttacctgccaagacaagcagggctatatttcagtgacagctgatatttgttttgaaagtgaatctcataatatatatatgtattacacattattatgactagaagtatgtaagaaatgatcagaacaaaagaaaatttctattttcatgcaaatatttttcatcagtcatcactctcaaatataaattaaaatataacactcctgaatgcctgaggcacgatctggattttaaatgtgtggtattcattgaaaagaagctctccacccacttggtatttcaagaaaatttaaaacgatcccaaggaaagatgatttgtatgttaaagtgactgcacaagtaaaagtccaatgttgtgtgcatgaaaaggattccttggttatgtgcagggaatcatctcacatgctgtttttcctatttggtttgagaaacaggctgacactattctctttgattagaaaataaactcataaaactcataatgttgatataatcaagatgtaaccactataaatatgtagaagaggaagttttaaaagaccttaagctggcattgtgaaggaacaccatggtagactctttttgtaaatgtattttgtatttaatgaaatgcagtataaaggttggtgaagtgtaatataattgtgtaaacaaatcctgttaatagagagatgtacagaatcgttttgtactgtatcttgaaacttgtgaaataaagattccacctctggt

SEQ ID NO: 20842 - DNA, 1138 bp, Homo Sapiens
gcacgaggggtacattgaggtgtttaagagcagccaggaggaagttaggtcatactcagatccccctctgaagttcatgtccgtgcagcggccagggccctatgaccggcccgggactgccaggaggtacattggcatcgtgaagcaggcaggcctggaaaggatgaggcctggtgcctacagcacaggctacgggggctacgaggagtacagtggcctcagtgatggctacggcttcaccaccgacctgttcgggagagacctcagctactgtctctccggaatgtatgaccacagatacggcgacagtgacgggtgaagcagatgttgagtttgctactcatgaagaagctgtggcagctatgtccaaagacagggccaatatgcagcacagatatatagaactcttcttgaattcaacaacaggggccagcaatggggcgtatagcagccaggtgatgcaaggcatgggggtgtctgctgcccaggccacttacagtggcctggagagccagtcagtgagtggctgttacggggccggctacagtgggcagaacagcatgggtggctatgactagttttgttaggaacatttgagttacttcaatcattttcacaggcagccaacaagcaattaagagcagttataatagaggaagctgggggacccattttgcaccatgagtttgtgaaaaatctggattaaaaaattacctcttcagtgttttctcatgcaaaattttcttctagcatgtgataatgagtaaactaaaactattttcagcttttctcaattaacattttggtagtatacttcagagtgatgttatctaagtttaagtagtttaagtatgttaaatgtggatcttttacaccacatcacagtgaacacactggggagacgtgcttttttggaaaactcaaaggtgctagctccctgattcaaagaaatatttctcatgtttgttcattctagtttatattttcatttaaaatcctttaggttaagtttaagctttttaaaagttagttttgagaattgagacacaatactaatactgtaggaattggtgaggccttgacttaaaactttctttgtactgtgatttccttttgggtgtattttgctaagtgaaac

SEQ ID NO: 20843 - DNA, 930 bp, Homo Sapiens
  misc_feature (207)..(221): n is a, c, g, or t
ggaaaagggaaaagctgatgctggcaaggaggggaataaccctgcagaaaatggagatgccaaaacagaccaggcacagaaagctgaaggtgctgagatgccaagtgaagtgtgtgcatttttgataactgtgtacttctggtgactgtacagtttgaaatactattttttatcaagttttataaaaatgcagaattttgttttacnnnnnnnnnnnnnnnaaaagctatgttgttagcacacagaacacttcattgttgtttttgggggaaggggcatatgtcactaatagaatgtctccaaagctggattgatgtggagaaaacacctttcccttctagttttgagagacttcctcttggctcccaggaggagggattccctgactttgacacacatggccaccttggcacaaaagccttgtggtatagaaaaacaaatttgtttttatgtcctcttctccctttccatctttcagcatagacttaactcccttaagcccagacatctgttgagacctgacccctagtcattggttaccagtgtgtcaggcaatctggactttccagtgatgccactgagatggcacctgtcaaaagagcagtggttccatttctagattgtggatcttcagataaattctgccattttcatttcacttcctgaaagtcagggtcggcttgtgaaaagttgttaaacaacatgctaaatgtgaaatgtcaaccctcactctaaactttccctgttcagagcatcagatgaagacttcattgggttttatagtggctttctgatttttggtagtccattgaagaagggagtttgaaagttgttgtatactgttaacgattgtctgcccatgtcctgcctgaaataccatgattgtttatggaaagtatctttaataaagctggatacagtttggcttgg

SEQ ID NO: 20844 - DNA, 1293 bp, Homo Sapiens
gcacgaggcccgagggagaaaacagcaacaagctgagctgctgtgacagaggggaacaagatggcggcgccgaaggggagcctctgggtgaggacccaactggggctcccgccgctgctgctgctgaccatggccttggccggaggttcggggaccgcttcggctgaagcatttgactcggtcttgggtgatacggcgtcttgccaccgggcctgtcagttgacctaccccttgcacacctaccctaaggaagaggagttgtacgcatgtcagagaggttgcaggctgttttcaatttgtcagtttgtggatgatggaattgacttaaatcgaactaaattggaatgtgaatctgcatgtacagaagcatattcccaatctgatgagcaatatgcttgccatcttggttgccagaatcagctgccattcgctgaactgagacaagaacaacttatgtccctgatgccaaaaatgcacctactctttcctctaactctggtgaggtcattctggagtgacatgatggactccgcacagagcttcataacctcttcatggactttttatcttcaagccgatgacggaaaaatagttatattccagtctaagccagaaatccagtacgcaccacatttggagcaggagcctacaaatttgagagaatcatctctaagcaaaatgtcctatctgcaaatgagaaattcacaagcgcacaggaattttcttgaagatggagaaagtgatggctttttaagatgcctctctcttaactctgggtggattttaactacaactcttgtcctctcggtgatggtattgctttggatttgttgtgcaactgttgctacagctgtggagcagtatgttccctctgagaagctgagtatctatggtgacttggagtttatgaatgaacaaaagctaaacagatatccagcttcttctcttgtggttgttagatctaaaactgaagatcatgaagaagcagggcctctacctacaaaagtgaatcttgctcattctgaaatttaagcatttttcttttaaaagacaagtgtaatagacatctaaaattccactcctcatagagcttttaaaatggtttcattggatataggccttaagaaatcactataaaatgcaaataaagttactcaaatctgtgaagactgtatttgctataactttattggtattgtttttgtagtaatttaagaggtggatgtttgggattgtattattattttactaatatctgtagctattttgtttttgctttggttattggttttt

SEQ ID NO: 20845 - DNA, 1962 bp, Homo Sapiens
  misc_feature (462)..(498): n is a, c, g, or t
  misc_feature (802)..(857): n is a, c, g, or t
  misc_feature (975)..(985): n is a, c, g, or t
gcacgagggaaaagagctatgaaggtgtatgagcccatccttttattcattgactctaagagtcaaattttctagtgcatatcctattgccagcataaggatgaggagggggaaagggtcttaattctatgtacagcagagacattaaacttgctgtgtccgggctgcatcatcttcctggactgtttctgttgttctctgtgttcacattttttcctgcaacttttaagctactgtcttttttaaatagctatatgaacaccaaatttgggtaccattttatcactgttcaaagcactgtcaaattcctttcatcctttaatagttaagatctttgaatcttcagtctgatttttaatgtaagcaaaaacagaaccattgaatagtaatttcttgagaacctcaggtgttctataaacagtcctttcctgtatgtcttctattaccctaagaccagagttnnnnnnnnnnnnnnnnnnnnnnnnnnnnnnnnnnnnntatccatggctggcactttactcattgcacttgagtttattgccccataactaaaggatcaggatgatggtagaacggagatctgggtttcagagctttcccatttaagaaaaatagatcttgagattctgattcttttccaaacagtcccctgctttcatgtacagctttttctttaccttacccaaaattctggccttgaagcagttttcctctatggctttgcctttctgattttctcagagggctcgagtctttaatataaccccaaatgaaaagaaccaagggaggggtgggatggcannnnnnnnnnnnnnnnnnnnnnnnnnnnnnnnnnnnnnnnnnnnnnnnnnnnnnnnaagattagccattctctgctgctatttccctacataatgtcaatttttaaccataattttgacatgattgagatgtacttgaggcttttttgttttaattgagaaaagactttgcaannnnnnnnnnnaggatgagcctctcctagacttgacctagaatattacatattcctccagtaagtaatactgaagagcaaaagagaggcaggattggggtcacagccgcttcttcagcatggaccaagtgggccttggggattgcagcgttctcgaagtggctgtaggactcgaatttacagaaagccacagaggtgcaacttgaggctctgctagcaagccaccagtgaggctattgggtaaccacctttctatacaggagattggaatctactttgtcatttatccaccacagtgacaaaggaaaagtggtgccgttatgcaatccatttaactcataaacatattactctgagtaactggccagccattcatcggatccttcattgggtactcctgaaatcagacatgttcctgtagaaagaattttaagttaggctttctatgcacctatcaagaatcaagagaatagattgtatcaaacaacggcagggaaatccttcagcaattctaatccactttgggttttcagctgtttttacatctaaagcaatagactagaactgaattatcttctacatagtaaaatcacaattgtggaattacaggaattctggtgatattaaggtgaaataacaaaacacaaaaggccctattttaacagttgatgtgacagtaagttttaatagaacctgtaacttcattttggaaatgcttctccaccaaataagggctttttcccctatttaaggagccagatggattgaaagatgtggaaataggcagctgtagatcttgatcttccaggtaccccatgtacctttattgagcttaattataatactgtcaaattgccacgatctcactaaaggatttctatttgctgtcagttaaaaataaagccctaaatacatttttattctttctactgagggcattgtctgttttctttgtaaatgccgtacaataaacaaattattcctcgtgc

SEQ ID NO: 20846 - DNA, 1053 bp, Homo Sapiens
ataatgcaagcccttgcatggcaatccaaatttattgaactactgatgctaagttatacaaaattgcaccactttaattaaggcttttagtttacatttggccacctcaaagtagttgtaacattaggttggtcaatttaaatactgtggctccctgttggatagacacacaatctttacatccaaacattaatgcatacaaagcaacaaggcattgttaaataaaacagcaatagttactgcaaattaggccttgtgaccaattacatatgattaaaattacttcccacattcacatccacagtactcgtccaccatttaacatctcaaccaaaacgttacacatgtgaaacaatcactaacaggcaaaaatactaaacctgtatatttggtattgcaaatacacttatgcatgagcaagcaagggattcacagtgagaatctacagctgcagaagcctgaaaatgatttacaaaaattgttaaatcattaaaaaattgtttgaaaatatacacttcttgttgtagacccccactgtacacacgactataaacattgttccctatgtaaacaaaaaaaggaaacatataataagagatttgaaaagtctggacatttccttcccaacagatattaaaggcaacgtctttaatctaagacattatactgaaaggactatcatgttttaaagacaagatcaccgtctccacaggttttttaaaaattaaaaaaactatatagctgtgttaatcaaagcgcttattttgtacaataataatgaccttgaatttcttaaaaaaaattacaataagctacaagtatcaaagaagcgaagttatctggagtagtctatataggagctctttggactttcttttattatgctaaaatagtggtgcttttaggatttacattattgtactctccaatacaaagtatggggcatgttaaagtatacagtacaccattttcatacatgtacaacattggtggatgaagaatgtctcttagcagtaatactggaggtagccctcgtgccgaattcctgcagcc

SEQ ID NO: 20847 - DNA, 1486 bp, Homo Sapiens
gcacgaggctccccgcggcctcttcgcttttgtggcggcgcccgcgctcgcaggccactctctgctgtcgcccgtcccgcgcgctcctccgacccgctccgctccgctccgctcggccccgcgccgcccgtcaacatgatccgctgcggcctggcctgcgagcgctgccgctggatcctgcccctgctcctactcagcgccatcgccttcgacatcatcgcgctggccggccgcggctggttgcagtctagcgaccacggccagacgtcctcgctgtggtggaaatgctcccaagagggcggcggcagcgggtcctacgaggagggctgtcagagcctcatggagtacgcgtggggtagagcagcggctgccatgctcttctgtggcttcatcatcctggtgatctgtttcatcctctccttcttcgccctctgtggaccccagatgcttgtcttcctgagagtgattggaggtctccttgccttggctgctgtgttccagatcatctccctggtaatttaccccgtgaagtacacccagaccttcacccttcatgccaaccgtgctgtcacttacatctataactgggcctacggctttgggtgggcagccacgattatcctgatcggctgtgccttcttcttctgctgcctccccaactacgaagatgaccttctgggcaatgccaagcccaggtacttctacacatctgcctaacttgggaatgaatgtgggagaaaatcgctgctgctgagatggactccagaagaagaaactgtttctccaggcgactttgaacccattttttggcagtgttcatattattaaactagtcaaaaatgctaaaataatttgggagaaaatattttttaagtagtgttatagtttcatgtttatcttttattatgttttgtgaagttgtgtcttttcactaattacctatactatgccaatatttccttatatctatccataacatttatactacatttgtaagagaatatgcacgtgaaacttaacactttataaggtaaaaatgaggtttccaagatttaataatctgatcaagttcttgttatttccaaatagaatggactcggtctgttaagggctaaggagaagaggaagataaggttaaaagttgttaatgaccaaacattctaaaagaaatgccaaaaaaaagtttattttcaagccttcgaactatttaaggaaagcaaatcatttcctaaatgcatatcatttgtgagaatttctcattaatatcctgaatcattcatttcagctaaggcttcatgttgactcgatatgtcatctagaaagtactatttcatggtccaacctgttgccatagttggtaaggctttcctttaagtgtgaaatatttagatgaaattttctcttttaaagttctttatagggttagggtgtgggaaaatgctatattaataaatctgtagtgttttgtgtttatatgttcagaacc

SEQ ID NO: 20848 - DNA, 1341 bp, Homo Sapiens
  misc_feature (473)..(481): n is a, c, g, or t
gcacgaggcagcatatcttttctgttgtgacagacacttcacatactgctggtttaacaatgcatgcatcaattcttgcatatatgtttaatttggttgaagaaggaaaaataagtacatcattaaatcctggaaatccagttaacaaccaaatctttcttcaggaatatgtggctaatctccttaagtcggccttccctcacctacaagatgctcaagtaaagctctttgtgacagggcttttcagcttaaatcaagatattcctgctttcaaggaacatttaagagatttcctagttcaaataaaggaatttgcaggtgaagacacttctgatttgtttttggaagagagagaaatagccctacggcaggctgatgaagagaaacataaacgtcaaatgtctgtccctggcatctttaatccacatgagattccagaagaaatgtgtgattaaaatccaaattcatgctgnnnnnnnnnctctgcaactcgttagcagaggaaaacagcatgtgggtatttgtcgaccaaaatgatgccaatttgtaaattaaaatgtcacctagtggccctttttcttatgtgtttttttgtataagaaattttctgtgaaatatccttccattgtttaagcttttgttttggtcatctttatttagtttgcatgaagttgaaaattaaggcatttttaaaaattttacttcatgcccatttttgtggctgggctggggggaggaggcaaattcgatttgaacatatacttgtaattctaatgcaaaattatacaatttttcctgtaaacaataccaatttttaattagggagcattttccttctagtctatttcagcctagaagaaaagataatgagtaaaacaaattgcgttgtttaaaggattatagtgctgcattgtctgaagttagcacctcttggactgaatcgtttgtctagactacatgtattacaaagtctctttggcaagattgcagcaagatcatgtgcatatcatcccattgtaaagcgacttcaaaaatatgggaacacagttagttatttttacacagttctttttgtttttgtgtgtgtgtgctgtcgcttgtcgacaacagctttttgttttcctcaatgaggagtgttgctcatttgtgagccttcattaactcgaagtgaaatggttaaaaatatttatcctgttagaataggctgcatctttttaacaactcattaaaaaacaaaacaactctggcttttgagatgacttatactaatttacattgtttaccaagctgtagtgctttaagaacactacttaaaaagcaaaataaacttgggttacattt

SEQ ID NO: 20849 - DNA, 933 bp, Homo Sapiens
gcacgaggctgatttccgaaggctgacaatcgtttgtggaatgtaatcttgatgccttgatactgagacttgggagggaaactaagaaatggttgacagcgttcccacccatctacaatgttattttaggtgctttgtggtaagtcttttttcttagattgcgctaaaatttcttagattgttcagcgctcagaacaaaagtttgaaaaatgcattgttcatatgaatgtcatctcttttcagtttccagtatcctttttaaaaaatggcaaaagcctagatttacaatttgatgaacactaaatatttcttattaatataatctatttttgtattttacttaatgagctttaagtgcctgtcgttctgaaaattgtgtatttataattcagcttatctcacaattggacctaatagcatttctttgtgcagttaggtgacgagcactgctttgaggcccaagcactagtagagatgcgcgatacaggtctagtttcggtaactgttccagacatcaagcaataaaaaaatgaataccacaaaagatgtttgattttacagtggagccttactgaaccagcattcagaagtttaaggtcctcctaggtatgagtatttttagtagtggatcactgtggacagggtgcagctctaccagttcctgtttcttctgagccagaccctcttcagggaaggaccaattaattttaaaactcacttgaagcacagctggtcatggggcttggtataaagttcctatttccaccctgatacttccaattcctggaaccccccactcccccatccctcctccctatcaaactagtataatgattttgaatcggtacagtgtgtttaactgtaactaagttcacagactattattatcctttgtaataaattaacctagcaataaaattattctgtttcttt

SEQ ID NO: 20850 - DNA, 829 bp, Homo Sapiens
gcacgagcacgaggctgaggtcaacactgagcagatctgttctttgagctaaaaaccatgtgctgtaccaagagtttgctcctggctgctttgatgtcagtgctgctactccacctctgcggcgaatcagaagcaagcaactttgactgctgtcttggatacacagaccgtattcttcatcctaaatttattgtgggcttcacacggcagctggccaatgaaggctgtgacatcaatgctatcatctttcacacaaagaaaaagttgtctgtgtgcgcaaatccaaaacagacttgggtgaaatatattgtgcgtctcctcagtaaaaaagtcaagaacatgtaaaaactgtggcttttctggaatggaattggacatagcccaagaacagaaagaaccttgctggggttggaggtttcacttgcacatcatggagggtttagtgcttatctaatttgtgcctcactggacttgtccaattaatgaagttgattcatattgcatcatagtttgctttgtttaagcatcacattaaagttaaactgtattttatgttatttatagctgtaggttttctgtgtttagctatttaatactaattttccataagctattttggtttagtgcaaagtataaaattatatttgggggggaataagattatatggactttcttgcaagcaacaagctattttttaaaaaaaactatttaacattcttttgtttatattgttttgtctcctaaattgttgtaattgcattataaaataagaaaaatattaataagacaaatattgaaaataaagaaacaaaaagttaaacctcgtgc

SEQ ID NO: 20851 - DNA, 1435 bp, Homo Sapiens
gcacgagggggaaagtctttttaatagaacaagaacgatcttaatttaagaatattatcctggtttaacaacagtgccctgtttacaacagattgtgccctatctcatctgcagccgaggaataaaggattctgattagaaagagggttgcctacagattagtaagcaattccttggatcttatgcacagaacttgtaccatttgaatctgttttatgcttaaatcaaagtgctttgatcaaatgcataacctgccatatctttacatatttgttggtagcaatttgtattaaagaaatcacaagtgcaaataaaaagtcatttatcatttgtttaactaaactgtcatggtttagtttacaatttttaaaaagttcttaaaatactgaaaatgcagttgacacttgtgtatggcttatgaagttatttttgatagtcttacattacttgaattgttcaaagtacagtatattttaaattaagaaaagtgaactatatgtatttgttttatacatttaaggcttagactcataaataatgctattgtttatgatttgaaaactttcaggcaaaatccaatttacatttttcccttccctagcaattacttttttccagcttcaactcttcttagttactaatactttgttgactttaaaaatgaaatcattcacaaacttttggtatatgatggagaatgaaaaactagagtcagacagctttaattgacattgtcaacacctccagttatcaggaatacatttttttactgccttaacctgtaatgcgtagaatatgcatcaatttcttgaaggagattcatgtttttataagaattttcatgtaattattgcaattgtggtcaaataaggaacgtttcctgcttgaaattatattgatttaaatgatgtgtgagatgtttcaccattttcaggcactgtgtaattctattgtaataaactggcaggtatctttgtaactataaatagtgcatgctcagccatgtacactgtaaatagcctttaccaaacgtgtttgacaaggaccataattaacatcacttagtgaattgtgataaagaaaaaaaagccatgatttattcgatgtgattggcttgtttttatgtggcgccaagaacgaacctgtttaacagctgtaaccaatggtactgatctatccatccaatgttgtcattatatttgactgtggttcaacagtattgcgttgtcagactaggaaagctaaacgaacaaaatggttttagttttgctgaagactggccttattaatggacagctttcctaacaagagattattaactttatcaggtgttaacatctgtttcaggaacatggcagtatgtttacatgtcagaagttttgtttaattttatggtatttttaaattgacttgtttaaataaattcagcaaatgg

SEQ ID NO: 20852 - DNA, 1176 bp, Homo Sapiens
gcacgagggactcagtgggaacgccatctgagcggggcatgacctatgacgcactccacgtttttgactggatcaaagcaagaagtggtgacaaccccgtgtacatctggggccactctctgggcactggcgtggcgacaaatctggtgcggcgcctctgtgagcgagagacgcctccagatgcccttatattggaatctccattcactaatatccgtgaagaagctaagagccatccattttcagtgatatatcgatacttccctgggtttgactggttcttccttgatcctattacaagtagtggaattaaatttgcaaatgatgaaaacgtgaagcacatctcctgtcccctgctcatcctgcacgctgaggacgacccggtggtgcccttccagcttggcagaaagctctatagcatcgccgcaccagctcgaagcttccgagatttcaaagttcagtttgtgccctttcattcagaccttggctacaggcacaaatacatttacaagagccctgagctgccacggatactgagggaattcctggggaagtcggagcctgagcaccagcactgagcctggccgtgggaaggaagcatgaagacctctgccctcctcccgttttcctccagtcagcagcccggtatcctgaagccccagggggccggcacctgcaatgctcaggagcccagctcgcacctggagagcacctcagatcccaggtggggaggcccctgcaggcctgcagtgcccggaggcctgagcatggctgtgtggaaagcgtgggtggcaggcatgtggctctccttgccgcccctcaacctgagatcttgttgggagacttaatggcagcaggcagccatcactgcctggttgatgctgcactgagctggacagggggagtccgggcaggggactcttggggctcgggaccatgctgagctttttggcaccacccacagagaacgtggggtccaggttctttctgcaccttcccagcacatgcagaatgactccagtggttccatcgtcccctcctgccctgtgtacctgcttgcctttctcagctgccccacctcccctgggctggcccactcacccacagtggaagtgcccgggatctgcacttcctcccctttcacctacctgtacacctaacctggccttagactga

SEQ ID NO: 20853 - DNA, 1144 bp, Homo Sapiens
  misc_feature (858)..(866): n is a, c, g, or t
gcacgaggcccagccgggtcccaagcctgtgcctgagcctgagcctgagcctgagcccgagccgggagccggtcgcgggggctccgggctgtgggaccgctgggcccccagcgatggcgaccctgtggggaggccttcttcggcttggctccttgctcagcctgtcgtgcctggcgctttccgtgctgctgctggcgcagctgtcagacgccgccaagaatttcgaggatgtcagatgtaaatgtatctgccctccctataaagaaaattctgggcatatttataataagaacatatctcataaagattgtgattgccttcatgttgtggagcccatgcctgtgcgggggcctgatgtagaagcatactgtctacgctgtgaatgcaaatatgaagaaagaagctctgtcacaatcaaggttaccattataatttatctctccattttgggccttctacttctgtacatggtatatcttactctggttgagcccatactgaagaggcgcctctttggacatgcacagttgatacagagtgatgatgatattggggatcaccagccttttgcaaatgcacacgatgtgctagcccgctcccgcagtcgagccaacgtgctgaacaaggtagaatatgcacagcagcgctggaagcttcaagtccaagagcagcgaaagtctgtctttgaccggcatgttgtcctcagctaattgggaattgaattcaaggtgactagaaagaaacaggcagacaactggaaagaactgactgggttttgctgggtttcattttaataccttgttgatttcaccaactgttgctggaagattcaaaactggaagcaaaaacttgcttgannnnnnnnncttgttaacgtaataatagagacatttttaaaagcacacagctcaaagtcagcccaataagtcttttcctatttgtgacttttactaataaaaataaatctgcctgtaaattatcttgaagtcctttacctggaacaagcactctctttttcaccacatagttttaacttgactttcaagataattttcagggtttttagtggtgttggtttttgtttgttggtttgggtgggagaggggagggaagcctgggaatgtttaacaactttttccatgtc

SEQ ID NO: 20854 - DNA, 1311 bp, Homo Sapiens
ccggaattcccgggtcgccccttcagcgtccgaggagctgcagcagagagggtaacagctcttgcacctgtttctcttgcacctgacgtgcagctgctcctacccacctctcctggctgagccttgcctgatacagcagcccggaggcaccacttgcttcccgagtctcaccctcccaggcagctcctacactcaactgcttctctaggaaaggtctcacctccagcctggagcagtcgggattacagaaagccccatccttggcttagggagcgccatgacgactgaaattggttggtggaagctgactttcctccggaaaaagaaatccactcccaaagtgctgtatgagatccctgacacctatgcccaaacagagggagatgcagaacccccgaggcctgacgctggaggccccaacagcgactttaacacccgcctggagaagattgtggacaagagcacaaagggcaagcacgtcaaggtctccaactcaggacgcttcaaggagaagaagaaagtgagagccacgctggcagagaaccctaacctctttgatgatcacgaggaaggacggtcatcaaagtgaagggctgaggagggtgctagcacctcttggctccctgccatcagccagatctgagacaggaccttgccacgctggcctctttggccatagctgaagctgtggggccagttgatacctgctggcaggaaatggctgttttttaggtttgtatttatgtgccgccacttttgtaaggcctgggagatcccagggtcctccaccctccccctgaccacatacaaaggcactctagttcaagagtgaaaagtctcacccaggaggaacagctctccttgaagcaatggcagggccagcagggaggtgggcatggcagggaatggagtgagccaaacagacttcacttccttactggacacagggtcaagggcgagtttcaattgctgctccctttactttctctacctgtgactactccctggaccaatcctgaggagggcacattttccagaagccacgtgataggggctggtttctgtggagccagaggcagagacactgaacttggagctcacctcctaacaccggcagtaaacttcctggaactttgccctcatgtgcgaggggacagaggactctggcactctgttaggtgctgtagaaactacattgatggtagtttggcctgttagttcctgttttggccatgacttttgcagatggcaagtcacacaccctcaagggaagctacccgggccaattcgggggagtgggttggggaattt

SEQ ID NO: 20855 - DNA, 661 bp, Homo Sapiens
gcacgaggtaccttaaaagttgtctaaactgtccctccctggctttttttggtttggggtagacctaagggtgtttgttagtctcaaaactgtgaagtgacatgtcagaacagtccagactggtaagaaaattaatggcttcacttgaatttaaaccagctctagataggaaaaaaatcagtctcctcatttgctttttaaatggagtagtacatcccatattttagaacaagtaggggtgccttgcttaaataaaaatagcatttaatgtataattgtgtgaagggtttatggataaagctgtacttctgtcacaatgtggcagtactttctgctttaatattaaacagcttgttatttaaatattggacaaaatggctggcttcaaaatatagtcattaataaactaactttatgtgcacctgtgtaggagaatcaaaatcctgtatgctttctttgccttgttcctgttctcagggtgacgactgccaccaggagatgcagttctagttcttaaaattaaatttgcccaggtttctgacaggtgatacctggaagagagactatgtcttctcttacttaatacataaccatctttgattaccagctaagatgcgaaatcactgtactgtagtcaataaatgaagacttgtttcggctg

SEQ ID NO: 20856 - DNA, 1650 bp, Homo Sapiens
gcacgagggttggagatgaggaagtgctagagtaggtgtttgttttggttcttggagggaaaagattctttattccaatttccagagagaagagaaaactcacccaggaagtttaaaaattctttaaacaggtattttgatattggagaataacatgcatataattctgtaggaatgcacatgtaatccaagtgagtggagagtgtttttaatgtttttgaatgaaggaaatgaggttttgtttcacctgttttgcagcagtaagagaaactagtgctgcaagaatgtattttttaatgaagttccttattttgtcttgcatgttttagttttgcttatttttaaatttggaggtcctccataatgtcagataatattgacctgccatacgttagcactcttagttccgctactgtctttaacaggagcaaagagctgtgataaaccatgcttttttgagcttgtctgactcctaattaataacatgtttttggcaagacaacagattgaggttagaggatcagtaggacatttttattccatctgtcctatggggaaatttacaaatcccgtgctctaaaatgttctcaaacatttatatagatttccctttcatcttactaaattttgcattgttcttttcaagtatgtttcgtatttactgtctttttttctgccatttccaaataataactccagatttcataattccagtttttacattccgttatctttctggtacaaccattcccattcagccttaaatctgagtcctttttagcagcaacttttttcctgggatcctccttcgtggtcttctaagtcagtgttagttttgaaatttttggccctgcataagttctgcatagcatctaatgtcaaaatagaaccaactggtaatcacagtattatttagtgtggtttccatgacaacaaaaatacatacgaagaaaacttctcaggttactatgctgaaattccaaaatgtctgagttttgaatagtgatcactttgttctggtattgacgcaattatattaggaaaaaagttggttgactgtttttgtttaattgacttctaaaatgttcaaattgtctagttctaaaagtttactaaatgcctagtgcagttaaacatactcttgtttaagtgtgtgttgctaaattttttactgtcattactaaataatctgtgtggcaaaatgtgtgtcagcacttttccctccttttttatctcctattttcaggagtcaaatgtagccataaactgtatccttgtctgacactttagctaaaaatttccagttaggggagtttattgccaaattaaatttggctgttccccccaacccatatagatattaaggaaggtgtacttaaaaaatgtttggactgcttttaaaacctgagcaatgtcattaatccatatgtggactagtgatgaatagatattttcataagagtttaaatgctgatatttggtggaagtagagagtaactcatattctatcaattcagtattcttactatggttgttttccctatttgttcaatagactgataatactggaatttatagagtttgagccattacaacttttgtgaggatgtgtttcaacatttctggacaatctattttgtatttctggaa

SEQ ID NO: 20857 - DNA, 1473 bp, Homo Sapiens
gcacgaggatgctcctcagatattaaaggtgttagctgattgtattttatctctaaagatttagaactttagaaaatgccgacttcttccatctatttctgaaaggttctttgtggatttatatagagttgagctatataaacattaactttagatttgggatttaaaatgcctattgtaagatagaataattgtgaggctggattcactacacaagatgaacttcacttcataaattaattataccttagcgatttgcttctgataatctaaaagtggctagattgtggttgttttggttaaggtgatatggaggtgggagagcttttagttaagtaagaagctatgtaaactgacaaggatgctaaaataaaagtctctgaagtattccatgccttttggaccctttcctcgcaactaactgtcaactgttgatcaaaaaagtcaaggcattgtatgttgcttctgtggttattattctgtgatgcttagactacttgaacccataaacttggaagaatctttgagcaaattttctcagttgtctgtatgacttcagtatattcctgggaatgccataggattttttgtgcttgatacatggtatccagtttgcatagtatcacttctttgtaatccagttgctgttaagaatgatgtactttaaaggaaaagagaaaactgcatcacagtcccattctccagtgtccatgcaatgaattgctgagcatttaggaagcagcaccaagtctattacaggcatggtgtgaaacttgatgtttgacctgtgatcaaaattgaaccattgtacagtttggcttctgtttgcttcaaaatatgtagaattgtggttgatgattaatttgcgagactaactttgagagtgtaacagttttgaagaaaacattgaatgttttgcaaatgaaggggcttcacggaatgttacaatgttactaatataatttggcttttgttatgcaaattgttaacaccagctattaaaatatattttagtagaaatgctttaattcatatttttttcctctacactgtgaatctttaagccttggtggactagagcaacatcgtgctgcccaaaggactaacctatgcaaactagttcacattttagtggatgtcgcagttaatgtgtaataagacattatttcccctgcataatgtacaacagcattgaaatgacacattaagcctagcatcacattgtatagtacagtcactcacaaacccttcaaggctaccctaatcattaacattaatatttgtttaaaagcaaatcaccgatttatctattgaaactacttaaatgacggcaaaccaggaatgacagatggctgtgtcagcaatggctttaatgtgttccctgcagtggtctcctatgatagaactgcgttctcaatgcactctcttcaggtcttaatattctgtgttttctctctgtatttgtaaacatta

SEQ ID NO: 20858 - DNA, 963 bp, Homo Sapiens
gcacgagggcgtcttctgggacctgtactgcgcggcgcctgaccgaagagaggcctgcgagcactccggcgaggccaaggccttccaggactatagtgctgcagccgcccccagccccgttatggggccccagagctatggaggtggcatgcgacccccacccaactccctcgccggcccaggcctgcctgccatgaacatgggcccaggagttcgtggcccgtgggccagccccagtggaaactcgatcccctactcctcctcatcccccggcagctacaccggacccccaggaggaggtgggccccctggaacacccatcatgcctagccctggagattccaccaactccagcgaaaacatgtacactatcatgaaccccatcgggcagggcgccggcagggctaatttcccgctcggccctggcccggagggccccatggccgccatgagcgcgatggagcctcaccacgtgaacggatccctgggctcgggcgacatggacgggttgccgaagagttcccccggcgccgtggccggcctgagcaacgccccgggcaccccgcgggacgacggcgagatggcggccgccgggaccttcctgcacccgttcccgagcgaaagtactcgccagggatgaccatgagcgtgtgatggggcggcagccccgggcctctctgcgggcctaggcttctgcccagcgcccctgctcagggcgaggggctgaggtcacacctcgggcacctggactcctggccaatcaaggcttgcccagctgggaggccccacacaaaagactcttaccattttattaaaaacgcaaggacctcagagacgttcttttctgtatggacccttcctgccatttgtattttgtcccagagagaaaggctctttggggggcccctctccccaggacgtcagggggtggggcccataaataaatggaagctggttttggtt

SEQ ID NO: 20859 - DNA, 594 bp, Homo Sapiens
gcacgaggctgttgtgatatacaccaatggataaactaacggaaactgctttttgacattaaaagacaggagaaattatatttaactaagtaaaagttaagtcagaattacttgggtgatgtgattcaatttagttaaaggatgatatagagaaaatacattatttagcattatttcttcagctataatgaattgctatagaaatcaggcagatctttctaatgtgtattgattggtcttttcagctactctgaacagattactaaggccatctcctcatctctaagggagaaaaatagtctgtagatgaataatgtaaggtaaagagttgcatgtcagtctttgtaattatttacactttaactttctccagaactcagacatgatttcaacatggtgttagatttgtgcattttattttcctgaccacctcattccagccaatgtatggttatccactctgtgtgccaaaaccaatcatgcctttcacggccctttagttcagagaagttctgcactgatttttagtctcttgatgtctcaatcttacatgtataccaatcacaatggaataaagtgttgagttgtactgtg

SEQ ID NO: 20860 - DNA, 817 bp, Homo Sapiens
gcacgagggagacactgcgtgcctgccaccagctgcaccaggagggcaagttcgtggagcttggcctctccaactatgcagcctgggaagtggccgagatctgtaccctctgcaagagcaacggctggatcctgcccactgtgtaccagggcatgtacaatgccatcacccggcaggtggaaacggagctcttcccctgcctcaggcactttggactgaggttctatgccttcaaccctctggctgggggcctgctgaccggcaagtacaagtatgaggacaaggatgggaaacagcccgtgggccgcttctttgggaatacctgggcagagatgtacaggaatcgctactggaaggagcaccactttgagggcattgccctggtggagaaggccctgcaggccgcgtatggcgccagcgcccccagcatgacctcggccaccctccggtggatgtaccaccactcacagctgcagggtgcccacggggacgcggtcatcctgggcatgtccagcctggagcagctggagcagaacttggcagcggcagaggaagggcccctggagccggctgtcgtggacgcctttaatcaagcctggcatttggttactcacgaatgtcccaactacttccgctaggcccatcgtttctcaggctgcccaaggctcttctgtaacatcttttgttactcacattttctttaatttagaactgcctcagtaaattcttagggatggaagtatttggacaaaaacctaatagaagagtcaccaccaaatgaagaataaaactcccagggtgctgtgtgttaaaaaaa

SEQ ID NO: 20861 - DNA, 1061 bp, Homo Sapiens
gtcatcctcctccaactactgattgacatatggatcatcagttcagaccctcactgcatacaggatccctagagggttctatttaatagcttgaggaagggagactttaaaaggacgtgtgtgagtgaaataggatatagccattaccacggtgccaggacctgacagcgttccaattctttttgcagcatggggaatcaaaggtggcatgccaagttcaactcagggctgaggtatccacattgtccacatcaggcaagccctgcactgacggttgagcctcatggagaggagcatgtgttggaaagagatccctttgttaactgttttgtggtgttctcttcaatgaattagagctcatgccccttttctggctttgctgttgattttggatggtagagaatattcctgagagccttccttttggcccccagcttatgccacccactctcttctcttggttgaattctctgaaggaaaggttcatgtgctattgtcctgttagtcaatagtcttcatatataattgtgttacatatattgctgtagactctcagaaatcagggtagagcttttcctttgagcagtttaatgagtgaattcagcagcaaagtcgcaagaaatggttctccagccaggagaggttatgtttatcctctgattgcccgttttctctgcacacagtgatatcgtattcagtgagaggtgctgttggcacccagcagcaccctgggcacacagcatttcatgtcatgtcacagtgtacaagctaccctctaattcagaaagaagagcattttgcacagagaaaaataaaaagatccatgaatgtcatcttttatcttttattttcagttggctgatgttggaatttttgttcttgtcatgaacttgtaaaccaatcttgccaagatacaagttgttttggtttttcactacaatgacctcttgttcctcctgtcttgactgctgacgttcctcaatgattctattgtctattttatgggaagcagccttcccataggtttccttttacacactgcagggctatctttatacttt

SEQ ID NO: 20862 - DNA, 1192 bp, Homo Sapiens
gcacgagggaagaagatcaaaacccaccatgccccaggctcaacggcgtgctgatggaagtggaagagcctgaagtcttgcaggactcactggatggatgttattctactccgtcaatgtactttgaactacctgactcattccagcactacagaagtgtgttttactcatttgaggaacagcacatcagcttcgccctttacgtggacaataggttttttactttgacggtgacaagtctccacctggtgttccagatggaagtcatattcccacaataagcagcccttactaagccgagagatgtcattcctgcaggcaggacctataggcacgtgaagatttgaatgaaactacagttccatttggaagcccagacataggatgggtcagtgggcatggctctattcctattctcaaaccatgccagtggcaacctgtgcgcagtctgaagacaatggacccacgttaggtgtgacacgttcacataactgtgcagcacatgccgggagtgatcagtcagacattttaatttgaaccacgtatctctgggtagctacaaaattcctcagggatttcattttgcaggcatgtctctgagcttctatacctgctcaaggtcattgtcatctttgtgtttagctcatccaaaggtgttaccctggtttcaatgaacctaacctcattctttgtgtcttcagtgttggcttgttttagctgatccatctgtaacacaggagggatccttggctgaggattgtatttcagaaccaccaactgctcttgacaattgttaacccgctagactcctttggttagagaagccacagtccttcagcctccaattggtgtcagtacttaggaagaccacagctagatggacaaacagcattgggaggccttagccctgctcctctcaattccatcctgtagagaacaggagtcaggagccgctggcaggagacagcatgtcacccaggactctgccggtgcagaatatgaacaatgccatgttcttgcagaaaacgcttagcctgagtttcataggaggtaatcaccagacaactgcagaatgtagaacactgagcaggacagctgacctgtctccttcacatagtccatatcaccacaaatcacacaacagaaaggagaagagatatttttgggttcaaaaaaagtaaaaagacatgta

SEQ ID NO: 20863 - DNA, 927 bp, Homo Sapiens
gcacgaggcaggccaacaagacagctttttacatgtgtccaaaggatggcctttcgaaggcctggaagtatttcactgttggaagaagtaaacaagaatgacattccagatggaaatagaattctctctcttgcctttgaccaacatggtactaaggggtttcttctttcccaatgtatgtacgtgccctgctgggggccttactttatagaatgagagcatccgagcttccctaatgaatctggctagttctgtgtctggctgaggatacaggagtgggacatccactctcggatccctcagagcacagaaaccttcagctttgctgtctctgaagtatttcctccagtttccctgcgggcccctatgtttgagtttgatggctgctggatcctcactcaacgaaaactcggttggaaactgttccgcctggcagtccttttttgttgttttccatctcatttcccttccatctgaaagtggcattcagctgacttgctcatttagactgttcacggagtctgaatctgccaacgtggtgttggaggctccaccttgaaaagggccacagtcagggcaactttccccatacaggaaaacttgaaaattacatcaacagtctacgtcacagccaaattatatttcctttataccaaacaaaactatggagaactaaaagtacatcacacaaaacgtttatagtgttttgcatgtgacctatttcagtatttatataactagattagtgctttctagcaaacggttctgttaattagcgagtcactgttgattctgctgtggtggtaggttgataccgtgtaactaatcccgtggatgcctcctggttatttttgtccaaacgaagcagccgtggtagtagctgtctatgattcttgctcagcaaagtaaaataaatgttaaatatgg

SEQ ID NO: 20864 - DNA, 1284 bp, Homo Sapiens
ctgggacaccactctgcagaatgcagatgatccattctggaggaagctgtcccttgagctcagtgagctcccaggcaagcagggcatctggccgacttccctcacaacagctgctcccacatcccctcggactggagcttcagccctgactgaggtgggcagacctaagacctgagaccacaagattagctcagtgtctaccaagcatctagccactgtccagggccagagcataccacgtctgcagtgcctgtgagcagagccagcagttgccctgtgactgtaaccaccaaattgtccaaacacccgctgcagttagcaagaagggtaggcttcaccctcctttactgaggagaatgatgcggaggagtttcctctccagggctaggcaaggcaggcgagcagccagaagccgggtgcccacagggcagggacaggaaggctgtgctgctactggctgctcacttctccatcaacctcaccctctgcaccactaaccaagaccttgtcctcttgcctgtctcgctgctttcacagctgcaacgattgtgtctgcctcatggggttttcctccagagcctttattctgtagccagacgacacgaggagtctgtgtcactgagccagtgcttctagatgctaccctgtgtgggcggcacctcagggacagtaaatcagaaatgctggtcttgaaaccttgaaaagatcaagctgaatgttccttttcatctgtcgctgttgatcttcatctatttaaataggtattctaacgtttcctctctgtatttcatgaagctgatttcctctctctttccttttcagcaatactggagtaaccgcttcctaaaccattttgcagaaatgtaagggtgttcggttgcgtgcatgtgcgtttttagcaacacatctaccaaccctgtgcatgactgatgttggggaaaaagaaaagtaaaaaacttcccaactcactttgtgttatgtggaggaaatgtgtattaccaatggggttgttagcttttaaatcaaaatactgattacagatgtacaatttagcttaatcagaaagcctctccagagaagtttggtttctttgctgcaagaggaatgaggctctgtaaccttatctaagaacttggaagccgtcagccaagtcgccacatttctctgcaaaatgtcatagcttatataaatgtacagtattcaattgtaatgcatgccttcggttgtaagtagccagaatccctcttcagtgacatgggaacatgctaccttttaattgggccc

SEQ ID NO: 20865 - DNA, 911 bp, Homo Sapiens
gcacgagggcaaggcaagtagcggcggcgcttcaagatgcgctgcctgaccacgcctatgctgctgcgggccctggcccaggctgcacgtgcaggacctcctggtggccggagcctccacagcagtgcagtggcagccacctacagtgagtacctgggtggcctctagcctcaggtgttcctgactggtcctgctggagtaggggaagagacctgagttccagtcctggctttgtcaggggcgttcttctctgagcctgtttccacttttaaaatgattatggtgatggagactgactctgattcacaggggcagggtccatcattgccgagagtatgtgaacatgcaggatcccgagatggacatgaagtcagtgactgaccgggcagcccgcaccctgctgtggactgagctcttccgaggcctgggcatgaccctgagctacctgttccgggaaccggccaccatcaactacccgttcgagaagggcccgctgagccctcgcttccgtggggagcatgcgctgcgccggtacccatccggggaggagcgttgcattgcctgcaagctctgcgaggccatctgccccgcccaggccatcaccatcgaggctgagccaagagctgatggcagccgccggaccacccgctatgacatcgacatgaccaagtgcatctactgcggcttctgccaggaggcctgtcccgtggatgccatcgtcgagggccccaactttgagttctccacggagacccatgaggagctgctgtacaacaaggagaagttgctcaacaacggggacaagtgggaggccgagatcgccgccaacatccaggctgactacttgtatcggtgacgccccaccggcccgcagcccctgctgcccaataaaaccactccgaccccacggc

SEQ ID NO: 20866 - DNA, 975 bp, Homo Sapiens
gcacgaggcaacaagcttccaagatgccgcccaaaggaaaaagtggttctggaaaagcggggaaagggggagcagcctctgggagtgacagtgctgacaagaaggctcaaggtcccaaaggtggtggcaatgcagtaaaggtcagacacattctatgtgaaaaacatggcaaaatcatggaagccatggaaaagttaaagtctgggatgagattcaatgaagtggccgcacagtatagtgaagataaagccaggcaagggggtgacttgggttggatgaccagagggtccatggtgggaccatttcaagaagcagcatttgccttgcctgtaagtgggatggataagcctgtgtttacagacccaccggttaagacaaaatttggatatcatattattatggtcgaaggaagaaaataaaatcatatgaaagactgaataagttttatacattttgtttctttaaaaggtattacatattcttttgagctggagctgcaaggaaatacaaaaatttttaaaaagaaaagatattggatgctccttgtattctgtgaaagctctaagtatgggtttgtaggtgtaagagagggtggggctaagtgaatgtcaactgtagtaggtattcagtcagtctttctcaaagagaagtcaagcagactccctttaacctgtattctctttcctcccagaactatatctgactctcagtctgtcccataaattaattcagaaaccatcttcaggggaagcagatatcaactcacactattcacacaactgaaaatattgggcatcaaatagattagtgtgtgagaatcataaaataagttcctagacacatttgtttacatgttagtcactctgatcttccaggacaggtggtattagctccactgtcttaccatagtacgtggcacgttatgcctttcagtgttactcctttcttttaataatgttattggagggaaaagcc

SEQ ID NO: 20867 - DNA, 1952 bp, Homo Sapiens
  misc_feature (1617)..(1629): n is a, c, g, or t
gcacgaggcttttacctcctctcttttttaaacacctgtttatcccaacctttttgagctcaagctgtgataaagaagggcccatcctatttcccctcatctagtccatttacgattctcactgactccccgtcttcctggcagacacaaataaacccagtgtcaggtctaggaaattaatggctattcttccccagatacattctggcttatttgagatacatgattctcttagaatcctgtcccttggttcaggaaagtagcttggaaaaggagtaggggtatagcttgggtcccttttcctgcaaggccccatggggcagaatataataaatattctgagtgaggagtgtggtctttttctgatcttcctcagcttccgtaagttgcagagtgaggtatattaggagactagttctacacaatattgtaatgctgggttccatcaacacccaccttccacaactcagtctgcacctcagttggcaaaggagactggatggccatctttcctcatgttcccttgagtatttcaatgtagaaagcccttcaagtggtattatattttaaccttttacattattgttattaatgttagtaatatattgttatgttttctaaattatttttctttaagctgacgtggctttttttctgtggctcccagtgggtctacggaccttggctgacatatgttggtaggtactctggtcagctcagctggctgtcctggttcactcagaagataagtctctccaaagcaaattcacatgcattatgagtcgctttgagcttctgacatgtcacttgccccgaggttaaaacttttcaccccttgaagaccttacatgttttatggtattggtgaggaaggaaatgttctcaaggtctcaggctatttgggaaattccaactcctataccttaccagagcatggaagagcccagatctgaatgtaaaacgtctctgttctgccagagatggaaaaaatacaggtatacttgtgatatagtcatggggcttcagtgtcactattttctccttaaagctccagccaaaaactggacaaggatagagaggaggagggaagaacaaaagagcccttctctatgaaccttgtgccttctgtcctaccagttttcttttacagattctcacttctgctagcctagccagggcttactccaggaatctaaatagatgccctagtccactttatctttgttcccaaggcactcatttttattttgattttgattgaatgtgagcaggttgacctcaggtcacactttgttccaaaaacttttggaattattccaggacttgtggtggagttatggtactctagggcagtctttctcaaactatgtatggtaaaggaccaggttttttgttttccagtccttcacttatcaatatgcattcctattgccgatgacaggtatggagttcacactgtgtgctgccgacccggcaagtttgacagcacccaaactggccagactgttctgtaggttaagtccattgatcatgtacttggatatcacagcaacattgaaatgctaaaaagtttttaaacactctcaatttctaattcaccatgtcacagactggtgnnnnnnnnnnnnnggtgttcactgaccagcacaagtctgcagatcatctttgagtagcactgttttggggccctcggtctctctgaagaccctagcagaactgatacctacctgtatctcttgttctctcctatttgagtttcacttccagagaacttgttcttcagcaagaatgtgtcactagtaaggacatctctagcatttctctagccttccttttctgctgctcaaaaataatcgttacaaagcttaggtttaagctgtatatgaaatatttatgcgactctcaaactttaaaggagttgctcctttgttccaaaattaaatgtgttagat

SEQ ID NO: 20868 - DNA, 493 bp, Homo Sapiens
gtataaaacattcaatttattggtctttgtggagaattagatgcatcaccagtatattacaacagagccattaatcttgtagcttcatcaacattaactggtttgctttcatgacgctgctgaggaatcagttctttctgcagaggttcaagtgaaatgctttttgcgaaatgtgcaagttccttttgtacatttacaaaagctttatttactctgttaactttttcctcattcataatgtttatcttcttaagattagtggtaactggttttgctttgtttttagccttaaagtttttttggctggctatgtgaaatacattcctggacttcggccctcttaatttgttcttggccattgtcagaagtttaacacttgcgtgcagctttttaagctccaggtaacaccatctggcacgtacggcgtctaggaagttccggggaggatgaaccagtcaggattccgctcacgagccgtagctccgcctcgtgc

SEQ ID NO: 20869 - DNA, 849 bp, Homo Sapiens
gcacgaggggcggtcggagatccgagagctctgcttctctgaaaagcgtgtggctttctggacttgtttcaggccacccacgagccagcgggaaaggattgccagccagagaaagacgaactccgaagtcccaatgcacagatcagcccccagtcaaaccaccaagaggagccgatcgccattttccactactcgtcgtagttgggacgacagcgagagttcgggaaccaacctgaatattgataatgaggactattccaggtatccgccaagagagtacagagcttcgggtagcagaagaggaatggcctatggacatattgactcttatggggcagatgatagtgaggaggagggggctgggcctgttgagcgaccgccagtgagagggaaaactggcaagtttaaagatgataagctgtatgacccagagaaaggggcaaggtctttggctgggccacctccacatttctctagttttagccgtgatgtgagagaggagcgagacaagttagacccagtccctgcagcaagatgctcagctagcagagctgacttcctgccacaaagtagtgtggcctcacagtcgtcttctgaaggcaagctggctacaaaaggtgacagctcggagagggagagaagggagcaaaatttacctgcacgtcccagcagggctcctgtgagtatttgtggtggtggggaaaacacctcaaagagtgcagaggaacctgtggtcaggcccaaaatcagaaacctggcaagtccaaactgcgtgaaaccaaaaattttttttgatactgatgatgatgacgatatgccacacagtacttccaggtggagggataccgc

SEQ ID NO: 20870 - DNA, 1190 bp, Homo Sapiens
cccccgggctgcaggaattcggcacgagggctcccctctgttgagctccagggcgcagtggagggagggagtgaaggagctctctgtacccaaggaaagtgcagctgagactcacacaagattacaatgaaccaactcagcttcctgctgtttctcatagcgaccaccagaggatggagtacagatgaggctaatacttacttcaaggaatggacctgttcttcgtctccatctctgcccagaagctgcaaggaaatcaaagacgaatgtcctagtgcatttgatggcctgtattttctccgcactgagaatggtgttatctaccagaccttctgtgacatgacctctgggggtggcggctggaccctggtggccagcgtgcacgagaatgacatgcgtgggaagtgcacggtgggcgatcgctggtccagtcagcagggcagcaaagcagtctacccagagggggacggcaactgggccaactacaacacctttggatctgcagaggcggccacgagcgatgactacaagaaccctggctactacgacatccaggccaaggacctgggcatctggcacgtgcccaataagtcccccatgcagcactggagaaacagctccctgctgaggtaccgcacggacactggcttcctccagacactgggacataatctgtttggcatctaccagaaatatccagtgaaatatggagaaggaaagtgttggactgacaacggcccggtgatccctgtggtctatgattttggcgacgcccagaaaacagcatcttattactcaccctatggccagcgggaattcactgcgggatttgttcagttcagggtatttaataacgagagagcagccaacgccttgtgtgctggaatgagggtcaccggatgtaacactgagcaccactgcattggtggaggaggatactttccagaggccagtccccagcagtgtggagatttttctggttttgattggagtggatatggaactcatgttggttacagcagcagccgtgagataactgaggcagctgtgcttctattctatcgttgagagttttgtgggagggaacccagacctctcctcccaaccatgagatcccaaggatggagaacaacttacccagtagctagaatgttaatggcagaagagaaaacaataaatcatattgactc

SEQ ID NO: 20871 - DNA, 3053 bp, Homo Sapiens
  misc_feature (863)..(908): n is a, c, g, or t
acaacattgtgaaatgtcagaagcttacagaggaccatgttcagttccttattaccaaattctccgaggtctaaagtatatacattcagctgacataattcacagggacctaaaacctagtaatctagctgtgaatgaagactgtgagctgaagattctggattttggactggctcggcacacagatgatgaaatgacaggctacgtggccactaggtggtacagggctcctgagatcatgctgaactggatgcattacaaccagacagttgatatttggtcagtgggatgcataatggccgagctgttgactggaagaacattgtttcctggtacagaccatattgatcagttgaagctcattttaagactcgttggaaccccaggggctgagcttttgaagaaaatctcctcagagtctgcaagaaactatattcagtctttgactcagatgccgaagatgaactttgcgaatgtatttattggtgccaatcccctggctgtcgacttgctggagaagatgcttgtattggactcagataagagaattacagcggcccaagcccttgcacatgcctactttgctcagtaccacgatcctgatgatgaaccagtggccgatccttatgatcagtcctttgaaagcagggacctccttatagatgagtggaaaagcctgacctatgatgaagtcatcagctttgtgccaccaccccttgaccaagaagagatggagtcctgagcacctggtttctgttctgttgatcccacttcactgtgaggggaaggccttttcacgggaactctccaaatattattcaagtgcctcttgttgcagagatttcctccatggtggaaggggnnnnnnnnnnnnnnnnnnnnnnnnnnnnnnnnnnnnnnnnnnnnnnctgtctttgtgggagggtaagacaatatgaacaaactatgatcacagtgactttacaggaggttgtggatgctccagggcagcctccaccttgctcttctttctgagagttggctcaggcagacaagagctgctgtccttttaggaatatgttcaatgcaaagtaaaaaaatatgaattgtccccaatcccggtcatgcttttgccactttggcttctcctgtgaccccaccttgacggtggggcgtagacttgacaacatcccacagtggcacggagagaaggcccataccttctggttgcttcagacctgacaccgtccctcagtgatacgtacagccaaaaaggaccaactggcttctgtgcactagcctgtgattaacttgcttagtatggttctcagatcttgacagtatatttgaaactgtaaatatgtttgtgccttaaaaggagagaagaaagtgtagatagttaaaagactgcagctgctgaagttctgagccgggcaagtcgagagggctgttggacagctgcttgtgggcccggagtaatcaggcagccttcataggcggtcatgtgtgcatgtgagcacatgcgtatatgtgcgtctctctttctccctcacccccaggtgttgccatttctctgcttacccttcacctttggtgcagaggtttcttgaatatctgccccagtagtcagaagcaggttcttgatgtcatgtacttcctgtgtactctttatttctagcagagtgaggatgtgttttgcacgtcttgctatttgagcatgcacagctgcttgtcctgctctcttcaggaggccctggtgtcaggcaggtttgccagtgaagacttcttgggtagtttagatcccatgtcacctcagctgatattatggcaagtgatatcacctctcttcagcccctagtgctattctgtgttgaacacaattgatacttcaggtgcttttgatgtgaaaatcatgaaaagaggaacaggtggatgtatagcatttttattcatgccatctgttttcaaccaactatttttgaggaattatcatgggaaaagaccagggcttttcccaggaatatcccaaacttcggaaacaagttattctcttcactcccaataactaatgctaagaaatgctgaaaatcaaagtaaaaaattaaagcccataaggccagaaactccttttgctgtctttctctaaatatgattactttaaaataaaaaagtaacaaggtgtcttttccactcctatggaaaagggtcttcttggcagcttaacattgacttcttggtttggggagaaataaattttgtttcagaattttgtatattgtaggaatcctttgagaatgtgattccttttgatggggagaaagggcaaattattttaatattttgtattttcaactttataaagataaaatatcctcaggggtggagaagtgtcgttttcataacttgctgaatttcaggcattttgttctacatgaggactcatatatttaagccttttgtgtaataagaaagtataaagtcacttccagtgttggctgtgtgacagaatcttgtatttgggccaaggtgtttccatttctcaatcagtgcagtgatacatgtactccagagggacagggtggaccccctgagtcaactggagcaagaaggaaggaggcagactgatggcgattccctctcacccgggactctccccctttcaaggaaagtgaacctttaaagtaaaggcctcatctcctttattgcagttcaaatcctcaccatccacagcaagatgaattttatcagccatgtttggttgtaaatgctcgtgtgatttcctacagaaatactgctctgaatattttgtaataaaggtctttgcacatgtgaccacatacgtgttaggaggctgcatgctctggaagcctggactctaagctggagctcttggaagagctcttcggtttctgagcataatgctcccatctcctgatttctctgaacagaaaacaaaagagagaatgaggggaaattgctattttatttgtattcatgaacttggctgtaatcagttatgccgtataggatgtcagacaataccactggttaaattaaagcctattttccaattt

SEQ ID NO: 20872 - DNA, 921 bp, Homo Sapiens
gcacgaggccgtgacccgtgtattattgtccgagtggccggaacgggagccaacatggcagcggggttcgggcgatgctgcagggtcctgagaagtatttctcgttttcattggagatcacagcatacaaaagccaatcgacaacgtgaaccaggattaggatttagttttgagttcaccgaacagcagaaagaatttcaagctactgctcgtaaatttgccagagaggaaatcatcccagtggctgcagaatatgataaaactggtgaatatccagtccccctaattagaagagcctgggaacttggtttaatgaacacacacattccagagaactgtggaggtcttggacttggaacttttgatgcttgtttaattagtgaagaattggcttatggatgtacaggggttcagactgctattgaaggaaattctttggggcaaatgcctattattattgctggaaatgatcaacaaaagaagaagtatttggggagaatgactgaggagccattgatgtgtgcttattgtgtaacagaacctggagcaggctctgatgtagctggtataaagaccaaagcagaaaagaaaggagatgagtatattattaatggtcagaagatgtggataaccaacggaggaaaagctaattggtattttttattggcacgttctgatccagatcctaaagctcctgctaataaagcctttactggattcattgtggaagcagataccccaggaattcagattgggagaaaggaattaaacatgggccagcgatgttcagatactagaggaattgtctttcgaagatgtgaaagtgcctaagaaaatgttttaattggtgacggagctggtttcaagttgcaatgggagcttttgataaaaccagacctgtagtagctgctggtgctgttg

SEQ ID NO: 20873 - DNA, 1320 bp, Homo Sapiens
gcacgagggtgtttcaaaagcagaaaaacgaactggaagaaatgccatgaacatgcaagaaacatatactgcttacctcattgaaacaaggtcagttgaacataccgatggtcagagtgtcctaacagactcactatggcggcgatatagtgaatttgagttgttgagaagctaccttttagtttactatccacatattgttgtgccacctctgccagaaaaacgggcagaatttgtttggcataaactctctgctgacaacatggatccagattttgtggagaggcgacggattggtttagaaaactttctcttgaggattgcttcacatcccatcctttgtagagacaaaatcttctatctgtttttaacacaggaaggtaactggaaggagactgtgaatgaaactgggtttcagctgaaggcagactccaggttaaaagcgcttaatgcaacattcagagtgaaaaacccagacaagagatttactgaccttaagcactatagtgatgaactgcagtctgtcatctcacatcttcttcgagtcagagctagagtagcagatcgactctatggtgtatataaagtacatgggaattatggtcgagttttcagtgaatggagtgccatagaaaaagaaatgggtgatggactgcagagtgctggtcatcatatggatgtgtatgcatcttctattgatgatattttggaagatgaagaacattatgcagatcagttaaaagagtatcttttttatgcagaagcattgcgggctgtgtgcaggaaacatgaacttatgcagtatgacttggagatggctgctcaggacttagcatccaagaagcagcagtgtgaggaactggtaactgggactgtgagaacattctctttgaagggaatgactaccaagctctttggtcaagaaactccagagcagagagaagccagaataaaggtgctagaagaacaaataaatgaaggagaacaacagctaaagtctaaaaatctggaaggcagagaatttgtgaaaaacgcatgggctgatattgaacgcttcaaagaacaaaagaaccgagacttaaggaggccctcataagctatgcagtcatgcagatcagtatgtgcaaaagggaattcaagtttggaccaaatgctaaaggaatgctttagcaagatgtaatcctgtgaatgaatttctcctcaatcaaagtgccccaaaacagaagcacaagtaaataaaaagaaatttaagtcactacctagtatacataaaacatatacaataagttaaataaattcagctttctttaacttaaattg

SEQ ID NO: 20874 - DNA, 1284 bp, Homo Sapiens
gcacgaggacctgactctctgaggctcattttgcagttgttgaaattgtccccgcagttttcaatcatgtctgaaccaatcagagtccttgtgactggagcagctggtcaaattgcatattcactgctgtacagtattggaaatggatctgtctttggtaaagatcagcctataattcttgtgctgttggatatcacccccatgatgggtgtcctggacggtgtcctaatggaactgcaagactgtgcccttcccctcctgaaagatgtcatcgcaacagataaagaagacgttgccttcaaagacctggatgtggccattcttgtgggctccatgccaagaagggaaggcatggagagaaaagatttactgaaagcaaatgtgaaaatcttcaaatcccagggtgcagccttagataaatacgccaagaagtcagttaaggttattgttgtgggtaatccagccaataccaactgcctgactgcttccaagtcagctccatccatccccaaggagaacttcagttgcttgactcgtttggatcacaaccgagctaaagctcaaattgctcttaaacttggtgtgactgctaatgatgtaaagaatgtcattatctggggaaaccattcctcgactcagtatccagatgtcaaccatgccaaggtgaaattgcaaggaaaggaagttggtgtttatgaagctctgaaagatgacagctggctcaagggagaatttgtcacgactgtgcagcagcgtggcgctgctgtcatcaaggctcgaaaactatccagtgccatgtctgctgcaaaagccatctgtgaccacgtcagggacatctggtttggaaccccagagggagagtttgtgtccatgggtgttatctctgatggcaactcctatggtgttcctgatgatctgctctactcattccctgttgtaatcaagaataagacctggaagtttgttgaaggtctccctattaatgatttctcacgtgagaagatggatcttactgcaaaggaactgacagaagaaaaagaaagtgcttttgaatttctttcctctgcctgactagacaatgatgttactaaatgcttcaaagctgaagaatctaaatgtcgtctttgactcaagtaccaaataataataatgctatacttaaattacttgtgaaaaacaacacattttaaagattacgtgcttcttggtacaggtttgtgaatgacagtttatcgtcatgctgttagtgtgcattgtaaataaatatatattcaaacctcgtgc

SEQ ID NO: 20875 - DNA, 449 bp, Homo Sapiens
cccgggctgcaggaattcggcacgagggttcttaaggacacatgacattagtccaatctttcaaaatcttgtcttagggcttgtgaggaatcagaactaacccaggactcagtcctgcttcttttgcctcgagtgattttcctctgtttttcactaaataagcaaatgaaaactctctccattaccttctgctttctctttgtccacttacgcagtaggtgactggcatgtgccacagagcaggccctgcctcactgtctgctggtcagttctgggttcacttaatggctttgtgaatgtaaataaggggcaggtcttggccctagaggattgagatgtttttctaaatcttagaactatttttggataaattatatattttccttcctagtagaagtgttactgcctgtaactagctcaaaataccaatgcagtttctgcattctggg

SEQ ID NO: 20876 - DNA, 946 bp, Homo Sapiens
gcacgagggcttcttctcctgaaggggctgcaagaggggaaggcttagccatgtcgtccttgatcagaagggtgatcagcaccgcgaaagccccaggggccattggaccctacagtcaagctgtattagtcgacaggaccatttacatttcaggacagataggcatggacccttcaagtggacagcttgtgtcaggaggggtagcagaagaagctaaacaagctcttaaaaacatgggtgaaattctgaaagctgcaggctgtgacttcactaacgtggtgaaaacaactgttcttctggctgacataaatgacttcaatactgtcaatgaaatctacaaacagtatttcaagagtaattttcctgctagagctgcttaccaagttgctgctttacccaaaggcagccgaattgaaattgaagcagtagctatccaaggaccactgacaacggcatcactataagtgggcccagtgctgtgtagtctggaattgttaacattttaatttttacaattgatgtaacatcttaattaaccttttaattttcacaattgatgacagggtgagtttgatgaaaatatctgaagctattatggaaataccatgtaatagggagagttgaacatgaatattagagaaggaatccagttactttttttaaattacacctgtgtgcacctgtattactgaatataggaaagagatacccattacatagttactcagtaaacaaaaagagaaataccaggtaggaaagaagagttactattcctgagaaataatcaagaacatatttaatttaaactaatgatgtgaactatttagttttgatgtccgttatgtgattctgcttttacttgagtaaaataaagtgtttaatttgagatcaagagaagatagtggaacaaaatgttatatagataatattttctaatggaaataaa

SEQ ID NO: 20877 - DNA, 893 bp, Homo Sapiens
gcacgaggctgacttacacaagagcctagaacagaaagaaagtaaaatccagcagctagcagaaactataaagaaacttgaaaaggagttcaagcagtttgcacagttgtttggcaaaaatggaagcttcctcccaaacatccaggtttttgccagtcacattgacaagtcagcttggctagaagctcaagtgcatcaattattacaaatggttaaccagcaacaaaataaatttgacctgagacctttgatggaagcagttgatacagtgaaacagaaaattaccctgctagaaaacaatgatcaaagattagccgttttagaagaggaaactaacaaacatgatacccacattaatattcataaagcacagctgagtaaaaatgaagagcgatttaaactgctggagggtacttgctataatggaaagctcatttggaaggtgacagattacaagatgaagaagagagaggcggtggatgggcacacagtgtccatcttcagccagtccttctacaccagccgctgtggctaccggctctgtgctagagcatacctgaatggggatgggtcagggagggggtcacacctgtccctatactttgtggtcatgcgaggagagtttgactcactgttgcagtggccattcaggcagagggtgaccctgatgcttctggaccagagtggcaaaaagaacattatggagaccttcaacctgaccccaatagcagcagctttaaaagacctgatggggagatgaacattgcatctggctgtccccgctttgtggctcattctgttttggagaatgcaagaacgcctacataaagatgacactctgttcttgaagtggccgtggacttaactgacctggaggatctctagtcactgtt

SEQ ID NO: 20878 - DNA, 897 bp, Homo Sapiens
gcacgaggggatgtgggttttctactttttcattctcatgacaagttgtacaattgtgtttatctcgccattaatagtgagggaaatattctctctcgtgctaaggagacaggctcacatattgagggagtgaccggtgcccgcgagacagaaagaacaatgtcagccacatcaggaccgctggggcttcgagtctgccctaatttgggtttgtctaggagctccagcctgatcttggattgtcaggcgtctctcaacactgccagccacctgagatgctgaccagcagtgaaggctgcactagttttctacactacaggaattactgttgatgatttttgctgttgtttcatgaatgtgccgagtgacttctgactctgccagcatctttgacctctgactctgcccgcgtctttgtttggcctattgaggtttagcgttttaaccttaactgttgttttggacttgaactttctctagccttgaaaatggagtgaacaggaggcaaagccacgcgtggtttgtgttggtggtatgttccacaaatggaagagatcattgcattttgctttggtaatgagtttacagagagtgggtcatctatgaagcatcaaatcctgatcaaatgctcaagctggaccgagctgcaagcctgccttggacaaagaatccctctgttcactgtggtgggaaagatcacactacatgcctgttgattggctcagtcactctgtgtctgatctaaacgtcattcagccctaaagcatgaattgcttcaaattattgtcaacttgttctcttccattttcattcaaattaactttgactcctggaagtattgagtcttcctttcaaggaccataaggtacatcagttatcttgaacattctgacgtgt

SEQ ID NO: 20879 - DNA, 895 bp, Homo Sapiens
gcacgagggacggcgctcggcgaactgtgtggaccgtctgctgggactccggccctgcgtccgctcagccccgtggccccgcgcacctactgccatggagacgcggcctcgtctcggggccacctgtttgctgggcttcagtttcctgctcctcgtcatctcttctgatggacataatgggcttggaaagggttttggagatcatattcattggaggacactggaagatgggaagaaagaagcagctgccagtggactgcccctgatggtgattattcataaatcctggtgtggagcttgcaaagctctaaagcccaaatttgcagaatctacggaaatttcagaactctcccataattttgttatggtaaatcttgaggatgaagaggaacccaaagatgaagatttcagccctgacgggggttatattccacgaatcctttttctggatcccagtggcaaggtgcatcctgaaatcatcaatgagaatggaaaccccagctacaagtatttttatgtcagtgccgagcaagttgttcaggggatgaaggaagctcaggaaaggctgacgggtgatgccttcagaaagaaacatcttgaagatgaattgtaacatgaatgtgccccttctttcatcagagttagtgttctggaaggaaagcagcagggaagggaatattgaggaatcatctagaacaattaagccgaccaggaaacctcattcctactacactggaaggagcgctctcactgtggaagagttctgctaacagaagctggtctgcatgtttgtggatccagcggagagtggcagactttcttctccttttcctctcacctaaatgtcaacttgtcattgaatgtaaagaatgaaatcttctgacacaaaaacttg

SEQ ID NO: 20880 - DNA, 1153 bp, Homo Sapiens
gcacgagggtggcctgcagcacacccgaaagatgctgcatgttggtgacccaagtgtgaaaaagacagccatctcgctgctgaggaatctgtcccggaatctttctctgcagaatgaaattgccaaagaaactctccctgatttggtttccatcattcctgacacagtcccgagtactgaccttctcattgaaactacagcctctgcctgttacacattgaacaacataatccaaaacagttaccagaatgcacgcgaccttctaaacaccgggggcatccagaaaattatggccattagtgcaggcgatgcctatgcctccaacaaagcaagtaaagctgcttccgtccttctgtattctctgtgggcacacacggaactgcatcatgcctacaagaaggctcagtttaagaagacagattttgtcaacagccggactgccaaagcctaccactcccttaaagactgaggaaaatgacaaagtattctcggctgcaaaaatccccaaaggaaaacaacctatttttctactacccagcccaagaaacctcaaaagcatgccttgtttctatccttctctatttccgtggtcccctgaatccagaaaacaaatagaacataattttatgagtcttccagaagacctttgcaagtttgccaccagtagataccggccacaggctcgacaaatagtggtctttgttattagggcttatggtagatggcttcctggaatcaaaatgtgaattcatgtggaagggacattaatccaataaataaggaaagaagctgttgcattactgggattttaaaagtttgatttacatttatattccttttctggttcccatgttttgtcactcatgtgcacattgcttcgccattgggcctccagtgtattgttctgcagtgttgaaacagaatggaaatgacaagaaatatctgcagttatccaggagaaagtataatggcaaaattattggtttctttctttactttgtgcttgtttttatccccttgggttgtttttctctgatttttaaataaacttaagaaatttagattacagagtatgcatgactgtaagaaaaagaaattgagaggaagtgatcatagcaaattaaagaagtcttttcctcccagaacttaaagt

SEQ ID NO: 20881 - DNA, 784 bp, Homo Sapiens
ccccaaaacgtccgccggtgcggaggtcagggacaagatggtgccaccggtgcaggtctctccgctcatcaagctcggccgctactccgccctgttcctcggtgtggcctacggagccacgcgctacaattacctaaaacctcgggcagaagaggagaggaggatagcagcagaagagaagaagaagcaggatgaactgaaacggattgccagagaattggcagaagatgacagcatattaaagtgagtgaccctgcgacccactctttggaccagcagcggatgaataaagcttcctgtgttgtgtgaaaaaaaaggtcaaataacagattttgattgtctaagtcacaataaaccctaaaatttttcaccgcttattctttttgtctttttaacaaacatattatccgaattttttttctgcaagccactgatagggggctgctaactaccttaactgacctttttacaaagtttgatcccccaccatcctcaactaaatcattgaatacttcaatcaggatattatctgctttactttacaaataaaaccaaatcttttgtctaccggatgaaacccatcttaaaggaaagaaaaggaattggtgtgaacaaagaagttacacaagggaaatgaagtgaattactatctgtgtccatcaggaagtttgtcctgttaaccggatggttactgcactaccagggttactggtttattttccagggagctgataaagcaggagaactgttgctgcatgttttctatttggactccgtcacaata

SEQ ID NO: 20882 - DNA, 890 bp, Homo Sapiens
gcacgaggtatggctgttactgtactgtactctctgactccttacctaacaatgaatttgttacataatcttctacatgtatgatttgtgccactgatcttaaacctatgattcagtaacttcttaccatataaaaacgataattgctttatttggaaaagaatttaggaatactaaggacaattatttttatagacaaagtaaaaagacagatatttaagaggcataaccaaaaaagcaaaacttgtaaacagagtaaaaatctttaatatttctaaagacatactgtttatctgcttcatatgctttttttaatttcactattccatttctaaattaaagttatgctaaattgagtaagctgtttatcacttaacagctcattttgtctttttcaatatacaaattttaaaaatactacaatatttaactaaggcccaaccgatttccataatgtagcagttaccgtgttcacctcacactaaggcctagagtttgctctgatatgcatttggatgattaatgttatgctgttctttcatgtgaatgtcaagacatggagggtgtttgtaattttatggtaaaattaatccttcttacacataatggtgtcttaaaattgacaaaaaatgagcacttacaattgtatgtctcctcaaatgaaaattctttatctgaaattttaaaagacattgattccgcatgtaaggatttttcatctgaagtacaataatgcacaatcagtgttgctcaaactgctttatacttataaacagccatcttaaataagcaacgtattgtgagtactgatatgtatataataaaaattatcaaaggaaattacctgccagtcatttggtaaatgctgtctactcctgaaagccttcctt

SEQ ID NO: 20883 - DNA, 938 bp, Homo Sapiens
gcacgagggcgtcctggtggacacggggcgccccattcccggcacatccacaaggtacgagcagccgaaatgtgacaacacggccagggcccacccagccaaagcccgggacctgtacaagggccgccagctacaaggttgtccgggtgccaaaaagcatgagtttctgaccagcgttctggacgcgctgtccacggacatggtccacgccgcctccgacccctcctcctcgtcaggcaggctctcagaacccgaccccagccataccctagaggagcgggtggtgcactggtacttcaaactactggataaaaactccagtggagacatcggcaaaaaggaaatcaaacccttcaagaggttccttcgcaaaaaatcaaagcccaaaaaatgtgtgaagaagtttgttgaatactgtgacgtgaataatgacaaatccatctccgtacaagaactgatgggctgcctgggcgtggcgaaagaggacggcaaagcggacaccaagaaacgccacacccccagaggtcatgctgaaagtacgtctaatagacaggatgcaatggtggtgtcctccagacccaaagccacaacccatcgcaagtcaagaacactttccagaagataaacatgagtgggttcatgtctctctccttcaaagccaggacaaaatccccacttctttgctgccgcgagtcaatttgtgatttattttgtctgcacctgtttgatgccaggtcgacatttcctaaggcaagcccctgtatttgttgtggatttaagtggaggcggccagcacacaccttggatgtaatttaaaaccatttcctgaggaaagatgtgtgatatgctttcctttgtttagcaaatgtttatggttttactttaaatctcaccgcaaatcacttacacttgaaaacagggctggtctgaaagtaatt

SEQ ID NO: 20884 - DNA, 1410 bp, Homo Sapiens
  misc_feature (1291)..(1301): n is a, c, g, or t
cccgggctgcaggaattcggcacgaggggctccctttgtagatatcattttccttaatggtgggaagccagccaacttcttggatcttggaggtggtgtaaaggaagctcaagtatatcaagcattcaaattgctcacagctgatcctaaggttgaagccatccttgtcaatatatttggtggtatcgtcaactgtgccatcattgccaatgggatcaccaaagcctgccgggagctagaactcaaggtgcccctggtggtccggcttgaaggaaccaacgtccaagaggcccagaagatactcaacaacagcggactccccattacttcatcttttgacctggaggatgcagccaagaagggtggccagtgtggccaagaagtgatgtctttgtcctgatccaatggagaaagaaagccatttttccataaaaagggatggttcatcattgtgaaagaaatggttatctcattggggaagaaaaggggagggggaaggcaagaatcactgaaaaatcttaaatctgtgttttctggaataagatatctagacagcctaaatctgattttagtttttataaaaataatgtcttgtgttctcatacttttctgtcactgtaagcctgcccagtaggcagtgttttgcagactttggggagtggtctatgtggccaaatattgtgtgtatagacagaatttgaaatcaagtcctgcttcatttacaagaattttggtgggcatctaatcctacataatgaaaaagaaaaacagaccatttaaaaactcagacaagattatatttaatatattaattactaaaaaggcacaagattacactgaacatattagctactaaaaaggcactgctaagacattcaagcaaatagctattacacactactgcagattttacaggtttctaattctaacatatgtttgaaaaatccgtgagtattccaaaatatatttaataatggaatatctgcattaatataccatccatgtgtttttaccatttgccttaatattgaatatactgtttacctcacactaaaaagaaaaccagaagccttatttgtgattttgggagtggaagcttccatttttgtgtcaaaaatgaatcctgattcttatggaaatctctgttattaagatatttcaagatgagacaacactgaagatcaaattgtgtttagtatcactatcttctctcctcgtttctctcttactcctcatcctcccagaatctaccagtttatggtagaaagatgggaaccttatttgaatgtgnnnnnnnnnnnccatgatgtccaattttgttgtgggaaaggatttggataaaatttttgtttaaattttggtagatttttatctatacaaatttaaataaaattatgttttgtaagctgt

SEQ ID NO: 20885 - DNA, 1480 bp, Homo Sapiens
  misc_feature (1154)..(1205): n is a, c, g, or t
gcacgaggtatagcgttgctacctctcttcctacatacgatgaagctgagaaggctaaagctgctgcaatggcagctgcagcagcagaaacatctcaaagaattcaggaggaagagtgtccaccaagagatgacttcagtgatgcagaccagctcagagtggggaatgatggcattttcatgctggcatttttcatggcatttattttcaactggcttggattttgtttatccttctgtatcaccaataccatagctggaaggtatggtgctatctgcggatttggcctttccttgatcaaatggatccttattgtcaggttttctgattattttactggatatttcaatggacagtattggctttggtggatatttcttgtacttggcctgctccttttcttcagaggatttgttaattatctaaaagtcagaaacatgtctgaaagtatggcagctgctcatagaacaaggtatttcttcttattgtagagactgcatcaacccgacattcctttcttataccaatgtgaaatttccagatcatctgtaaacctacaactttaatagaagactactaataacagaagacaaattagtgaagaaaagacagagtttcgaaattgaatggcagggtggtttttgcttacaagccatttctgttcattctttaagtatctatatttcatttgttttgcacatatgcatatgtgcccatttaagatatttgcatatacttgatagaaaccataaagttgtagcagttaagtccagtcacatttggttaatcagtgtttgatataattgaaagagttgagtggataaacagtcttccagcttgtaaatgccattgacttctgacctgacatttagtataataaaaatgaaattcttaaccatgtcaaatgatttagtttctggctcttagactcatctggcagttctacacatgaaacatcttttgttatataaggtgtattgaaacctgcagtgctgattattagaaaggatttgtcagatttttgaacatgatatttacattattatttaggaaaactcttcctgtaaataaccatgcataacttactttctgcaatgttttcttagaaattgtgtccagatagctttcactaattttaaattaagtgaactaannnnnnnnnnnnnnnnnnnnnnnnnnnnnnnnnnnnnnnnnnnnnnnnnnnnttagaaacgtgagtgttaaagatagaatttgttttaggacaaattttaagaaaatgtgggaataccaaatgtcctttataagaaaaataaattttgttttaagggacatactagttttagggattttcagatgggaaagctgcatttttaggattgcccatcttaagagatcttgcaggaagagattgtattagatattatatttatttcatttaagataatttcaaagttaattttctaataggatattctcatttgtgttggtctttaaaagg

SEQ ID NO: 20886 - DNA, 887 bp, Homo Sapiens
  misc_feature (250)..(270): n is a, c, g, or t
  misc_feature (389)..(397): n is a, c, g, or t
gcacgaggccaccatctacttcgcccccagtggggacaaaaagaacccagttaaatttgagggtggagacagagatctggagcatttgagcaagtttatagaagaacatgccacaaaactgagcaggaccaaggaagagctttgaaggcctgaggtctgcggaaggtgggaggaggcagacgccctgcgtggcccatggtcggggcgtccacgccgaggccggcaacaaacgacagtatctcggattccnnnnnnnnnnnnnnnnnnnnnatactttggtgtttcacttcatgctctgaatactgaataaccatgaatgactgaatagtttagtccagatttttacagaggatacatctatttttatcattatttggggtttgaaaaannnnnnnnnacaccttctaatttctttatttctcaaagcagataattcttctgtgtgaaaatgttttctttttttaatttaaggtttaaaattccttttccaaatcatgttgattttgctctttgctttttcgttgtctgagaaattgttggcgtagatttggcttctggtatgtgtttctgattgcttcctgttgagcacaaagtgagagctgccactgagcagccctgccaggggtgctgtttcaggctgggcatcgccaggcggcctccctgcaaaccaagggctgggggcaaaggggcatgatccagggtcccccagggtgggctcagctccagggagaggccacccacgtggcagccccacctcttgagagcccccagtgccggagcagaaaggaccctggacccagaggcagatactgcggggtggtagaaaaggtagagtaggctgtggcaatggaataaaacacgattaaaaacgttaaaaaacctcgtgc

SEQ ID NO: 20887 - DNA, 979 bp, Homo Sapiens
gcacgagggcgccgcgaggtgagattccggaggtaaacggttgtcctccaccccgctggaaatcctgttctttctgaacgggtggtataatgctacctatttcctgctggaacttttcatatttctgtataaaggtgtcctgctaccatatccaacagctaacctagtactggatgtggtgatgctcctcctttatcttggaattgaagtaattcgcctgttttttggtacaaagggaaacctctgccagcgaaagatgccactcagtattagcgtggccttgaccttcccatctgccatgatggcctcctattacctgctgctgcagacctacgtactccgcctggaagccatcatgaatggcatcttgctcttcttctgtggctcagagcttttacttgaggtgctcaccttggctgctttctccagtatggacacgatttgaagtacagaatttcagccagcagcccatcaggctgacaccacacatattgcttctggtactttagccacaccagtgagaattggtggggcaagttgtcctgagaaaggctgtgtggcttttcttcagcacagacatttgggcaagcaactcagcataaggccagtgggtaccatcttctaaaccaggaccatcagcccaagagactcttctacactccagtatagggaggggcaaggttattcccatcctgccccttctcagaaccagtcccctgctgacctcaagttctcctccttgatcaccgtggccagagcatctcgtgtggaccatctaggctccttgggcttcaagcaggactgagccacatgctccctgtacgagctgtgctatacctgtccacatgagcacggagagcctcatgttggtggtttcagagtgatgtgaagcctctcacccaatcctcggagactgagttccacactttttagtactcaagggtaattttctactctcttctggaaactaactttattt

SEQ ID NO: 20888 - DNA, 883 bp, Homo Sapiens
gcacgaggatagaaaattactgaaagtctattactcatggaagacttttaaagaataaccttttttcctgttttataaattcccattgttatatggtagtatttcagctacacaatattttagcttttagctagacatttatagcttttcatttgttgaaatggtaatcatctgcatgtttttgtcacttatttcaggttagtgattgcctaacacttataagccaaaataatctttgcaaaattccatacctaaaattttgaaagcccctaatgttttcacacatctttctgtattagttatagttttgtgaaatctttgtgtgatcttcaaacattatcatttaatgtacaatactgtaaataaactgtgcatggcttttatacagctttagtaaatgtcaaataaagtggtacagactcattacaacaagtttctcataaaaatacaataaataggaaaatgaaattcagaaacccatagactgggaataggttccagttacagcttggatctggcataaaataaatttgaaataaaatattttgatgctccatttttttatgttgcttttcatactaaagaatggtgtagacatgttttgcaactgttaggtacccagttatcaattttatcaatgttttagaggaggaaattatttttttggtagaaattgttcaagaaatccttaattgaatgtcattaaatgatggtggccaaaataaaacctatttagaaatttaatcactttgcacatcacttggaatatgatgcctctagtagttacttttttatagttttctacttttggttttatttaaaattgttttcaaatatagattattgacttattcaactttgctgtttataattttcagtatca

SEQ ID NO: 20889 - DNA, 1841 bp, Homo Sapiens
gcacgagggcagaagtaccgcctgcggagtaactgcaaagatgctgtccgtgcgcgttgctgcggccgtggtccgcgcccttcctcggcgggccggactggtctccagaaatgctttgggttcatctttcattgctgcaaggaacttccatgcctctaacactcatcttcaaaagactgggactgctgagatgtcctctattcttgaagagcgtattcttggagctgatacctctgttgatcttgaagaaactgggcgtgtcttaagtattggtgatggtattgcccgcgtacatgggctgaggaatgttcaagcagaagaaatggtagagttttcttcaggcttaaagggtatgtccttgaacttggaacctgacaatgttggtgttgtcgtgtttggaaatgataaactaattaaggaaggagatatagtgaagaggacaggagccattgtggacgttccagttggtgaggagctgttgggtcgtgtagttgatgcccttggtaatgctattgatggaaagggtccaattggttccaagacgcgtaggcgagttggtctgaaagcccccggtatcattcctcgaatttcagtgcgggaaccaatgcagactggcattaaggctgtggatagcttggtgccaattggtcgtggtcagcgtgaactgattattggtgaccgacagactgggaaaacctcaattgctattgacacaatcattaaccagaaacgtttcaatgatggatctgatgaaaagaagaagctgtactgtatttatgttgctattggtcaaaagagatccactgttgcccagttggtgaagagacttacagatgcagatgccatgaagtacaccattgtggtgtcggctacggcctcggatgctgccccacttcagtacctggctccttactctggctgttccatgggagagtattttagagacaatggcaaacatgctttgatcatctatgacgacttatccaaacaggctgttgcttaccgtcagatgtctctgttgctccgccgaccccctggtcgtgaggcctatcctggtgatgtgttctacctacactcccggttgctggagagagcagccaaaatgaacgatgcttttggtggtggctccttgactgctttgccagtcatagaaacacaggctggtgatgtgtctgcttacattccaacaaatgtcatttccatcactgacggacagatcttcttggaaacagaattgttctacaaaggtatccgccctgcaattaacgttggtctgtctgtatctcgtgtcggatccgctgcccaaaccagggctatgaagcaggtagcaggtaccatgaagctggaattggctcagtatcgtgaggttgctgcttttgcccagttcggttctgacctcgatgctgccactcaacaacttttgagtcgtggcgtgcgtctaactgagttgctgaagcaaggacagtattctcccatggctattgaagaacaagtggctgttatctatgcgggtgtaaggggatatcttgataaactggagcccagcaagattacaaagtttgagaatgctttcttgtctcatgtcgtcagccagcaccaagccttgttgggcactatcagggctgatggaaagatctcagaacaatcagatgcaaagctgaaagagattgtaacaaatttcttggctggatttgaagcttaaactcctgtggattcacatcaaataccagttcagttttgtcattgttctagtaaattagttccatttgtaaaagggttactctcatactccttatgtacagaaatcacatgaaaaataaaggttccataatgcgtagttg

SEQ ID NO: 20890 - DNA, 963 bp, Homo Sapiens
gcacgaggctcaataaggagccctttaggaagaactataatttaatcacgtttgattccttggagccaatgcaactattacaagttctcagtgatgttctggctgagattgacccaaagcaacttgtggatatcagagaggagatgccagagcagacagccaaacgaatgttgagccttcttggtattcttaagtacaaaccttcaggaaatgccacagatatgagtacttttcgtcagggtttggtgattggaagtaaacctgtaatttacccagtgctccactggcttcttcagaggactaatgaactgaagaaaagagcatatttagctcgttttttaataaaacttgaggtaccaagtgagtttcttcaggatgaaactgtggctgacaccaataaacagtatgaagagttaatggaagcctttaaaactttgcataaagaatatgagcagctcaagatatctggattttctacagcagaaataagaaaggatatcagtgcaatggaagaagaaaaggatcagctcattaagagagttgaacatttgaagaaaagggttgagacagctcagaatcatcaatggatgcttaaaatagcaaggcaacttcgagttgaaaaagagagagaagaatatcttgcacaacagaaacaggaacaaaagaatcagctatttcatgcagtgcaaagattgcaaagagtacaaaccagctgaaaagcatgcgccaagctgcagcagatgcaaagcctgaaagtttaatgaagaggctagaggaggagataaaatttaattttatatatgggtaactgaaaaatttcctaaagaattagaaaataagaaaaaaggaattacattttttacaaaagtagtttcagagccagctatgggccattctgatcttcttgaacttgaatctaaaataatgaataaacccaaaattaaccagttgattgaaaagaaa

SEQ ID NO: 20891 - DNA, 1768 bp, Homo Sapiens
taaatggatcccccgggctgcaggaattcggcacgaggcttacataaggcttagatttattggaccagtcagcacagcatgcctggttgtattaaagcagggatatgctgtattttataaaattggcaaaattagagaaatatagttcacaatgaaattatattttctttgtaaagaaagtggcttgaaatcttttttgttcaaagattaatgccaactcttaagattattctttcaccaactatagaatgtattttatatatcgttcattgtaaaaagcccttaaaaatatgtgtatactactttggctcttgtgcataaaaacaagaacactgaaaattgggaatatgcacaaacttggcttctttaaccaagaatattattggaaaattctctaaaagttaatagggtaaattctctattttttgtaatgtgttcggtgatttcagaaagctagaaagtgtatgtgtggcatttgttttcactttttaaaacatccctaactgatcgaatatatcagtaatttcagaatcagatgcatcctttcataagaagtgagaggactctgacagccataacaggagtgccacttcatggtgcgaagtgaacactgtagtcttgtcgttttcccaaagagaactccgtatgttctcttaggttgagtaacccactctgaattctggttacatgtgtttttctctccctccttaaataaagagaggggttaaacatgccctctaaaagtaggtggttttgaagagaataaattcatcagataacctcaagtcacatgagaatcttagtccatttacattgccttggctagtaaaagccatctatgtatatgtcttacctcatctcctaaaaggcagagtacaaagtaagccatgtatctcaggaaggtaacttcattttgtctatttgctgttgattgtaccaagggatggaagaagtaaatatagctcaggtagcactttatactcaggcagatctcagccctctactgagtcccttagccaagcagtttctttcaaagaagccagcaggcgaaaagcagggactgccactgcatttcatatcacactgttaaaagttgtgttttgaaattttatgtttagttgcacaaattgggccaaagaaacattgccttgaggaagatatgattggaaaatcaagagtgtagaagaataaatactgttttactgtccaaagacatgtttatagtgctctgtaaatgttcctttcctttgtagtctctggcaagatgctttaggaagataaaagtttgaggagaacaaacaggaattctgaattaagcacagagttgaagtttatacccgtttcacatgcttttcaagaatgtcgcaattactaagaagcagataatggtgttttttagaaacctaattgaagtatattcaaccaaatactttaatgtataaaataaatattatacaatatacttgtatagcagtttctgcttcacatttgattttttcaaatttaatatttatattagagatctatatatgtataaatatgtattttgtcaaatttgttacttaaatatatagagaccagttttctctggaagtttgtttaaatgacagaagcgtatatgaattcaagaaaatttaagctgcaaaaatgtatttgctataaaatgagaagtctcactgatagaggttctttattgctcattttttaaaaaatggactcttgaaatctgttaaaataaaattgtacatttggaaaaaaaacctcgtgc

SEQ ID NO: 20892 - DNA, 891 bp, Homo Sapiens
cccgggctgcaggaattcggcacgaggccccatggctcctgtgaaaaagcttgtggtgaaggggggcaaaaaaaagaagcaagttctgaagttcactcttgattgcacccaccctgtagaagatggaatcatggatgctgccaattttgagcagtttttgcaagaaaggatcaaagtgaacggaaaagctgggaaccttggtggaggggtggtgaccatcgaaaggagcaagagcaagatcaccgtgacatccgaggtgcctttctccaaaaggtatttgaaatatctcaccaaaaaatatttgaagaagaataatctacgtgactggttgcgcgtagttgctaacagcaaagagagttacgaattacgttacttccagattaaccaggacgaagaagaggaggaagacgaggattaaatttcatttatctggaaaattttgtatgagttcttgaataaaacttgggaaccaaaatggtggtttatccttgtatctctgcagtgtggattgaacagaaaattggaaatcatagtcaaagggcttcccttggttcgccactcatttatttgtaacttgacttcttttttttctgcttaaaaatttcaattctcgtggtaataccagagtagaagggagagggtgactttaccgaactgacagccattgggggaggcagatgcgggtgtggaggtgtgggctgaaggtagtgactgtttgattttaaaaagtgtgactgtcagttgtatctgttgcttttctcaatgattcagggatacaaatgggcttctctcattcattaaagaaaaacgcgacatctttctagattctctgtgggaaaatgactgtcataaaatgcgggtttctgggccatccgtctaactttcattttt

SEQ ID NO: 20893 - DNA, 662 bp, Homo Sapiens
gcacgaggcttcttcattccacttttctttgaggagagaatacgtcaattcttgtgacaaaggattcctaccacagctcctcactcagtaagtaacacagacataataaaaaaaggtaagttatatgtgaaaaattctctttttataataaatcctgtaaagcagtacttacttaagtaatgatatcatactgttttgttttatatttttcctaagagctaaaacgtcatcctctcttcagtgatgtggactgggaaaatctgcagcatcagactatgcctttcatcccccagccagatgatgaaacagatacctcctattttgaagccaggaatactgctcagcacctgaccgtatctggatttagtctgtagcacaaaaattttccttttagtctagccttgtgttatagaatgaacttgcataattatatactccttaatactagattgatctaagggggaaagatcattatttaacctagttcaatgtgcttttaatgtacgttacagctttcacagagttaaaaggctgaaaggaatatagtcagtaatttatcttaacctcaaaactgtatataaatcttcaaagcttttttcatttatttattttgtttattgcactttatgaaaactgaagcatcaataaaattagaggacact

SEQ ID NO: 20894 - DNA, 1115 bp, Homo Sapiens
gcacgagggggacacctaacgcacgtgctggaaggcccagacaccaacaccacgatcattcagctgcagcccttgcaggagcccgagagctgggcgcgcacgcagagtggcctgcagtcctacctgctccagttccacggcctcgtgcgcctggtgcaccaggagcggaccttggcctttcctctgaccatccgctgcttcctgggctgtgagctgcctcccgagggctctagagcccatgtcttcttcgaagtggctgtgaatgggagctcctttgtgagtttccggccggagagagccttgtggcaggcagacacccaggtcacctccggagtggtcaccttcaccctgcagcagctcaatgcctacaaccgcactcggtatgaactgcgggaattcctggaggacacctgtgtgcagtatgtgcagaaacatatttccgcggaaaacacgaaagggagccaaacaagccgctcctacacttcgctggtcctgggcgtcctggtgggcagtttcatcattgctggtgtggctgtaggcatcttcctgtgcacaggtggacggcgatgttaattactctccagccccgtcagaaggggctggattgatggaggctggcaagggaaagtttcagctcactgtgaagccagactccccaactgaaacaccagaaggtttggagtgacagctcctttcttctcccacatctgcccactgaagatttgagggaggggagatggagaggagaggtggacaaagtacttggtttgctaagaacctaagaacgtgtatgctttgctgaattagtctgataagtgaatgtttatctatctttgtggaaaacagataatggagttggggcaggaagcctatggcccatcctccaaagacagacagaatcacctgaggcgttcaaaagatataaccaaataaacaagtcatccacaatcaaaatacaacattcaatacttccaggtgtgtcagacttgggatgggacgctgatataatagggtagaaagaagtaacacgaagaagtggtggaaatgtaaaatccaagtcatatggcagtgatcattattaatcaattaataatattaataaatttcttatattt

SEQ ID NO: 20895 - DNA, 1121 bp, Homo Sapiens
  misc_feature (649)..(661): n is a, c, g, or t
gcacgaggcccaccccaaatctttgtattgtccacattctccaacaataaagcacagagtggatttaattaagcacacaaatgctaaggcagaattttgagggtgggagagaagaaaagggaaagaagctgaaaatgtaaaaccacaccagggaggaaaaatgacattcagaaccagcaaacactgaatttctcttgttgttttaactctgccacaagaatgcaatttcgttaatggagatgacttaagttggcagcagtaatcttcttttaggagcttgtaccacagtcttgcacataagtgcagatttggctcaagtaaagagaatttcctcaacactaacttcactgggataatcagcagcgtaactaccctaaaagcatatcactagccaaagagggaaatatctgttcttcttactgtgcctatattaagactagtacaaatgtggtgtgtcttccaactttcattgaaaatgccatatctataccatattttattcgagtcactgatgatgtaatgatatattttttcattattatagtagaatatttttatggcaagatatttgtggtcttgatcatacctattaaaataatgccaaacaccaaatatgaattttatgatgtacactttgtgcttggcattnnnnnnnnnnnnncacatcctggaagtctgtaagttgttttttgttactgtaggtcttcaaagttaagagtgtaagtgaaaaatctggaggagaggataatttccactgtgtggaatgtgaatagttaaatgaaaagttatggttatttaatgtaattattacttcaaatcctttggtcactgtgatttcaagcatgttttctttttctcctttatatgactttctctgagttgggcaaagaagaagctgacacaccgtatgttgttagagtcttttatctggtcaggggaaacaaaatcttgacccagctgaacatgtcttcctgagtcagtgcctgaatctttattttttaaattgaatgttctcttaaaggttaacatttctaagcaatatttagaaaagacttaaatgttattttggaagacttacgatgcatgtatacaaacgattagcagataatgatgactatttc

SEQ ID NO: 20896 - DNA, 938 bp, Homo Sapiens
gcacgaggatgtggttgaagccatgtatggggaccttcctcctccaattatgctgattggacatagcatgggtggtgctattgcagtccacacagcatcatccaacctggtaccaagcctcttgggtctgtgcatgattgatgttgtagaaggtacagctatggatgcacttaatagcatgcagaatttcttacggggtcgtcctaaaaccttcaagtctctggagaatgctattgaatggagtgtgaagagtggccagattcgaaatctggagtctgcccgtgtctcaatggttggccaagtcaaacagtgtgaaggaattacaagtccagaaggctcaaaatctatagtggaaggaatcatagaggaagaagaagaagatgaggaaggaagtgagtctataagcaagaggaaaaaggaagatgacatggagaccaagaaagaccatccatacacctggagaattgaactggcaaaaacagaaaaatactgggacggctggttccgaggcttatccaatctctttcttagttgtcccattcctaaattgctgctcttggctggtgttgatagattggataaagatctgaccattggccagatgcaagggaagttccagatgcaggtcctaccccagtgtggccatgcagtccatgaggatgcccctgacaaggtagctgaagctgttgccactttcctgatccggcacaggtttgcagaacccatcggtggattccagtgtgtgtttcctggctgttagtgacctgctgtccacccctcctcaacatcgagctctgttgtaaatacgtcgcaccagaggccactgtgatgccactgtctcctctccatcccgcccagccatgtgacactggctcctggtagacgggcaccccgagatgtaccaaccttttcatgtattctgccaaaagcattgtttt

SEQ ID NO: 20897 - DNA, 981 bp, Homo Sapiens
gcacgaggaggccagactcctttcagctaaaggggagatctggatggcatctacttcgtatgactattgcagagtgcccatggaagacggggataagcgctgtaagcttctgctggggataggaattctggtgctcctgatcatcgtgattctgggggtgcccttgattatcttcaccatcaaggccaacagcgaggcctgccgggacggccttcgggcagtgatggagtgtcgcaatgtcacccatctcctgcaacaagagctgaccgaggcccagaagggctttcaggatgtggaggcccaggccgccacctgcaaccacactgtgatggccctaatggcttccctggatgcagagaaggcccaaggacaaaagaaagtggaggagcttgagggagagatcactacattaaaccataagcttcaggacgcgtctgcagaggtggagcgactgagaagagaaaaccaggtcttaagcgtgagaatcgcggacaagaagtactaccccagctcccaggactccagctccgctgcggcgccccagctgctgattgtgctgctgggcctcagcgctctgctgcagtgagatcccaggaagctggcacatcttggaaggtccgtcctgctcggcttttcgcttgaacattcccttgatctcatcagttctgagcgggtcatggggcaacacggttagcggggagagcacggggtagccggagaagggcctctggagcaggtctggaggggccatgggggcagtcctgggtgtggggacacagtcgggttgacccagggctgtctccctccagagcctccctccggacaatgagtcccccctcttgtctccaccctgagattgggcatggggtgcggtgtggggggcatgtgctgcctgttgttatgggtttttttgcgggggggttgcttttttctggggtctttgactccaaaaaaataaacacttcctttgagggagagcac

SEQ ID NO: 20898 - DNA, 2193 bp, Homo Sapiens
  misc_feature (686)..(703): n is a, c, g, or t
atcccccgggctgcaggaattcggcacgaggcttaattctacttaagaaaaatatactaatagttttaagctaagaaaagctgtcagttagatggaaaatcacttttctaaagctgagctttgtagatgaaatatgaacatattagaggaagtaagggacatataaatgtttctaggaataatattttctaatgttcaagaaaaatatgattcacacagtttcttcataacctcagaaagcctatatctttgtcagctataaagagcatttactttgtttttactgcagttgtttaatataatagtatcaattctgtattttaagcttgataatccagcagcaaattgagattaatggaaggttggaaaaaaaggctatgaaacaaaatgcaacctttcccacatgaatataggcacaaaatgatgatttgtaatcctgaatgccttccacatcttatttctgatactttccttttttccatactattttatccatttcgtacagcttacccatttcctttatcacactctgttcctgcttctgtgaactttggattctctgctctatttgagcattgttcagaagtcactgaaatatttgagttgtcagaactatgtgttttctgggtgcttcatttcttatccaattctcctaattccactgtagaagcttttttcaagaagtnnnnnnnnnnnnnnnnnnggcagtgctttgctttcttgatatatttcagattgggaatcaagatgggaaaacaaggaattatcaacaaagaaggatatttatgatgaagattcaccccaaccagtaacaatggaaaaagttgtaaaacaaagttatgaattttcaaattctaataagaatttggaatatacagaatgcgacacatttagaagcacctttcattcaaagtctactctttctgaaccacaaaacaattctgctgaagggaattcacacaaatatgatatattaaagaagaatttatcaaaaaagtcagttataaaaagtgagagaataaatggtggaaagaaacttttaaattctaataaaagtggggcagccttcaaccagagcaaatctcttacccttccccagacttgtaatagagagaaaatctatacatgcagtgaatgtgggaaagcctttggcaaacagtcaatcctcagtcgccactggagaattcatacaggagagaagccctatgaatgtcgtgaatgtgggaagacttttagccatggttcatcccttacacgacatcagataagccatagtggagagaaaccttacaaatgcattgaatgtgggaaggcctttagccatggctcatcacttactaaccatcagagcactcacacgggagagaaaccgtatgaatgtatgaactgtggaaagtcttttagtcgtgtgtcccttctcattcagcatctaagaattcatacgcaagaaaaacgctatgagtgtcgtatatgtggaaaggccttcattcatagttcgtctctcattcaccatcagaaaagccatactggagagaagccttatgaatgtagagaatgtgggaaagctttctgctgtagctcacaccttactcaacatcaaagaattcacagtatgaagaaaaaatatgaatgcaacaaatgtctcaaggtctttagtagcttctcatttcttgttcaacatcagagtattcatactgaagaaaaaccgtttgaagtttagaaatgcaggaaatccttcaaccagcttgaatcactgaatatgcatttgagaaatcacattagattgaaaccctacgaatgcagtatatgtgggaaagcctttagtcataggtcgtccctgcttcaacatcacagtattcatactggagagaaaccttacgaatgtattaaatgtgggaagaccttcagctgtagttcaaaccttactgtacatcagagaattcatactggagaaaagccatataaatgtagtgagtgtgggaaagcttttagcaaaggctcgaatcttactgcctatcaaagagtacataatggagagaaactcaatagtgtggtaagtgtggaaaagcctttagatcatatgaatctctatacatgtgagaaatcttacagaagagaagcagtgtttatcacggtaaacttcattcatagatcctctcttatttaacatcagaaaatgtatactggggaaaa

SEQ ID NO: 20899 - DNA, 651 bp, Homo Sapiens
gcacgaggcacagctgctccgggaccgtgactggatcaaccaggtgtacctgccggaaaaccatgcccggctcaaggctgcccacacctatgtctcagaagagcttagggcattggggatccccttcttgagtcgtggggctggcttcttcatctgggttgacttgagaaagtacctgcccaagggcacctttgaggaggaaatgctgctctggcgccgctttttggacaacaaggtgctgctgtcctttggcaaggccttcgagtgtaaagagcctggttggtttcgctttgtcttctcagaccaggtccaccggctttgcctggggatgcagagggtccagcaggtgcttgcaggcaaatcccaagtggcagaagacccccgtccctctcagagccaggagccaagtgaccaacgcaggtgagctggtcattgtctcgtggccagagggcccagcagccactgtggacctggggcgttctggggctgcagaagactgactgtggatgtgccatttgccaggaaggtatctaacttggctttgtgcctgaagaactgtttcttgtctttcgctgtagcagtgggaaactccttaagctgtggttcagcctgggccctccctctctcctattaaacaaaactaggagagtc

SEQ ID NO: 20900 - DNA, 1202 bp, Homo Sapiens
gcacgaggcaaagcactgtccatgccggagaagtggaagttgagcggggtgtataagctgcagtacatgcatcctctctgcgagggcagctccgctactctcacctgtgtgcctttgggaaacctgattgttgtaaatgctacactaaaaatcaacaatgagattagaagtgtgaaaagattgcagctgctaccagaatcttttatttgcaaagagaaactaggggaaaatgtagccaacatatacaaagatcttcagaaactctctcgcctctttaaagaccagctggtgtatcctcttttggcttttacccgacaagcactgaacctaccagatgtatttgggttggtcgtcctcccattggaactgaaactacggatcttccgacttctggatgttcgttccgtcttgtctttgtctgcggtttgtcgtgacctctttactgcttcaaatgacccactcctgtggaggtttttatatctgcgtgattttcgagacaatactgtcagagttcaagacacagattggaaagaactgtacaggaagaggcacatacaaagaaaagaatccccgaaagggcggtttgtgatgctcctgccatcgtcaactcacaccattccattctatcccaaccccttgcaccctaggccatttcctagctcccgccttcctccaggaattatcgggggtgaatatgaccaaagaccaacacttccctatgttggagacccaatcagttcactcattcctggtcctggggagacgcccagccagtttcctccactgagaccacgctttgatccagttggcccacttccaggacctaaccccatcttgccagggcgaggcggccccaatgacagatttccctttagacccagcaggggtcggccaactgatggccggctgtcattcatgtgattgatttgtaatttcatttctggagctccatttgtttttgtttctaaactacagatgtcaactccttggggtgctgatctcgagtgttattttctgattgtggtgttgagagttgcactcccagaaaccttttaagagatacatttatagccctaggggtggtatgacccaaaggttcctctgtgacaaggttggccttgggaatagttggctgccaatctccctgctcttggttctcctctagattgaagtttgttttctgatgctgttcttaccagatt

SEQ ID NO: 20901 - DNA, 1491 bp, Homo Sapiens
  misc_feature (1140)..(1200): n is a, c, g, or t
cgtccgggcaggaggcagtggcgttggtgggaagcgcagctcgaaaagcgatgccgattctggtttcctggggctgcggcccacttcggtggacccagcgctgaggcggcggcggcgaggcccaagaaataagaagcggggctggcggcggcttgctcaggagccgctggggctggaggttgaccagttcctggaagacgtgcggctacaggagcgcacgagcggtggcttgttgtcagaggccccaaatgaaaaactcttcttcgtggacactggctccaaggaaaaagggctgacaaagaagagaaccaaagtccagaagaagtcactgcttctcaagaaaccccttcgggttgacctcatcctcgagaacacatccaaagtccctgcccccaaagacgtcctcgcccaccaggtccccaacgccaagaagctcaggcggaaggagcagctatgggagaagctggccaagcagggcgagctgccccgggaggtgcgcagggcccaggcccggctcctcaacccttctgcaacaagggccaagcccgggccccaggacaccgtagagcggcccttctacgacctctgggcctcagacaaccccctggacaggccgttggttggccaggatgagtttttcctggagcagaccaagaagaaaggagtgaagcggccagcacgcctgcacaccaagccgtcccaggcgcccgccgtggaggtggcgcctgccggagcttcctacaatccatcctttgaagaccaccagaccctgctctcagcggcccacgaggtggagttgcagcggcagaaggaggcggagaagctggagcggcagctggccctgcccgccacggagcaggccgccacccaggagtccacattccaggagctgtgcgaggggctgctggaggagtcggatggtgagggggagccaggccagggcgaggggccggaggctggggatgccgaggtctgtcccacgcccgcccgcctggccaccacagagaagaagacggagcagcagcggcggcgggagaaggctgtgcacaggctgcgggtacagcaggccgcgttgcgggccgcccggctccggcaccaggagctgttccggctgcgcgggatcaaggcccaggtggcccnnnnnnnnnnnnnnnnnnnnnnnnnnnnnnnnnnnnnnnnnnnnnnnnnnnnnnnnnnnnntgacaagccccgaaggctgggacggctcaagtaccaggcacctgacatcgacgtgcagctgagctcggagctgacagactcgctcaggaccctgaagcccgagggcaacatccttcgagaccggttcaagagcttccagaggaggaatatgatcgagcctcgagagagagccaagttcaaacgcaagtactaggtgaagctgggtggagaagcgggcgttccgtgagatccagttgtagctgccatcagatgcctgagactcgcccttcaataaaaaatctcttctagctg

SEQ ID NO: 20902 - DNA, 975 bp, Homo Sapiens
gcacgaggcggaagcctttgaggcactccagcaaaagagtcagggactggactccaggctccagcacgtggaggatggggtgctctccatgcaggtggcttctgcgcgccagaccgagagcctggagtccctcctgtccaagagccaggagcacgagcagcgcctggccgccctgcaggggcgcctggaaggcctcgggtcctcagaggcagaccaggatggcctggccagcacggtgaggagcctgggcgagacccagctggtgctctacggtgacgtggaggagctgaagaggagtgtgggcgagctccccagcaccgtggaatcactccagaaggtgcaggagcaggtgcacacgctgctcagtcaggaccaagcccaggccgcccgtctgcctcctcaggacttcctggacagactttcttctctagacaacctgaaagcctcagtcagccaagtggaggcggacttgaaaatgctcaggactgctgtggacagtttggttgcatactcggtcaaaatagaaaccaacgagaacaatctggaatcagccaagggtttactagatgacctgaggaatgatctggataggttgtttgtgaaagtggagaagattcacgaaaaggtctaaatgaattgcgtgtgcagggcgcggatttaaagtccaatttctcatgaccaaaaaatgtgtggttttttcccatgtgtcccctaccccccaatttcttgtcccctcttaaagagcagttgtcaccacctgaacaccaaggcattgtattttcatgcccagttaacttatttacaatatttaagttctctgcttctgcatttggttggtttcctgaagcgcagcccctgtgaataacaggtggcttttcatggatgtctctagtcagagaaaaatgataaaggcttaaattgaggattaacagaagcagattaacctcagaaatcctgtctgggtggccctcgtgc

SEQ ID NO: 20903 - DNA, 1320 bp, Homo Sapiens
gcacgaggcacactttgtcttttctccatgtgtcagattgcatgtttctataaaaaaggcaatgtttctgtctctctgcaagatttgggtgttccatcatgcactcatgtggagtccttccagactcagcaaaaacaaacacacagcatagctttcatataactcggcccttcaaggaaagccagttacttgttgtggtgctctttgatgaaacaataatctatctcagttcgggagatatagtcagtatgtgctttctttcctcttggccagatgtgaatatttaaaaaaatcagctgtagaccataagccaccttcaggtagtggtttgggaaatcaagcaataacactaatattgattccttcagatatggactccagtcatagtacaacgcttcagcctactgcaaatccaaacacaggtttggtggaagatttggacaggacaggacctctttcaatgacaacgcagcagagtaattctcagagcttctctacatcacatgaaggcttggaagaagataaagaccatccaacaacttctactctgacatcaagcaataggaatgatgtcacaggtggaagaagagacccaaatcattctgaaggctcaactactttactggaaggttatacctctcattacccacacacgaaggaaagcaggaccttcatcccagtgacctcagctaagactgggtcctttggagttactgcagttactgttggagattccaactctaatgtcaatcgttccttatcaggagaccaagacacattccaccccagtggggggtcccataccactcatggatctgaatcagatggacactcacatgggagtcaagaaggtggagcaaacacaacctctggtcctataaggacaccccaaattccagaatggctgatcatcttggcatccctcttggccttggctttgattcttgcagtttgcattgcagtcaacagtcgaagaaggtgtgggcagaagaaaaagctagtgatcaacagtggcaatggagctgtggaggacagaaagccaagtggactcaacggagaggccagcaagtctcaggaaatggtgcatttggtgaacaaggagtcgtcagaaactccagaccagtttatgacagctgatgagacaaggaacctgcagaatgtggacatgaagattggggtgtaacacctacaccattatcttggaaagaaacaaccgttggaaacataaccattacagggagctgggacacttaacagatgcaatgtgctactgattgtttcattgcgaatcttttttagcataaaattttctactctttt

SEQ ID NO: 20904 - DNA, 906 bp, Homo Sapiens
gcacgaggcacaccagcaagtgcttctttggaaggccttgctcagactgctggtcgaaggccctctgagggcaatgagccatcaactaaagaactcaaagagcacccagaggctcctgttcaaagaagacagaaaaagacaaggctacctcttgaaaacggcgtgtcttgattggatggaagaattataggagtagaagggcaggaactagaaaagtcaggagaatggagcataattttggaaggatgaccaatggtaggctctactgcttgcattatatttccagtcgaggctaattggagacttcctccacccaaaagaagtcatctagttcatctttattacgaaatgaaaatggtattgatgcggagccagctgaggaggcagttattcaaaaacctcggaggaagacaaagaaaacccagccagcagaattacagtatgccaatgagctaggagtagaagatgaagacataatcactgatgagcaaactactgtggaacagcagtctgtattcactgcacccactggcattagccagcctgtaggcaaagtatttgtggaaaaaagccggagattccaggctgctgatcgttcagagttgataaagaccacagaaaacatagatgtgtcaatggacgtgaagccttcctggaccaccagagatgtggcacttacagtgcaccgggctttcaggatgattggtctcttttctcatggattcttggctggctgtgctgtgtggaatattgttgtgatatatgttctagcaggagatcagctatccaacctctcaaaccttctgcaacaatacaagaccctagcgtatccattccagagtcttctgtacttgcttttggctctgagtacatttcagcttttgacaggattgactttgctaaata

SEQ ID NO: 20905 - DNA, 843 bp, Homo Sapiens
taaaaaataaatgtttatttcaagtatgaaaagtaatgtttaaacgttgtcccaaaattgtgttcagtttcacaagtataaaataagacttctgaaaaaaagtttacaattagttataaaacacttaagaatatattttgacattcacatcacagtgggcatttttgaaaaataaattttgctaatatagcttagaaaccaaaacatatttacagtcccatttaaataaacaagtccttaactgaggaacggtcctccctcaagatgggtagaatttcaaattgatttgtataagcattccttttaaaataatggtaaatctggttcaataaagtagaaattcaaataccttgtttccccggtgaataccatccatttcttacacatggctacccaaagttctcaagccattttaattaagcactttcaatgaaatacaatgaaagtgggaaccaaactctgagaaatctttatcatggcatttctcattagtttcagcgaaatattttgaacagaaaaggaaagaaatttcccagtggcaattacaaaaccacatcttgtaattattttacaggactgctaccaaggcttctgcttctcttctccaggtacatctgtttgtaggtttgaaacatttcttttgaatcttttactgggttttgtagcatctcaaatccatctgcactgaagcttctcttcgagagtcttgaattaacattatctctctcttggctgtctttctgtgtccttttctttgtagcaacaaattttaaccagtcttcttttgtactttttattcctgaaactatttaaatattcattttcagaactctagcctcgtgc

SEQ ID NO: 20906 - DNA, 980 bp, Homo Sapiens
gcacgaggcattttatttgcaaaatgaggtgactgtggcaaattatagaacacagagtattattacttttgccaggtttttctgacttgatttctgtaatttccagaaacccagacttctcatttccacacctagagatggaaacaggcaagtaactgacatgtctatttccttgggagcatgtgagaacatagcagtagggaccaaaagtctcagcacacttacctccgattatgccttaaagagttgattgtgaagaaccagtaactttgtcccaaatgcttctttggctgtttcatgcaggacttaattattgcttttaaaaattcacaatgaaaagacgattctgctgtatttgttaaacgttgacatttggttctagggccttgagtatgtgccacgtgcttgtgaaatgctatgattcacatgtaacatttaaacattaatttaaaaagggaaccttggagaattcttttgttcactagttccttttttctctacatttttaatttattaaacttgctgtgaaaacactttgattttctaagaggaaggtactttaagttccagaatgaacatgtagctgcactatgccagaaattaatgagggaagactttcttcctaagtgcttatgttttaacttatgttagtgaaaccactacaaggtgtttcaggcgctgataacatgcttcacacctgcccttggaggtcacagtactaatttacttcaaatttagttatgacagtgtcactgtatcctagttatgtttacagcacaaataaataatgactgtcatacatccagaggagaccgaacctgcccagctgatgtactgttttatggaataaagtcacttgatcagaaggaattgaaacaatagatcattttgttacctactggagggatttttgtcttgaatttgtttccttagaaattctacaaaaaaatgttgttaataaatgtctgctttgtaaaagc

SEQ ID NO: 20907 - DNA, 1009 bp, Homo Sapiens
gcacgaggcaccaagatttcaagagaggagagatgattgcattacttgattacaatgaatacaatctttaggatactctttactttttgtacaataacgatatgaaaggaattttttattctacctatacacagctcaaaataaaggtataacttctggaactgagaaactgatggtatggagagagggacgttttcataagaaaatagctttgataagtgtatacacaaaggcatatatatatacacacaaacacccctctctcttatatactatacaggctggcacacgccttataaagaatataatatcaaggctttaggatttcaatgaattttggaattttaatttgacaggtgcttaggccatttaggtcctgacatatcggaatcccttgtatttctaaagtatataattatgtttttaaaaaggcccagatcaactttccttaaacagtagcccaacataaagccatagttaccaagtggaaaataagattgttattctgtattaaatcagtaaagggtattttaagagaaaggacaacttggaaaatagagacttcagagtccattattccaagctgagaacattttagttattagcagtggttaccaaataagctgaaggtaaatctcttcaaggagctgctcataatttgcgttgttgggaagaggcgaggagctgtttctctattccactataaaatgatgcaagtttttttatccttgaaagggttttctgaagttggtattcctatcagcaaagggtcactcctggcatgttcctcacagtaggacatgaggtccgctgatgccttcaaaacctttattctttcaatggaggcttctaatcttaactgctgcacagttctccttgcctgggctatattgttggggcttgctgttttgctggacatcttcaattattgtttttacctgaaatcagtaaaactttgtgtggtccaatgttttcaggttttaagtggaatgaatccgcctgccggtgc

SEQ ID NO: 20908 - DNA, 898 bp, Homo Sapiens
gcacgaggatttatttttaaaaactccaggggatgtcccaaagttagtaaacagttctgtttcttgtcccttttatggctgcatgcagtttcaattgttcagtacaacagatgaggcatttaaaaggtctccaacgtcaagaaacactaactcatctctggcatatcatatttttttaaggcagaagtattttctgtaatggttactacagagtgtttactggttaatttttagttaaccagaaccacacatcccatagataattccatttaactgaggtttatatccgtaagagcattaccatagaaaaatttccctttagcaatttcaagagacctcagccaccaatatacctaccttctttacaatataaagtgaaatattactttagatgaaaattttttgtatcttacttagaaaaaattaagttgatatttaaaagaattttgatttttaatcaccttccacaacgatttgatataccttaaactccactttcattttttataagagaatcactttcaagggaaaaaaatggatgttactatattttaaaatctgctttataaaaaagtgtataaatatcaatctgccagatatacttcctatccccaacacagctgtaacactgactaatggggtcatgaccatgaagcaaattttacttcctaaatagaaatgtgtaggtggcagaaagcgtatttttcagcaggagtgattctgttggatctctttacaatgtcagagcagttgttagaaatgttagtattttattcggtttcttgctgtgaaggattatcacaatgttgaagtgatggctgttcacccagtcgtcatcaccgtcatcatctcaatcttgggaatcatcagcagtgtcccccacacagagagacaggta

SEQ ID NO: 20909 - DNA, 1347 bp, Homo Sapiens
  misc_feature (874)..(889): n is a, c, g, or t
  misc_feature (1204)..(1212): n is a, c, g, or t
gcacgaggctgcggctgggagcgggaagactctttgaaatgcctgcggtgctagagcgactgagccgctataatagcacgtcccaagcctttgctgaggtgctgcggctgccgaagcagcagctgaggaagctgctgtacccgctgcaggaagtagagcggttcctcgccccctacgggaggcaagaccttcacctgcgtatctttgacccaagcccggaggacatagccagggcggacaacatcttcacggccactgaacggaaccgcatcgactacgtcagctccgccgtccgtatcgaccacgccccggaccttccgcggccagaggtgtgttttataggcagaagcaatgttggaaaatcatctctaatcaaggctttattttcactggcccctgaggttgaagtcagagtctccaaaaaaccaggacacacaaagaaaatgaattttttcaaagttggaaaacattttacagtggtggacatgccaggttatggctttagagcacctgaagattttgttgacatggtagagacctatctaaaagaacgaaggaacttgaagagaacatttttattagtggatagcgttgttggaattcaaaaaacagacaatattgccatagaaatgtgtgaagaatttgcattaccttatgtgattgtattaacaaaaattgacaaatcttccaagggacatcttttaaaacaagtgcttcagatccagaaatttgttaacatgaaaactcaaggatgttttcctcagttgtttcctgtaagtgctgtgaccttttctggaatccacctgttgagatgctttatagccagtgtaacaggaagtcttgactaatggttcccggtttagctgaagattcnnnnnnnnnnnnnnnngctttatgctaactggagttaaatacctagaagaatttcaacattgttttaaatgttgtgcatctgtaacttcaggaggatcacttgagctttaaaacctgtgccttctcgaaacaagaatttgtgcctgaggtgaaaaaagtttgtaagttattgaattatggtgttcattagaacagctactagctgattcccctattttaacaaactgacaagagcacatccataaaatgaaaacctgttacaactatgtacagaagggtttgacgttttattgggcttttgtcttttaaagaatatgtctactatgggtannnnnnnnnaaatgtttaaaatgggctaggtaaaagggggctgcttttctgttaagcatcgataggtaagttgatggataaaagttactatgtaagcctatttttttgagtccttatttgaatattgaaaaacttcttgataaa

SEQ ID NO: 20910 - DNA, 1475 bp, Homo Sapiens
  misc_feature (1387)..(1395): n is a, c, g, or t
gcacgaggcccagccacgccttcctcccttgacccattcttctcccgggagccctcatctatgcacatctcctcaagcctgccccctgacacacagaagttccttcgctttgcagagactcaccgcactgtgttaaaccagatcctacggcagtccacgacccaccttgctgatgggccttttgctgtcctggtagactacattcgtgtcctcgactttgatgtcaagcgcaaatatttccgccaagagctggagcgtttagatgaggggctccggaaagaagacatggctgtgcatgtccgtcgtgaccatgtgtttgaagactcctatcgtgagctgcatcgcaaatcccccgaagaaatgaagaatcgattgtatatagtatttgaaggagaagaagggcaggatgctggcgggctcctgcgggagtggtatatgatcatctctcgagagatgtttaaccctatgtatgccttgttccgtacctcacctggtgatcgagtcacctacaccatcaatccatcttcccactgcaaccccaaccacctcagctacttcaagtttgtcggacgcattgtggccaaagctgtatatgacaaccgtcttctggagtgctactttactcgatccttttacaaacacatcttgggcaagtcagtcagatatacagatatggagagtgaagattacccacttctaccaaggtctggtttatctgctggaaaagatgtctccacactaggctatgacctcaccttcagcactgaggtccaagagtttggagtttgtgaagttcgtgacctcaacccaatggggccaacatcttggtaacagaggagaataagaaggagtatgtacacctggtatgccagatgagaatgacaggagccatccgcaagcagttggcggctttcttagaaggcttctatgagatcattccaaagcgcctcatttccatcttcactgagcaggagttagagctgcttatatcaggactgcccaccattgacatcgatgatctgaaatccaacactgaataccacaagtaccagtccaactctattcagatccagtggttctggagagcattgcgttctttcgatcaagctgaccgtgccaagttcctccagtttgtcacgggtacttccaaggtacccctgcaaggctttgctgccctcgaaggcatgaatggcattcagaagtttcagatccatcgagatgacaggtccacagatcgcctgccttcagctcacacatgttttaatcagctggatctgcctgcctatgagagctttgagaagctccgccacatgctactgttggctatccaggagtgctctgaaggctttgggctggcctaataaggccctgcccaactccgtggggnnnnnnnnnaccattgttggacctggggaggggggagttaaaaaaagaaccagaaagaaattgtcaaaaaccaataaatgaaatccacc

SEQ ID NO: 20911 - DNA, 905 bp, Homo Sapiens
gcacgcgagtttcctgtttaagatggcgtcccccgtagcagcgcaggccgggaagcttctgcgagccctagcgctgcggccccgcttcctggcggccgggtcccaggcagttcaattaacctccagaagatggctgaacctgcaggaataccagagcaagaaactgatgtctgacaacggagtgagagttcaaagattctttgtagcagacactgcaaatgaagctctcgaggctgctaagagactaaatgcaaaagaaattgttttaaaagcccagatcttagctggaggaagaggaaaaggtgtcttcaatagtggtttgaaaggaggtgttcatttaacaaaagaccctaatgttgtgggacagctggctaaacagatgattgggtacaatctagcgacaaaacaaactccaaaagaaggtgtgaaagttaacaaggtgatggttgctgaagccttggatatttccagagaaacctacctggcaattctgatggaccggtcctgcaatggccccgtgctggtgggcagcccccaggggggcgtcgacattgaagaggtggctgcttcaaacccggagctcatttttaaggagcaaattgacatttttgaaggaataaaggacagccaagctcagcggatggccgaaaatctaggcttcgttgggcctttgaaaagccaggctgcagatcaaattacgaagctgtataatctcttcctgaaaattgatgctactcaggtggaagtgaatccctttggtgaaactccagaaggacaagttgtctgttttgatgccaagataaactttgatgacaacgcagaattccgacaaaagacatatttgctatggacgacaaatcagagaatgagcccattgaaaatgaagctgccaaatatgatctaaa

SEQ ID NO: 20912 - DNA, 1018 bp, Homo Sapiens
gcacgaggctcctccctcagctctctgggacctccttagccctgtctgctaggcgctggggagactgataacttggggaggcaagagactgggagccacttctccccagaaagtgtttaacggttttagctttttataatacccttgtgagagcccattcccaccattctacctgaggccaggacgtctggggtgtggggattggtgggtctatgttccccaggattcagctattctggaagatcagcaccctaagagatgggactaggacctgagcctggtcctggccgtccctaagcatgtgtcccaggagcaggacctactaggagaggggggccaaggtcctgctcaactctacccctgctcccattcctccctccggccatactgcctttgcagttggactctcagggattctgggcttggggtgtggggtggggtggagtcgcagaccagagctgtctgaactcacgtgtcagaagcctccaagcctgcctcccaaggtcctctcagttctctcccttcctctctccttatagacacttgctcccaacccattcactacaggtgaaggctctcacccccatccctgggggccttgggtgagtggcctgctaaggctcctccttgcccagactacagggcttaggacttggtttgttatttcagggaaaaggagtagggagttcatctggagggttctaagtgggagaaggactatcaacaccactaggaatcccagaggtgggatcctccctcatggctctggcacagtgtaatccaggggtgtagatgggggaactgtgaatacttgaactctgttcccccaccctccatgctcctcacctgtctaggtctcctcagggtggggggtgacagtgccttctctattgggcacagcctagggtcttgggggtcaggggggagaagttcttgattcagccaaatgcagggaggggaggcagatggagcccataggccaccccctatcctctgagtgtttggaaataaactgtgc

SEQ ID NO: 20913 - DNA, 1157 bp, Homo Sapiens
gcacgaggattttctttattgtgttggtgcaatattttattatcatttaacctcaggatattcagaccaacaggattgtgttgctgctgaaagtctgagcagtgttttaccgtccccagcccccctcccacatggtcacatgttcacttgcttttccttccatctgttggttttgtgagctgagagcatctctggacacatggaagggagccagggattcctgtgatacagattttgaaccagcagagtactttggttttcttcatgtcctaagggtttgatccagaaaccctggtgcttcccctgcagaatactgtacttcatttaacagaatgattgatttttctttcaatcagcatgttcaccaaaaatagaaaagttcttctaaggttaaattttgtatttaaaagttagttggccatttgatcagggaattttctacacacattaggcaaatgtatgcttttcatcctctgggcttacctctctcctctgcaatcctggaagcattgtgcatagttctttcattgtaagccgctatttaaattcccacaatgcaaaactgttagaccagtaattgtgctactgaaattgtcacaaaacgttattccttgatttggtttttaaattttgcttttgtgtgtgtgtctttaaacaggtaatgtgtatttaagtgttgtctaaacagttgatttttactttataaaagatcatcttcaactgtttattgacttctgagttatatagttcatgccctgccaaggcattgttcgactccatgatactaaaacataatgaaagaaccaactccagtatggagaagagaaagtttaattatttggttccatctagaaaagcaacaacttaaaggaatccttcactaggattgtcttatcacctttattagataaatcatgaagtgtccctgtgaaattgaagtgaaactatctctgtaggacttaagagaatagctaaaaggtgtgacttgccttattgaactgatactggcatatctgactgtaagcagtaggttgaagatatcattttatgaatgtggagaattctacattgaaacagaatatacctgggaatgaagattataaatgtagctgctgttatttgcttggtgattccccttcttgctcttcttagttttg

SEQ ID NO: 20914 - DNA, 931 bp, Homo Sapiens
ccacgcgtccgccagccagtcccgctgcacacgctcgcagtctgtgggccctccgggaggcggcggaggtcaccgcggggagaggggcgggcgcagcatggcagcctccttacgtctcctcggagctgcctccggtctccggtactggagccggcggctgcggccggcagccggcagctttgcagcggtgtgttctaggtcagtggcttcaaagactccagttggattcattggactgggcaacatggggaatccaatggcaaaaaatctcatgaaacatggctatccacttattatttatgatgtgttccctgatgcctgcaaagagtttcaagatgcaggtgaacaggtagtatcttccccagcagatgttgctgaaaaagctgacagaattattacaatgctgcccaccagtatcaatgcaatagaagcttattccggagcaaatgggattctaaaaaaagtgaagaagggctcattattaatagattccagcactattgatcctgcagtttcaaaagaattggccaaagaagttgagaaaatgggagcagttttcatggatgcccctgtttctggtggtgtaggagctgcacgatctgggaacctcacgtttatggtgggaggagttgaagatgaatttgctgctgcccaagagttgctggggtgcatgggctccaacgtggtgtactgtggagctgttgggactgggcaggcggcaaagatctgcaacaacatgctgttagctattagtatgattggaactgctgaagctatgaatcttggaatcatgttagggcttgactcaaaactactggctaaaatcctaaatatgagctcaggacggtgttggtcaagtgacacttataatcctgtacctggagtgatggatgggcgttccctcggctaataactatcagggtggatttgg

SEQ ID NO: 20915 - DNA, 297 bp, Homo Sapiens
  misc_feature (222)..(245): n is a, c, g, or t
gcacgagggcagcttcggggacaatctggtcacccgctcctacctcctgggcaactccagcccccgaacccagagcccccagaactgcagcatcatgtaatctgggacctgccaggcaggggtgggggtggaggcttcctgcgtcctcctcacctcatgcccaccccctgccctgcacgtcatgggagggggcttgaagccaaagaaaaataaccctttggnnnnnnnnnnnnnnnnnnnnnnnnctaagagaagttattttctacagtggttttatactgaaggaaaaacacaagc

SEQ ID NO: 20916 - DNA, 859 bp, Homo Sapiens
gcacgaggagctcatggagggtctggattattgtcataagaagaactttttgcatagagatattaaatgttccaatatccttctaaataatagagggcagataaaacttgcagactttggacttgctcgattgtatagctcagaagaaagtcggccgtatactaacaaggtaattactttatggtaccgtccacctgaactgctactgggagaagaacgatacacaccagccattgatgtatggagctgtggctgtatccttggcgaactcttcactaaaaaacctatatttcaagcaaatcaggaacttgcacaactagaattaataagccgaatatgtgggagtccatgtcctgcagtgtggcctgatgtaatcaaactaccatatttcaacaccatgaaaccaaagaagcaatatcgtcgaaagttaagagaagaatttgtttttattcctgcagctgcgctagacttatttgattacatgcttgccttggatcctagtaagcgctgcactgctgaacaggctcttcagtgcgagttcctccgagatgtggaaccctcaaaaatgcctccaccagatctccctttatggcaagattgtcatgagttatggagtaaaaagcgaagaagacagaagcagatgggcatgactgatgatgtttccacaattaaagcccccaggaaggacttgtctctgggcttggatgacagcagaaccaacacaccccagggtgtgctgccatcttcacagctgaaatctcagggcagctcaaatgtggcacctggtgaaaaacagacagatccatcaacaccacaacaggagtcttcgaaaccgttgggaggaattcagccttcttct

SEQ ID NO: 20917 - DNA, 934 bp, Homo Sapiens
  misc_feature (638)..(646): n is a, c, g, or t
  misc_feature (861)..(870): n is a, c, g, or t
gcacgaggctcagaagctatgtatgggctttcccagattttaaagctgctgcctcgagaactactcatttctctcctggtcagcagacagaaatagccatactaatctcatagggctcaaatgcatcttcaggcagcagggaaccaagcagcgtggcacaggccttcttgactggaggaagagcttgctggcatggtgggcagtattccaggagaggccatgtccgtgttcacttcttggcacatttcagttccgttttcctcttgtttaaaactgcctctttagatgtggatgccttaatgctgtaacacatttgaaaacattggcaatacttaagttgctgccatgattacagatggaattattggctaccaaagagacgcaattgatgatgagaagcatgattcttgcttccatataaccaaagttaatcttaattgcaatttgactccgtttccttggtagggatagactttcttcagattccaagtgctctcttaaatggcaaattaagttaaagaatactactgctccattcccctcacttattctccagttaattgcttgtcagttccatttcaagaaagcagtgatgttccaggtttgattcagttttcctgtgcacactattgccaaannnnnnnnnagcaaagattctgcactggaacgtagacagttggaaacagtactacctacctagaggttatgtgttttctctttctccccgctttcacctctttctttcccaattcaaacagccaagtgagccctgttctggtattttgaatcattagagaaaagaaagggagtggctgttttgagttgtcctttctttgcagaaaggagaaaatgtgattgtgnnnnnnnnnnaccagcctacttctaagtgtcactgcctggtttttctctttttcaaggattagaactaagagga

SEQ ID NO: 20918 - DNA, 1220 bp, Homo Sapiens
gcacgaggcttctctgagctggcagaagacaaggagaattacaagaaattctatgaggcattctctaaaaatctcaagcttggaatccacgaagactccactaaccgccgccgcctgtctgagctgctgcgctatcatacctcccagtctggagatgagatgacatctctgtcagagtatgtttctcgcatgaaggagacacagaagtccatctattacatcactggtgagagcaaagagcaggtggccaactcagcttttgtggagcgagtgcggaaacggggcttcgaggtggtatatatgaccgagcccattgacgagtactgtgtgcagcagcttaaggaatttgatgggaagagcctggtctcagttaccaaggagggtctggagctgcctgaggatgaggaggagaagaagaagatggaagagagcaaggcaaagtttgagaacctctgcaagctcatgaaagaaatcttagataagaaggttgagaaggtgacaatctccaatagacttgtgtcttcaccttgctgcattgtgaccagcacctacggctggacagccaatatggagcggatcatgaaagcccaggcacttcgggacaactccaccatgggctatatgatggccaaaaagcacctggagatcaaccctgaccaccccattgtggagacgctgcggcagaaggctgaggccgacaagaatgataaggcagttaaggacctggtggtgctgctgtttgaaaccgtcctgctatcttctggcttttcccttgaggatccccagacccactccaaccgcatctatcgcatgatcaagctaggtctaggtattgatgaagatgaagtggcagcagaggaacccaatgctgcagttcctgatgagatcccccctctcgagggcgatgaggatgcgtctcgcatggaagaagtcgattaggttaggagttcatagttggaaaacttgtgcccttgtatagtgtccccatgggctcccactgcagcctcgagtgcccctgtcccacctggctccccctgctggtgtctagtgtttttttccctctcctgtccttgtgttgaaggcagtaaactaagggtgtcaagccccattccctctctactcttgacagcaggattggatgttgtgtattgtggtttattttattttcttcattttgttctgaaattaaagtatgcaaaaataaagaatatgccgttttt

SEQ ID NO: 20919 - DNA, 903 bp, Homo Sapiens
  misc_feature (733)..(757): n is a, c, g, or t
gcacgaggctgacttcttgtctggcctggtacactggggtgctgacacatggggctctgtggagctgcccattgtggggaaggctttcatccgacccttccgggagcaccacattgacccgacagctatcacacggcacgacttcatcgagaccaacggggacaactgcctggtgacactgctgccgctgctaaacatggcctacaagttccgcacccacagccctgaagccctggagcagctatacccctgggagtgcttcgtcttctgcctgatcatcttcggcaccttcaccaaccagatccacaagtggtcgcacacgtactttgggctgccacgctgggtcaccctcctgcaggactggcatgtcatcctgccacgtaaacaccatcgcatccaccacgtctcaccccacgagacctacttctgcatcaccacaggctggctcaactaccctctggagaagataggcttctggcgacgcctggaggacctcatccagggcctgacgggcgagaagcctcgggcagatgacatgaaatgggcccagaagatcaaataacttctccgagcctgctacctggttgccaaccttccctagcccccaaaccgaagccatctgccaaattccagcctctttgagctggcccctccagatggagaggacatctcctgggctgggcccaggtaccccagcccacccctcatgacacagaatacttgagccactgannnnnnnnnnnnnnnnnnnnnnnnncctcggcccctcctcagccacctgagttgctctatctgcaagcctgactctgccagcctcctctggtagagaggaggtttacccactccctgcacgcctgccgtccctgccccgctgggcagcctttcagtgtggctggcgttggg

SEQ ID NO: 20920 - DNA, 989 bp, Homo Sapiens
gcacgaggattcctacatatatttatttggtattgatgatgaggaaccccgtcaaaaattcctgtaagggagactactactcgactgttaggggtattgcaacatttacatacatgtagcttatcacatacgtaaacatttacacaaatagtacagcggtgaaccaccaagttctcattccacattcctttcccacactgcgtttacctgcccattcttgaaactggatctcagggcagcacattgcatttcaacaggcctagtgctgcttctcagaggcagtcaactcaatggtgcaaaagcacaggacagcgacaaggcattcacactacacagacatgtgatctcttactgacagcaggaagggaagagagatggagatcccgggtgggaaagcgacaacatgcatcacaggagccatgtgagatgcggtgaggaccgctggtacgcagcgtcccttgccaaggaatgcctcacagccatccgagaatgacaggcacgaaacatgaggaccttcctcgggtcagtcaagcatcatgctgggaggactcccacgtgtcccggtacacaggtcctggcactcatccgaccacagcttgctgtttggtccccaaaatgggcccacacccaggcgctgccaacacggcggctccgtctgagtcccttcgggtctccatcccatgggggtgcacgtctcagttttcctctaaccactgcttgagcagcctctgaaacattattttgctctcctgctgcctctctcgctggcgcttctcctctgtctcctgtggctggagtgccgcttcaggcagaggcccgggctggttggtgcctaggctgagagtcaagccactgaggccctgcaccagcgtctcccaggaggagggatgtggggccctgttactctccccagggatcccagaaagattcggcctgtggctctggcagtatcgacattcacatcggaatcgattctgacttctcggacg

SEQ ID NO: 20921 - DNA, 892 bp, Homo Sapiens
gcacgagggttcagaagactaaagacctgctcaataatgtggcctctgatgaagctaatttagaagccaaaatcgaaaagagaaaattagaactggaaagaaatcggaagcgactagagactctgcagagtgtcaggccatgttttatggatgagtatgagaagactgaggaagaattacaaaagcagtatgacacttatctggagaaatttcaaaatctgacttatctggaacaacagcttgaagaccatcataggatggagcaagaaaggtttgaggaagctaaaaacactctctgcctgatacagaacaagctcaaggaggaagagaagcgcctgctcaagagtggaagtaacgatgactcggacatagacatccaggaggacgatgaatccgacagtgagttggaagaaaggcggctgcccaagccacagacagccatggagatgctcatgcaaggaagacctggcaaacgcattgtgggcacgatgcaaggtggagactccgatgacaatgaggactcggaggagagtgaaattgacatggaagatgatgatgacgaggatgacgatttggaagacgagagcatttctctctcaccaaccaagcccaatcgaagggtctggaaatctgaacccctggatgagagtgacaatgacttctgacccttttgccaagggaccctggcagattaaaaccctcagacttgtaggtaaatgggaacttagaaggttaggaaggtaacccctgttttgtttactaacttggctggactcatgatcactgaagcaatacttatttctgctttacctcctatgtttgcattccatgaagcttaaatagaattgaagcaaatccctaagatttattttttttcaccttattatcttct

SEQ ID NO: 20922 - DNA, 626 bp, Homo Sapiens
gcacgaggcctcaatctgttcttcaagctcaagaacttcaagacagctgccacctttgctcggcgcctactagaactcgggcccaagcctgaggtggcccaacagacccgaaaaatcctgtctgcctgtgagaagaatcccacagatgcctaccagctcaattatgacatgcacaacccctttgacatttgtgctgcatcatatcggcccatctaccgtggaaagccagtagaaaagtgtccactcagtggggcctgctattcccctgagttcaaaggtcaaatctgcagggtcaccacagtgacagagattggcaaagatgtgattggtttaaggatcagtcctctgcagtttcgctaaggccccctttgtgtgcatgggtcagtcaccatatgttccccccagagaatgtgtctatatcctccttctaacagcaccttccccctgcagctactcttcagatctggctctctgtaccctaaaacctagtatctttttctcttctatggaaaatccgaaggtctaaacttgacttttttgaggtcttctcaacttgactacagttgtgctcataattgtccttgcctttccagcttaattattttaaggaacaaatgaaaactctg

SEQ ID NO: 20923 - DNA, 723 bp, Homo Sapiens
  misc_feature (586)..(620): n is a, c, g, or t
cccccgggctgcaggaattcggcacgaggcattctttaaacagatggaattatgaaggtgtttttcattatattttctgatggaattgtgtgtatatctatcttacaggtccaccgtttatatcagagagccttacagaagttacctctttgtgcatcactgtggaaagatcaactcttgtttgaagcatcagaaggaggtaaaactgataacctgagaaaactagtttccaagtgccaagagattggagtcagcctaaatgagctcttaaatttaaacagtaacaaaacagaaagcaagaatcactgaacactgggtgcagtcagttctaagtccttataataattgccaaaattatttgaatgattcttcaagattaggctgatccctggctaaggtctgtgtaaggcagacaagcgttattgatcatatcaagttccctacaatatcctgtcctcaaaaccggaagcaatgaacatgatcctcttcggttggataaatgaacttcctgtttggcctgcttctaggccctgccagattctcataacatcatatacgtaagtatagttcctcaaagtgactgacnnnnnnnnnnnnnnnnnnnnnnnnnnnnnnnnnnnctcccccattcctttattttgtgttattcctgactcacttgacactctctgatgcctgagagattcctgtttgggatttaatatccagggctgtgtttacagt

SEQ ID NO: 20924 - DNA, 1441 bp, Homo Sapiens
  misc_feature (1204)..(1216): n is a, c, g, or t
tggaagtcgacctcccagtactcaagagaccagtagcagcctcttgccacagagcccagcccccacagaacacctgaactcaaatgagatgccggaggacagcagcactcccgaagagatgccacctccagagcccccagagccaccacaggaggcagctgaagctgagaagtagcctatctatggaagagacttttgtttgtgtttaattagggctatgagagatttcaggtgagaagttaaacctgagacagagagcaagtaagctgtcccttttaactgtttttctttggtctttagtcacccagttgcacactggcattttcttgctgcaagcttttttaaatttctgaactcaaggcagtggcagaagatgtcagtcacctctgataactggaaaaatgggtctcttgggccctggcactggttctccatggcctcagccacagggtccccttggaccccctctcttccctccagatcccagccctcctgcttggggtcactggtctcattctggggctaaaagtttttgagactggctcaaatcctcccaagctgctgcacgtgctgagtccagaggcagtcacagagacctctggccaggggatcctaactgggttcttggggtcttcaggactgaagaggagggagagtggggtcagaagattctcctggccaccaagtgccagcattgcccacaaatccttttaggaatgggacaggtaccttccacttgttgtatttattagtgtagcttctcctttgtctcccatccactctgacacctaagccccactcttttcccattagatatatgtaagtagttgtagtagagataataattgacatttctcgtagactacccagaaacttttttaatacctgtgccattctcaataagaatttatgagatgccagcggcatagcccttcacactctctgtctcatctctcctcctttctcattagccccttttaatttgtttttccttttgactcctgctcccattaggagcaggaatggcagtaataaaagtctgcactttggtcatttcttttcctcagaggaagcctgagtgctcacttaaacactatcccctcagactccctgtgtgaggcctgcagaggccctgaatgcacaaatgggaaaccaaggcacagagaggctctcctctcctctcctctcccccgatgtaccctcnnnnnnnnnnnnntgctaaccagttcttccattaagcctcggctgagtgagggaaagcccagcactgctgccctctcgggtaactcaccctaagggcctcgggcccacctctggctatggtaaccacactgggggcttcctccaagccccgctcttccagcacttccaccggcagagtctcagagccacttcaccctgggggtgggctgtgtccccagtcagctctgctcaggacctg

SEQ ID NO: 20925 - DNA, 815 bp, Homo Sapiens
gcacgaggatttaaccaagctaaattatttccatttagccatgttaaagagaagccaagtctagagaaagcaatcctgtaacccatgaatctggtgtacccattttcccttaacgtaacgggaagtgttttgaaattcccagaagagagctgttttgtaatcaaagtgatggattataagaaagccagactttggaaaaggataattggaataaagggaggtgcttgaagattttccaaactactttatgtcatttagcttctattttctgaagggctttctttggtgccatgtactcagatcagtcagttgactgaaagatgatcatgttttcttcgtaaagatttaagcaattggcaactacaaagacattattttcttactgttctatatcatgtactgttgctgacattacaaaaagggtctggaagggaaaccgtgtcactgttttatcttttttctttaaaatacaaaagtatcccaactaatcatttattatggtcagcttgttttacatgtcccctatgatgagaaatgctatcaacatctgtgatttctaagagtcttaccaaattgttactttaattcttgtgtcctgctgagtggtttttcttttaaaataccatttttatcaccctgtggcactgggtgtgttactgcgattacactgatgattctgagctgtgcttcttcaagtagctcagttcttgcgttttatattaagtaacagttttgtgatgcttttgtgcgttctttgtcatctcttctgagttttcgaatctgtcataaataaactttttcactatgcacctggt

SEQ ID NO: 20926 - DNA, 985 bp, Homo Sapiens
gcacgaggctagacttcttatttgaagttaaaatttcttatttgaaaagttgaaatttatgagctttgaagattgctaaattaaataatttatagctccaaaaacaaaaatatacttgtatatgtcacagagaaaaaaaatgcaaaatttataatagagttacattaaccttgttgtttacctttcactgatttcttatatggtataaattaaagttcaggcatttatggggagaaaaggccctccccaccgacccgccacctgccacctctgacggagtgggagaagttagtctgtgctaagatagtactgagtccccagatgttgtatactgtaaattacagtataatgccaaatgcagcaaaatcttccagctgtacgttacaagtttggtcattttgaagcttgacattttagtttgccattatgttaaaaacatctaaataggtgttagtttctcaggagtagattgttagtgttgacttttcctgtaaagcagacatcgttcttggcctgccctgcattgtatactagatttcattgttgtctctcatgcttcttgagttgcttcatggtttatgctcgccatggaaagctatcagtaacagtttcatgcttataccaaagaattaaatctgatctttaatatctgatattttcctggtactcgtactgataagggattattggaagtcagtcacagaatttggaaataaattctagtctctccttagctatttgatgcttttcatataggccaagaactcattgcaaaacatttttgcaaggatgaatgcctgtatttggtctaggaacagtacattttagtctgatttaaattactggtagcttattttaaagcaaggaaaagcagctgagctcaagtttgctgtctttagaatggtttgtgaaatatggtataaaggtgttttcattttcctgttcttacctattattgtatagagctattcatgccattttttgg

SEQ ID NO: 20927 - DNA, 1348 bp, Homo Sapiens
gcacgaggctccaggagaaagtgtcaatgtgtaggagccggagcaggagccggagcccacggccacgcggagatagcgcctaccattcccagcgccacagtctgctgactcctgttaccccactctccccacccgggttagaggaagaggatgtcaacggttatgtcatgccagatacacacctcaaaggtactccctcctcccgggaaggcaccctttcttcagtgggtctcagttctgtcctgggtactgaagaagaagatgaagatgaggagtatgaatacatgaaccggaggagaaggcacagtccacctcatccccctaggccaagttcccttgaggagctgggttatgagtacatggatgtggggtcagacctcagtgcctctctgggcagcacacagagttgcccactccaccctgtacccatcatgcccactgcaggcacaactccagatgaagactatgaatatatgaatcggcaacgagatggaggtggtcctgggggtgattatgcagccatgggggcctgcccagcatctgagcaagggtatgaagagatgagagcttttcaggggcctggacatcaggccccccatgtccattatgcccgcctaaaaactctacgtagcttagaggctacagactctgcctttgataaccctgattactggcatagcaggcttttccccaaggctaatgcccagagaaacgtaactcctgctccctgtggcactcagggagcatttaatggcagctagtgcctttagagggtaccgtcttctccctattccctctctctcccaggtcccagccccttttccccagtcccagacaattccattcaatctttggaggcttttaaacattttgacacaaaattcttatggtatgtagccagctgtgcactttcttctctttcccaaccccaggaaaggttttccttattttgtgtgctttcccagtcccattcctcagcttcttcacaggcactcctggagatatgaaggattactctccatatcccttcctctcaggctcttgactacttggaactaggctcttatgtgtgcctttgtttcccatcagactgtcaagaagaggaaagggaggaaacctagcagaggaaagtgtaattttggtttatgactcttaaccccctagaaagacagaagcttaaaatctgtgaagaaagaggttaggagtagatattgattactatcataattcagcacttaactatgagccaggcatcatactaaacttcacctacattatctcacttagtcctttatcatccttaaaacaattctgtgacatacatattatctcattttacacaaaggga

SEQ ID NO: 20928 - DNA, 1343 bp, Homo Sapiens
ggcggccgctctagacccttttaaagagatcccccgggctgcaggaattcggcacgagggcagctcacagaaagttctccgctcccagacatgggtccctcggcttcctgcctcggaagcgcagcagcaggcatcgtgggaaggtgaagagcttccctaaggatgacccatccaagccggtccacctcacagccttcctgggatacaaggctggcatgactcacatcgtgcgggaagtcgacaggccgggatccaaggtgaacaagaaggaggtggtggaggctgtgaccattgtagagacaccacccatggtggttgtgggcattgtgggctacgtggaaacccctcgaggcctccggaccttcaagactgtctttgctgagcacatcagtgatgaatgcaagaggcgtttctataagaattggcataaatctaagaagaaggcctttaccaagtactgcaagaaatggcaggatgaggatggcaagaagcagctggagaaggacttcagcagcatgaagaagtactgccaagtcatccgtgtcattgcccacacccagatgcgcctgcttcctctgcgccagaagaaggcccacctgatggagatccaggtgaacggaggcactgtggccgagaagctggactgggcccgcgagaggcttgagcagcaggtacctgtgaaccaagtgtttgggcaggatgagatgatcgacgtcatcggggtgaccaagggcaaaggctacaaaggggtcaccagtcgttggcacaccaagaagctgccccgcaagacccaccgaggcctgcgcaaggtggcctgtattggggcatggcatcctgctcgtgtagccttctctgtggcacgcgctgggcagaaaggctaccatcaccgcactgagatcaacaagaagatttataagattggccagggctaccttatcaaggacggcaagctgatcaagaacaatgcctccactgactatgacctatctgacaagagcatcaaccctctgggtggctttgtccactatggtgaagtgaccaatgactttgtcatgctgaaaggctgtgtggtgggaaccaagaagcgggtgctcaccctccgcaagtccttgctggtgcagacgaagcggcgggctctggagaagattgaccttaagttcattgacaccacctccaagtttggccatggccgcttccagaccatggaggagaagaaagcattcatgggaccactgaagaaagaccgaattgcaaaggaagaaggagcttaatgccaggaacagattttgcagttggtggggtctcaataaaagttattttccactgaaaggaaaacctcgtgc

SEQ ID NO: 20929 - DNA, 1008 bp, Homo Sapiens; identical to SEQ ID NO: 15279
  misc_feature (986)..(986): n is a, c, g, or t

SEQ ID NO: 20930 - DNA, 890 bp, Homo Sapiens; identical to SEQ ID NO: 15280
  misc_feature (564)..(581): n is a, c, g, or t
  misc_feature (625)..(641): n is a, c, g, or t

SEQ ID NO: 20931 - DNA, 914 bp, Homo Sapiens; identical to SEQ ID NO: 15281

SEQ ID NO: 20932 - DNA, 1050 bp, Homo Sapiens; identical to SEQ ID NO: 15282

SEQ ID NO: 20933 - DNA, 813 bp, Homo Sapiens; identical to SEQ ID NO: 15283
  misc_feature (145)..(157): n is a, c, g, or t

SEQ ID NO: 20934 - DNA, 363 bp, Homo Sapiens; identical to SEQ ID NO: 15284

SEQ ID NO: 20935 - DNA, 1458 bp, Homo Sapiens; identical to SEQ ID NO: 15285
  misc_feature (798)..(798): n is a, c, g, or t
  misc_feature (1282)..(1330): n is a, c, g, or t

SEQ ID NO: 20936 - DNA, 842 bp, Homo Sapiens; identical to SEQ ID NO: 15286
  misc_feature (225)..(283): n is a, c, g, or t

SEQ ID NO: 20937 - DNA, 1037 bp, Homo Sapiens; identical to SEQ ID NO: 15287
  misc_feature (191)..(257): n is a, c, g, or t
  misc_feature (289)..(289): n is a, c, g, or t
  misc_feature (295)..(295): n is a, c, g, or t
  misc_feature (863)..(927): n is a, c, g, or t

SEQ ID NO: 20938 - DNA, 719 bp, Homo Sapiens; identical to SEQ ID NO: 15288

SEQ ID NO: 20939 - DNA, 826 bp, Homo Sapiens; identical to SEQ ID NO: 15289
  misc_feature (751)..(751): n is a, c, g, or t
  misc_feature (775)..(775): n is a, c, g, or t
  misc_feature (783)..(783): n is a, c, g, or t

SEQ ID NO: 20940 - DNA, 807 bp, Homo Sapiens; identical to SEQ ID NO: 15290
  misc_feature (526)..(550): n is a, c, g, or t
  misc_feature (620)..(648): n is a, c, g, or t
  misc_feature (674)..(702): n is a, c, g, or t

SEQ ID NO: 20941 - DNA, 836 bp, Homo Sapiens; identical to SEQ ID NO: 15291

SEQ ID NO: 20942 - DNA, 802 bp, Homo Sapiens; identical to SEQ ID NO: 15292
  misc_feature (695)..(695): n is a, c, g, or t

SEQ ID NO: 20943 - DNA, 952 bp, Homo Sapiens; identical to SEQ ID NO: 15293
  misc_feature (545)..(560): n is a, c, g, or t

SEQ ID NO: 20944 - DNA, 563 bp, Homo Sapiens; identical to SEQ ID NO: 15294

SEQ ID NO: 20945 - DNA, 932 bp, Homo Sapiens; identical to SEQ ID NO: 15295
  misc_feature (126)..(126): n is a, c, g, or t
  misc_feature (168)..(168): n is a, c, g, or t
  misc_feature (170)..(170): n is a, c, g, or t
  misc_feature (174)..(174): n is a, c, g, or t
  misc_feature (178)..(178): n is a, c, g, or t
  misc_feature (180)..(184): n is a, c, g, or t
  misc_feature (187)..(187): n is a, c, g, or t
  misc_feature (190)..(190): n is a, c, g, or t
  misc_feature (268)..(268): n is a, c, g, or t

SEQ ID NO: 20946 - DNA, 501 bp, Homo Sapiens; identical to SEQ ID NO: 15296

SEQ ID NO: 20947 - DNA, 684 bp, Homo Sapiens; identical to SEQ ID NO: 15297

SEQ ID NO: 20948 - DNA, 457 bp, Homo Sapiens; identical to SEQ ID NO: 15298
  misc_feature (428)..(428): n is a, c, g, or t

SEQ ID NO: 20949 - DNA, 570 bp, Homo Sapiens; identical to SEQ ID NO: 15299

SEQ ID NO: 20950 - DNA, 316 bp, Homo Sapiens; identical to SEQ ID NO: 15300
  misc_feature (17)..(17): n is a, c, g, or t

SEQ ID NO: 20951 - DNA, 837 bp, Homo Sapiens; identical to SEQ ID NO: 15301

SEQ ID NO: 20952 - DNA, 856 bp, Homo Sapiens; identical to SEQ ID NO: 15302

SEQ ID NO: 20953 - DNA, 406 bp, Homo Sapiens; identical to SEQ ID NO: 15303

SEQ ID NO: 20954 - DNA, 1070 bp, Homo Sapiens; identical to SEQ ID NO: 15304
  misc_feature (705)..(705): n is a, c, g, or t

SEQ ID NO: 20955 - DNA, 300 bp, Homo Sapiens; identical to SEQ ID NO: 15305

SEQ ID NO: 20956 - DNA, 1972 bp, Homo Sapiens; identical to SEQ ID NO: 15306

SEQ ID NO: 20957 - DNA, 1105 bp, Homo Sapiens; identical to SEQ ID NO: 15307

SEQ ID NO: 20958 - DNA, 510 bp, Homo Sapiens; identical to SEQ ID NO: 15308

SEQ ID NO: 20959 - DNA, 1455 bp, Homo Sapiens; identical to SEQ ID NO: 15309
  misc_feature (569)..(569): n is a, c, g, or t
  misc_feature (579)..(579): n is a, c, g, or t
  misc_feature (816)..(943): n is a, c, g, or t
  misc_feature (1211)..(1211): n is a, c, g, or t

SEQ ID NO: 20960 - DNA, 863 bp, Homo Sapiens; identical to SEQ ID NO: 15310
  misc_feature (828)..(828): n is a, c, g, or t

SEQ ID NO: 20961 - DNA, 2577 bp, Homo Sapiens; identical to SEQ ID NO: 15311

SEQ ID NO: 20962 - DNA, 1079 bp, Homo Sapiens; identical to SEQ ID NO: 15312
  misc_feature (255)..(283): n is a, c, g, or t
  misc_feature (888)..(935): n is a, c, g, or t

SEQ ID NO: 20963 - DNA, 615 bp, Homo Sapiens; identical to SEQ ID NO: 15313

SEQ ID NO: 20964 - DNA, 1505 bp, Homo Sapiens; identical to SEQ ID NO: 15314
  misc_feature (1403)..(1428): n is a, c, g, or t
  misc_feature (1466)..(1466): n is a, c, g, or t

SEQ ID NO: 20965 - DNA, 1108 bp, Homo Sapiens; identical to SEQ ID NO: 15315

SEQ ID NO: 20966 - DNA, 1552 bp, Homo Sapiens; identical to SEQ ID NO: 15316
  misc_feature (1401)..(1456): n is a, c, g, or t
  misc_feature (1485)..(1485): n is a, c, g, or t
  misc_feature (1509)..(1509): n is a, c, g, or t

SEQ ID NO: 20967 - DNA, 1404 bp, Homo Sapiens; identical to SEQ ID NO: 15317

SEQ ID NO: 20968 - DNA, 455 bp, Homo Sapiens; identical to SEQ ID NO: 15318

SEQ ID NO: 20969 - DNA, 596 bp, Homo Sapiens; identical to SEQ ID NO: 15319

SEQ ID NO: 20970 - DNA, 723 bp, Homo Sapiens; identical to SEQ ID NO: 15320

SEQ ID NO: 20971 - DNA, 1027 bp, Homo Sapiens; identical to SEQ ID NO: 15321
  misc_feature (936)..(938): n is a, c, g, or t
  misc_feature (1012)..(1012): n is a, c, g, or t

SEQ ID NO: 20972 - DNA, 804 bp, Homo Sapiens; identical to SEQ ID NO: 15322

SEQ ID NO: 20973 - DNA, 720 bp, Homo Sapiens; identical to SEQ ID NO: 15323

SEQ ID NO: 20974 - DNA, 1434 bp, Homo Sapiens; identical to SEQ ID NO: 15324

SEQ ID NO: 20975 - DNA, 828 bp, Homo Sapiens; identical to SEQ ID NO: 15325

SEQ ID NO: 20976 - DNA, 689 bp, Homo Sapiens; identical to SEQ ID NO: 15326

SEQ ID NO: 20977 - DNA, 432 bp, Homo Sapiens; identical to SEQ ID NO: 15327

SEQ ID NO: 20978 - DNA, 914 bp, Homo Sapiens; identical to SEQ ID NO: 15328

SEQ ID NO: 20979 - DNA, 671 bp, Homo Sapiens; identical to SEQ ID NO: 15329

SEQ ID NO: 20980 - DNA, 621 bp, Homo Sapiens; identical to SEQ ID NO: 15330

SEQ ID NO: 20981 - DNA, 928 bp, Homo Sapiens; identical to SEQ ID NO: 15331

SEQ ID NO: 20982 - DNA, 1064 bp, Homo Sapiens; identical to SEQ ID NO: 15332

SEQ ID NO: 20983 - DNA, 1022 bp, Homo Sapiens; identical to SEQ ID NO: 15333
  misc_feature (340)..(370): n is a, c, g, or t
  misc_feature (575)..(587): n is a, c, g, or t

SEQ ID NO: 20984 - DNA, 815 bp, Homo Sapiens; identical to SEQ ID NO: 15334
  misc_feature (502)..(504): n is a, c, g, or t
  misc_feature (506)..(507): n is a, c, g, or t
  misc_feature (510)..(511): n is a, c, g, or t
  misc_feature (520)..(520): n is a, c, g, or t
  misc_feature (523)..(523): n is a, c, g, or t
  misc_feature (525)..(526): n is a, c, g, or t
  misc_feature (530)..(561): n is a, c, g, or t
  misc_feature (569)..(569): n is a, c, g, or t
  misc_feature (573)..(578): n is a, c, g, or t
  misc_feature (580)..(636): n is a, c, g, or t
  misc_feature (638)..(638): n is a, c, g, or t
  misc_feature (642)..(646): n is a, c, g, or t
  misc_feature (650)..(650): n is a, c, g, or t
  misc_feature (652)..(652): n is a, c, g, or t
  misc_feature (654)..(656): n is a, c, g, or t
  misc_feature (658)..(658): n is a, c, g, or t
  misc_feature (661)..(675): n is a, c, g, or t
  misc_feature (681)..(681): n is a, c, g, or t
  misc_feature (683)..(702): n is a, c, g, or t

SEQ ID NO: 20985 - DNA, 691 bp, Homo Sapiens; identical to SEQ ID NO: 15335

SEQ ID NO: 20986 - DNA, 838 bp, Homo Sapiens; identical to SEQ ID NO: 15336

SEQ ID NO: 20987 - DNA, 606 bp, Homo Sapiens; identical to SEQ ID NO: 15337

SEQ ID NO: 20988 - DNA, 530 bp, Homo Sapiens; identical to SEQ ID NO: 15338
  misc_feature (479)..(479): n is a, c, g, or t
  misc_feature (514)..(514): n is a, c, g, or t

SEQ ID NO: 20989 - DNA, 1335 bp, Homo Sapiens; identical to SEQ ID NO: 15339
  misc_feature (865)..(883): n is a, c, g, or t
  misc_feature (935)..(943): n is a, c, g, or t
  misc_feature (952)..(963): n is a, c, g, or t
  misc_feature (977)..(998): n is a, c, g, or t
  misc_feature (1107)..(1170): n is a, c, g, or t

SEQ ID NO: 20990 - DNA, 1142 bp, Homo Sapiens; identical to SEQ ID NO: 15340
  misc_feature (638)..(647): n is a, c, g, or t
  misc_feature (655)..(713): n is a, c, g, or t
  misc_feature (998)..(1006): n is a, c, g, or t

SEQ ID NO: 20991 - DNA, 614 bp, Homo Sapiens; identical to SEQ ID NO: 15341

SEQ ID NO: 20992 - DNA, 759 bp, Homo Sapiens; identical to SEQ ID NO: 15342

SEQ ID NO: 20993 - DNA, 825 bp, Homo Sapiens; identical to SEQ ID NO: 15343
  misc_feature (309)..(365): n is a, c, g, or t
  misc_feature (652)..(652): n is a, c, g, or t

SEQ ID NO: 20994 - DNA, 963 bp, Homo Sapiens; identical to SEQ ID NO: 15344

SEQ ID NO: 20995 - DNA, 1208 bp, Homo Sapiens; identical to SEQ ID NO: 15345
  misc_feature (1197)..(1197): n is a, c, g, or t

SEQ ID NO: 20996 - DNA, 848 bp, Homo Sapiens; identical to SEQ ID NO: 15346
  misc_feature (597)..(639): n is a, c, g, or t
  misc_feature (665)..(665): n is a, c, g, or t
  misc_feature (782)..(782): n is a, c, g, or t

SEQ ID NO: 20997 - DNA, 849 bp, Homo Sapiens; identical to SEQ ID NO: 15347
  misc_feature (635)..(635): n is a, c, g, or t
  misc_feature (637)..(638): n is a, c, g, or t
  misc_feature (641)..(642): n is a, c, g, or t
  misc_feature (663)..(665): n is a, c, g, or t

SEQ ID NO: 20998 - DNA, 755 bp, Homo Sapiens; identical to SEQ ID NO: 15348
  misc_feature (688)..(688): n is a, c, g, or t

SEQ ID NO: 20999 - DNA, 876 bp, Homo Sapiens; identical to SEQ ID NO: 15349
  misc_feature (697)..(697): n is a, c, g, or t

SEQ ID NO: 21000 - DNA, 266 bp, Homo Sapiens; identical to SEQ ID NO: 15350

SEQ ID NO: 21001 - DNA, 688 bp, Homo Sapiens; identical to SEQ ID NO: 15351
  misc_feature (576)..(609): n is a, c, g, or t

SEQ ID NO: 21002 - DNA, 1429 bp, Homo Sapiens; identical to SEQ ID NO: 15352
  misc_feature (904)..(905): n is a, c, g, or t
  misc_feature (907)..(1030): n is a, c, g, or t
  misc_feature (1033)..(1035): n is a, c, g, or t
  misc_feature (1049)..(1062): n is a, c, g, or t
  misc_feature (1090)..(1137): n is a, c, g, or t
  misc_feature (1223)..(1235): n is a, c, g, or t

SEQ ID NO: 21003 - DNA, 1304 bp, Homo Sapiens; identical to SEQ ID NO: 15353
  misc_feature (919)..(924): n is a, c, g, or t
  misc_feature (926)..(1055): n is a, c, g, or t
  misc_feature (1060)..(1061): n is a, c, g, or t
  misc_feature (1064)..(1067): n is a, c, g, or t
  misc_feature (1081)..(1093): n is a, c, g, or t
  misc_feature (1111)..(1111): n is a, c, g, or t
  misc_feature (1126)..(1185): n is a, c, g, or t
  misc_feature (1256)..(1264): n is a, c, g, or t

SEQ ID NO: 21004 - DNA, 442 bp, Homo Sapiens; identical to SEQ ID NO: 15354
  misc_feature (310)..(310): n is a, c, g, or t
  misc_feature (367)..(367): n is a, c, g, or t

SEQ ID NO: 21005 - DNA, 1818 bp, Homo Sapiens; identical to SEQ ID NO: 15355
  misc_feature (205)..(233): n is a, c, g, or t
  misc_feature (1278)..(1443): n is a, c, g, or t
  misc_feature (1490)..(1553): n is a, c, g, or t
  misc_feature (1704)..(1704): n is a, c, g, or t
  misc_feature (1737)..(1749): n is a, c, g, or t

SEQ ID NO: 21006 - DNA, 744 bp, Homo Sapiens; identical to SEQ ID NO: 15356
  misc_feature (635)..(663): n is a, c, g, or t

SEQ ID NO: 21007 - DNA, 641 bp, Homo Sapiens; identical to SEQ ID NO: 15357
  misc_feature (456)..(465): n is a, c, g, or t

SEQ ID NO: 21008 - DNA, 644 bp, Homo Sapiens; identical to SEQ ID NO: 15358

SEQ ID NO: 21009 - DNA, 1829 bp, Homo Sapiens; identical to SEQ ID NO: 15359
  misc_feature (1588)..(1596): n is a, c, g, or t
  misc_feature (1629)..(1632): n is a, c, g, or t
  misc_feature (1634)..(1634): n is a, c, g, or t
  misc_feature (1647)..(1681): n is a, c, g, or t
  misc_feature (1775)..(1775): n is a, c, g, or t

SEQ ID NO: 21010 - DNA, 857 bp, Homo Sapiens; identical to SEQ ID NO: 15360

SEQ ID NO: 21011 - DNA, 558 bp, Homo Sapiens; identical to SEQ ID NO: 15361
  misc_feature (85)..(140): n is a, c, g, or t
  misc_feature (502)..(510): n is a, c, g, or t

SEQ ID NO: 21012 - DNA, 1045 bp, Homo Sapiens; identical to SEQ ID NO: 15362
  misc_feature (341)..(392): n is a, c, g, or t
  misc_feature (531)..(554): n is a, c, g, or t

SEQ ID NO: 21013 - DNA, 1212 bp, Homo Sapiens; identical to SEQ ID NO: 15363
  misc_feature (57)..(153): n is a, c, g, or t
  misc_feature (938)..(938): n is a, c, g, or t

SEQ ID NO: 21014 - DNA, 1199 bp, Homo Sapiens; identical to SEQ ID NO: 15364

SEQ ID NO: 21015 - DNA, 1158 bp, Homo Sapiens; identical to SEQ ID NO: 15365
  misc_feature (910)..(948): n is a, c, g, or t

SEQ ID NO: 21016 - DNA, 881 bp, Homo Sapiens; identical to SEQ ID NO: 15366
  misc_feature (631)..(650): n is a, c, g, or t

SEQ ID NO: 21017 - DNA, 818 bp, Homo Sapiens; identical to SEQ ID NO: 15367
  misc_feature (676)..(722): n is a, c, g, or t
  misc_feature (770)..(770): n is a, c, g, or t

SEQ ID NO: 21018 - DNA, 659 bp, Homo Sapiens; identical to SEQ ID NO: 15368

SEQ ID NO: 21019 - DNA, 976 bp, Homo Sapiens; identical to SEQ ID NO: 15369
  misc_feature (147)..(185): n is a, c, g, or t

SEQ ID NO: 21020 - DNA, 608 bp, Homo Sapiens; identical to SEQ ID NO: 15370

SEQ ID NO: 21021 - DNA, 1151 bp, Homo Sapiens; identical to SEQ ID NO: 15371

SEQ ID NO: 21022 - DNA, 888 bp, Homo Sapiens; identical to SEQ ID NO: 15372

SEQ ID NO: 21023 - DNA, 858 bp, Homo Sapiens; identical to SEQ ID NO: 15373
  misc_feature (796)..(796): n is a, c, g, or t

SEQ ID NO: 21024 - DNA, 1894 bp, Homo Sapiens; identical to SEQ ID NO: 15374
  misc_feature (380)..(432): n is a, c, g, or t
  misc_feature (1781)..(1781): n is a, c, g, or t

SEQ ID NO: 21025 - DNA, 1119 bp, Homo Sapiens; identical to SEQ ID NO: 15375
  misc_feature (225)..(283): n is a, c, g, or t
  misc_feature (825)..(834): n is a, c, g, or t

SEQ ID NO: 21026 - DNA, 1388 bp, Homo Sapiens; identical to SEQ ID NO: 15376

SEQ ID NO: 21027 - DNA, 938 bp, Homo Sapiens; identical to SEQ ID NO: 15377

SEQ ID NO: 21028 - DNA, 886 bp, Homo Sapiens; identical to SEQ ID NO: 15378

SEQ ID NO: 21029 - DNA, 1279 bp, Homo Sapiens; identical to SEQ ID NO: 15379

SEQ ID NO: 21030 - DNA, 987 bp, Homo Sapiens; identical to SEQ ID NO: 15380

SEQ ID NO: 21031 - DNA, 664 bp, Homo Sapiens; identical to SEQ ID NO: 15381

SEQ ID NO: 21032 - DNA, 815 bp, Homo Sapiens; identical to SEQ ID NO: 15382
  misc_feature (648)..(660): n is a, c, g, or t
  misc_feature (663)..(708): n is a, c, g, or t

SEQ ID NO: 21033 - DNA, 1374 bp, Homo Sapiens; identical to SEQ ID NO: 15383
  misc_feature (1274)..(1303): n is a, c, g, or t

SEQ ID NO: 21034 - DNA, 1418 bp, Homo Sapiens; identical to SEQ ID NO: 15384
  misc_feature (196)..(326): n is a, c, g, or t
  misc_feature (800)..(821): n is a, c, g, or t
  misc_feature (957)..(1019): n is a, c, g, or t

SEQ ID NO: 21035 - DNA, 812 bp, Homo Sapiens; identical to SEQ ID NO: 15385

SEQ ID NO: 21036 - DNA, 1413 bp, Homo Sapiens; identical to SEQ ID NO: 15386
  misc_feature (132)..(147): n is a, c, g, or t
  misc_feature (516)..(516): n is a, c, g, or t
  misc_feature (518)..(598): n is a, c, g, or t
  misc_feature (783)..(819): n is a, c, g, or t
  misc_feature (881)..(891): n is a, c, g, or t
  misc_feature (1037)..(1037): n is a, c, g, or t
  misc_feature (1301)..(1301): n is a, c, g, or t
  misc_feature (1369)..(1369): n is a, c, g, or t

SEQ ID NO: 21037 - DNA, 1159 bp, Homo Sapiens; identical to SEQ ID NO: 15387
  misc_feature (609)..(623): n is a, c, g, or t

SEQ ID NO: 21038 - DNA, 812 bp, Homo Sapiens; identical to SEQ ID NO: 15388

SEQ ID NO: 21039 - DNA, 1632 bp, Homo Sapiens; identical to SEQ ID NO: 15389
  misc_feature (65)..(65): n is a, c, g, or t
  misc_feature (706)..(706): n is a, c, g, or t

SEQ ID NO: 21040 - DNA, 489 bp, Homo Sapiens; identical to SEQ ID NO: 15390

SEQ ID NO: 21041 - DNA, 517 bp, Homo Sapiens; identical to SEQ ID NO: 15391

SEQ ID NO: 21042 - DNA, 845 bp, Homo Sapiens; identical to SEQ ID NO: 15392

SEQ ID NO: 21043 - DNA, 841 bp, Homo Sapiens; identical to SEQ ID NO: 15393
  misc_feature (646)..(646): n is a, c, g, or t
  misc_feature (769)..(783): n is a, c, g, or t

SEQ ID NO: 21044 - DNA, 805 bp, Homo Sapiens; identical to SEQ ID NO: 15394

SEQ ID NO: 21045 - DNA, 576 bp, Homo Sapiens; identical to SEQ ID NO: 15395

SEQ ID NO: 21046 - DNA, 1340 bp, Homo Sapiens; identical to SEQ ID NO: 15396
  misc_feature (1205)..(1234): n is a, c, g, or t

SEQ ID NO: 21047 - DNA, 587 bp, Homo Sapiens; identical to SEQ ID NO: 15397

SEQ ID NO: 21048 - DNA, 628 bp, Homo Sapiens; identical to SEQ ID NO: 15398

SEQ ID NO: 21049 - DNA, 883 bp, Homo Sapiens; identical to SEQ ID NO: 15399
  misc_feature (464)..(464): n is a, c, g, or t
  misc_feature (471)..(471): n is a, c, g, or t
  misc_feature (776)..(784): n is a, c, g, or t

SEQ ID NO: 21050 - DNA, 1159 bp, Homo Sapiens; identical to SEQ ID NO: 15400
  misc_feature (903)..(912): n is a, c, g, or t

SEQ ID NO: 21051 - DNA, 721 bp, Homo Sapiens; identical to SEQ ID NO: 15401
  misc_feature (686)..(686): n is a, c, g, or t

SEQ ID NO: 21052 - DNA, 404 bp, Homo Sapiens; identical to SEQ ID NO: 15402

SEQ ID NO: 21053 - DNA, 684 bp, Homo Sapiens; identical to SEQ ID NO: 15403

SEQ ID NO: 21054 - DNA, 846 bp, Homo Sapiens; identical to SEQ ID NO: 15404

SEQ ID NO: 21055 - DNA, 775 bp, Homo Sapiens; identical to SEQ ID NO: 15405

SEQ ID NO: 21056 - DNA, 614 bp, Homo Sapiens; identical to SEQ ID NO: 15406

SEQ ID NO: 21057 - DNA, 1665 bp, Homo Sapiens; identical to SEQ ID NO: 15407
  misc_feature (577)..(587): n is a, c, g, or t
  misc_feature (645)..(665): n is a, c, g, or t
  misc_feature (1341)..(1341): n is a, c, g, or t

SEQ ID NO: 21058 - DNA, 914 bp, Homo Sapiens; identical to SEQ ID NO: 15408
  misc_feature (38)..(38): n is a, c, g, or t

SEQ ID NO: 21059 - DNA, 1471 bp, Homo Sapiens; identical to SEQ ID NO: 15409
  misc_feature (1349)..(1425): n is a, c, g, or t

SEQ ID NO: 21060 - DNA, 379 bp, Homo Sapiens; identical to SEQ ID NO: 15410

SEQ ID NO: 21061 - DNA, 697 bp, Homo Sapiens; identical to SEQ ID NO: 15411

SEQ ID NO: 21062 - DNA, 1319 bp, Homo Sapiens; identical to SEQ ID NO: 15412
  misc_feature (1088)..(1192): n is a, c, g, or t
  misc_feature (1194)..(1199): n is a, c, g, or t

SEQ ID NO: 21063 - DNA, 1128 bp, Homo Sapiens; identical to SEQ ID NO: 15413
  misc_feature (486)..(486): n is a, c, g, or t

SEQ ID NO: 21064 - DNA, 1034 bp, Homo Sapiens; identical to SEQ ID NO: 15414

SEQ ID NO: 21065 - DNA, 1046 bp, Homo Sapiens; identical to SEQ ID NO: 15415
  misc_feature (533)..(577): n is a, c, g, or t
  misc_feature (1023)..(1023): n is a, c, g, or t
  misc_feature (1033)..(1033): n is a, c, g, or t

SEQ ID NO: 21066 - DNA, 759 bp, Homo Sapiens; identical to SEQ ID NO: 15416
  misc_feature (476)..(476): n is a, c, g, or t
  misc_feature (479)..(479): n is a, c, g, or t
  misc_feature (650)..(673): n is a, c, g, or t

SEQ ID NO: 21067 - DNA, 858 bp, Homo Sapiens; identical to SEQ ID NO: 15417

SEQ ID NO: 21068 - DNA, 2194 bp, Homo Sapiens; identical to SEQ ID NO: 15418
  misc_feature (1891)..(1891): n is a, c, g, or t
  misc_feature (2014)..(2015): n is a, c, g, or t
  misc_feature (2054)..(2054): n is a, c, g, or t

SEQ ID NO: 21069 - DNA, 538 bp, Homo Sapiens; identical to SEQ ID NO: 15419

SEQ ID NO: 21070 - DNA, 627 bp, Homo Sapiens; identical to SEQ ID NO: 15420

SEQ ID NO: 21071 - DNA, 458 bp, Homo Sapiens; identical to SEQ ID NO: 15421

SEQ ID NO: 21072 - DNA, 1404 bp, Homo Sapiens; identical to SEQ ID NO: 15422

SEQ ID NO: 21073 - DNA, 419 bp, Homo Sapiens; identical to SEQ ID NO: 15423

SEQ ID NO: 21074 - DNA, 1498 bp, Homo Sapiens; identical to SEQ ID NO: 15424

SEQ ID NO: 21075 - DNA, 1152 bp, Homo Sapiens; identical to SEQ ID NO: 15425
  misc_feature (493)..(493): n is a, c, g, or t
  misc_feature (509)..(509): n is a, c, g, or t
  misc_feature (514)..(515): n is a, c, g, or t
  misc_feature (526)..(526): n is a, c, g, or t

SEQ ID NO: 21076 - DNA, 806 bp, Homo Sapiens; identical to SEQ ID NO: 15426

SEQ ID NO: 21077 - DNA, 935 bp, Homo Sapiens; identical to SEQ ID NO: 15427
  misc_feature (222)..(318): n is a, c, g, or t

SEQ ID NO: 21078 - DNA, 606 bp, Homo Sapiens; identical to SEQ ID NO: 15428

SEQ ID NO: 21079 - DNA, 1260 bp, Homo Sapiens; identical to SEQ ID NO: 15429
  misc_feature (1193)..(1193): n is a, c, g, or t
  misc_feature (1198)..(1198): n is a, c, g, or t

SEQ ID NO: 21080 - DNA, 523 bp, Homo Sapiens; identical to SEQ ID NO: 15430

SEQ ID NO: 21081 - DNA, 839 bp, Homo Sapiens; identical to SEQ ID NO: 15431

SEQ ID NO: 21082 - DNA, 550 bp, Homo Sapiens; identical to SEQ ID NO: 15432

SEQ ID NO: 21083 - DNA, 1319 bp, Homo Sapiens; identical to SEQ ID NO: 15433

SEQ ID NO: 21084 - DNA, 1007 bp, Homo Sapiens; identical to SEQ ID NO: 15434
  misc_feature (910)..(922): n is a, c, g, or t

SEQ ID NO: 21085 - DNA, 1133 bp, Homo Sapiens; identical to SEQ ID NO: 15435

SEQ ID NO: 21086 - DNA, 855 bp, Homo Sapiens; identical to SEQ ID NO: 15436
  misc_feature (618)..(618): n is a, c, g, or t
  misc_feature (742)..(743): n is a, c, g, or t
  misc_feature (822)..(822): n is a, c, g, or t

SEQ ID NO: 21087 - DNA, 996 bp, Homo Sapiens; identical to SEQ ID NO: 15437

SEQ ID NO: 21088 - DNA, 1270 bp, Homo Sapiens; identical to SEQ ID NO: 15438
  misc_feature (1123)..(1138): n is a, c, g, or t
  misc_feature (1166)..(1211): n is a, c, g, or t

SEQ ID NO: 21089 - DNA, 915 bp, Homo Sapiens; identical to SEQ ID NO: 15439

SEQ ID NO: 21090 - DNA, 328 bp, Homo Sapiens; identical to SEQ ID NO: 15440

SEQ ID NO: 21091 - DNA, 952 bp, Homo Sapiens; identical to SEQ ID NO: 15441

SEQ ID NO: 21092 - DNA, 1188 bp, Homo Sapiens; identical to SEQ ID NO: 15442

SEQ ID NO: 21093 - DNA, 1575 bp, Homo Sapiens; identical to SEQ ID NO: 15443
  misc_feature (420)..(439): n is a, c, g, or t
  misc_feature (966)..(966): n is a, c, g, or t
  misc_feature (990)..(990): n is a, c, g, or t
  misc_feature (1037)..(1037): n is a, c, g, or t
  misc_feature (1317)..(1356): n is a, c, g, or t
  misc_feature (1509)..(1509): n is a, c, g, or t
  misc_feature (1514)..(1514): n is a, c, g, or t

SEQ ID NO: 21094 - DNA, 358 bp, Homo Sapiens; identical to SEQ ID NO: 15444

SEQ ID NO: 21095 - DNA, 502 bp, Homo Sapiens; identical to SEQ ID NO: 15445
  misc_feature (177)..(195): n is a, c, g, or t

SEQ ID NO: 21096 - DNA, 1702 bp, Homo Sapiens; identical to SEQ ID NO: 15446
  misc_feature (119)..(119): n is a, c, g, or t

SEQ ID NO: 21097 - DNA, 663 bp, Homo Sapiens; identical to SEQ ID NO: 15447

SEQ ID NO: 21098 - DNA, 1180 bp, Homo Sapiens; identical to SEQ ID NO: 15448
  misc_feature (514)..(655): n is a, c, g, or t

SEQ ID NO: 21099 - DNA, 869 bp, Homo Sapiens; identical to SEQ ID NO: 15449
  misc_feature (777)..(824): n is a, c, g, or t

SEQ ID NO: 21100 - DNA, 1934 bp, Homo Sapiens; identical to SEQ ID NO: 15450
  misc_feature (835)..(845): n is a, c, g, or t
  misc_feature (1200)..(1292): n is a, c, g, or t
  misc_feature (1463)..(1472): n is a, c, g, or t
  misc_feature (1638)..(1650): n is a, c, g, or t

SEQ ID NO: 21101 - DNA, 1606 bp, Homo Sapiens; identical to SEQ ID NO: 15451

SEQ ID NO: 21102 - DNA, 1403 bp, Homo Sapiens; identical to SEQ ID NO: 15452
  misc_feature (1087)..(1087): n is a, c, g, or t
  misc_feature (1164)..(1164): n is a, c, g, or t
  misc_feature (1185)..(1185): n is a, c, g, or t
  misc_feature (1304)..(1304): n is a, c, g, or t

SEQ ID NO: 21103 - DNA, 454 bp, Homo Sapiens; identical to SEQ ID NO: 15453

SEQ ID NO: 21104 - DNA, 917 bp, Homo Sapiens; identical to SEQ ID NO: 15454
  misc_feature (658)..(658): n is a, c, g, or t
  misc_feature (697)..(697): n is a, c, g, or t
  misc_feature (706)..(706): n is a, c, g, or t
  misc_feature (711)..(711): n is a, c, g, or t
  misc_feature (725)..(725): n is a, c, g, or t
  misc_feature (730)..(730): n is a, c, g, or t
  misc_feature (733)..(733): n is a, c, g, or t
  misc_feature (760)..(760): n is a, c, g, or t
  misc_feature (763)..(763): n is a, c, g, or t
  misc_feature (772)..(772): n is a, c, g, or t
  misc_feature (781)..(781): n is a, c, g, or t
  misc_feature (784)..(784): n is a, c, g, or t
  misc_feature (787)..(787): n is a, c, g, or t
  misc_feature (791)..(791): n is a, c, g, or t
  misc_feature (815)..(816): n is a, c, g, or t
  misc_feature (823)..(823): n is a, c, g, or t
  misc_feature (832)..(832): n is a, c, g, or t
  misc_feature (840)..(840): n is a, c, g, or t
  misc_feature (876)..(876): n is a, c, g, or t

SEQ ID NO: 21105 - DNA, 1005 bp, Homo Sapiens; identical to SEQ ID NO: 15455

SEQ ID NO: 21106 - DNA, 1566 bp, Homo Sapiens; identical to SEQ ID NO: 15456

SEQ ID NO: 21107 - DNA, 1429 bp, Homo Sapiens; identical to SEQ ID NO: 15457

SEQ ID NO: 21108 - DNA, 1027 bp, Homo Sapiens; identical to SEQ ID NO: 15458
  misc_feature (720)..(730): n is a, c, g, or t

SEQ ID NO: 21109 - DNA, 995 bp, Homo Sapiens; identical to SEQ ID NO: 15459
  misc_feature (699)..(699): n is a, c, g, or t

SEQ ID NO: 21110 - DNA, 357 bp, Homo Sapiens; identical to SEQ ID NO: 15460
  misc_feature (215)..(215): n is a, c, g, or t
  misc_feature (226)..(226): n is a, c, g, or t
  misc_feature (273)..(273): n is a, c, g, or t
  misc_feature (297)..(297): n is a, c, g, or t
  misc_feature (299)..(299): n is a, c, g, or t
  misc_feature (322)..(322): n is a, c, g, or t
  misc_feature (329)..(329): n is a, c, g, or t
  misc_feature (340)..(340): n is a, c, g, or t

SEQ ID NO: 21111 - DNA, 723 bp, Homo Sapiens; identical to SEQ ID NO: 15461
  misc_feature (44)..(44): n is a, c, g, or t
  misc_feature (129)..(130): n is a, c, g, or t

SEQ ID NO: 21112 - DNA, 908 bp, Homo Sapiens; identical to SEQ ID NO: 15462

SEQ ID NO: 21113 - DNA, 595 bp, Homo Sapiens; identical to SEQ ID NO: 15463

SEQ ID NO: 21114 - DNA, 600 bp, Homo Sapiens; identical to SEQ ID NO: 15464

SEQ ID NO: 21115 - DNA, 672 bp, Homo Sapiens; identical to SEQ ID NO: 15465

SEQ ID NO: 21116 - DNA, 650 bp, Homo Sapiens; identical to SEQ ID NO: 15466

SEQ ID NO: 21117 - DNA, 938 bp, Homo Sapiens; identical to SEQ ID NO: 15467

SEQ ID NO: 21118 - DNA, 405 bp, Homo Sapiens; identical to SEQ ID NO: 15468

SEQ ID NO: 21119 - DNA, 389 bp, Homo Sapiens; identical to SEQ ID NO: 15469

SEQ ID NO: 21120 - DNA, 1002 bp, Homo Sapiens; identical to SEQ ID NO: 15470
  misc_feature (807)..(816): n is a, c, g, or t
  misc_feature (818)..(835): n is a, c, g, or t
  misc_feature (927)..(927): n is a, c, g, or t

SEQ ID NO: 21121 - DNA, 428 bp, Homo Sapiens; identical to SEQ ID NO: 15471

SEQ ID NO: 21122 - DNA, 844 bp, Homo Sapiens; identical to SEQ ID NO: 15472
  misc_feature (699)..(708): n is a, c, g, or t

SEQ ID NO: 21123 - DNA, 606 bp, Homo Sapiens; identical to SEQ ID NO: 15473

SEQ ID NO: 21124 - DNA, 1059 bp, Homo Sapiens; identical to SEQ ID NO: 15474
  misc_feature (536)..(548): n is a, c, g, or t
  misc_feature (561)..(646): n is a, c, g, or t
  misc_feature (653)..(653): n is a, c, g, or t
  misc_feature (783)..(791): n is a, c, g, or t

SEQ ID NO: 21125 - DNA, 525 bp, Homo Sapiens; identical to SEQ ID NO: 15475
  misc_feature (442)..(442): n is a, c, g, or t
  misc_feature (470)..(470): n is a, c, g, or t

SEQ ID NO: 21126 - DNA, 984 bp, Homo Sapiens; identical to SEQ ID NO: 15476

SEQ ID NO: 21127 - DNA, 490 bp, Homo Sapiens; identical to SEQ ID NO: 15477
  misc_feature (337)..(345): n is a, c, g, or t

SEQ ID NO: 21128 - DNA, 627 bp, Homo Sapiens; identical to SEQ ID NO: 15478

SEQ ID NO: 21129 - DNA, 800 bp, Homo Sapiens; identical to SEQ ID NO: 15479
  misc_feature (330)..(357): n is a, c, g, or t

SEQ ID NO: 21130 - DNA, 601 bp, Homo Sapiens; identical to SEQ ID NO: 15480

SEQ ID NO: 21131 - DNA, 1197 bp, Homo Sapiens; identical to SEQ ID NO: 15481

SEQ ID NO: 21132 - DNA, 458 bp, Homo Sapiens; identical to SEQ ID NO: 15482
  misc_feature (130)..(130): n is a, c, g, or t

SEQ ID NO: 21133 - DNA, 1684 bp, Homo Sapiens; identical to SEQ ID NO: 15483
  misc_feature (744)..(753): n is a, c, g, or t
  misc_feature (829)..(910): n is a, c, g, or t
  misc_feature (974)..(998): n is a, c, g, or t
  misc_feature (1009)..(1025): n is a, c, g, or t
  misc_feature (1112)..(1120): n is a, c, g, or t
  misc_feature (1154)..(1164): n is a, c, g, or t
  misc_feature (1294)..(1343): n is a, c, g, or t
  misc_feature (1491)..(1512): n is a, c, g, or t
  misc_feature (1561)..(1561): n is a, c, g, or t

SEQ ID NO: 21134 - DNA, 873 bp, Homo Sapiens; identical to SEQ ID NO: 15484
  misc_feature (14)..(14): n is a, c, g, or t
  misc_feature (470)..(479): n is a, c, g, or t
  misc_feature (555)..(651): n is a, c, g, or t
  misc_feature (653)..(733): n is a, c, g, or t
  misc_feature (735)..(740): n is a, c, g, or t
  misc_feature (743)..(743): n is a, c, g, or t
  misc_feature (748)..(750): n is a, c, g, or t
  misc_feature (752)..(755): n is a, c, g, or t
  misc_feature (760)..(768): n is a, c, g, or t
  misc_feature (785)..(785): n is a, c, g, or t

SEQ ID NO: 21135 - DNA, 721 bp, Homo Sapiens; identical to SEQ ID NO: 15485

SEQ ID NO: 21136 - DNA, 839 bp, Homo Sapiens; identical to SEQ ID NO: 15486
  misc_feature (271)..(271): n is a, c, g, or t

SEQ ID NO: 21137 - DNA, 385 bp, Homo Sapiens; identical to SEQ ID NO: 15487

SEQ ID NO: 21138 - DNA, 1341 bp, Homo Sapiens; identical to SEQ ID NO: 15488

SEQ ID NO: 21139 - DNA, 1037 bp, Homo Sapiens; identical to SEQ ID NO: 15489

SEQ ID NO: 21140 - DNA, 1176 bp, Homo Sapiens; identical to SEQ ID NO: 15490

SEQ ID NO: 21141 - DNA, 1364 bp, Homo Sapiens; identical to SEQ ID NO: 15491

SEQ ID NO: 21142 - DNA, 770 bp, Homo Sapiens; identical to SEQ ID NO: 15492
  misc_feature (695)..(719): n is a, c, g, or t

SEQ ID NO: 21143 - DNA, 1192 bp, Homo Sapiens; identical to SEQ ID NO: 15493

SEQ ID NO: 21144 - DNA, 1061 bp, Homo Sapiens; identical to SEQ ID NO: 15494

SEQ ID NO: 21145 - DNA, 797 bp, Homo Sapiens; identical to SEQ ID NO: 15495
  misc_feature (740)..(740): n is a, c, g, or t

SEQ ID NO: 21146 - DNA, 979 bp, Homo Sapiens; identical to SEQ ID NO: 15496

SEQ ID NO: 21147 - DNA, 663 bp, Homo Sapiens; identical to SEQ ID NO: 15497

SEQ ID NO: 21148 - DNA, 1849 bp, Homo Sapiens; identical to SEQ ID NO: 15498
  misc_feature (43)..(106): n is a, c, g, or t
  misc_feature (1565)..(1578): n is a, c, g, or t
  misc_feature (1699)..(1785): n is a, c, g, or t

SEQ ID NO: 21149 - DNA, 732 bp, Homo Sapiens; identical to SEQ ID NO: 15499

SEQ ID NO: 21150 - DNA, 1330 bp, Homo Sapiens; identical to SEQ ID NO: 15500
  misc_feature (1020)..(1261): n is a, c, g, or t

SEQ ID NO: 21151 - DNA, 1862 bp, Homo Sapiens; identical to SEQ ID NO: 15501
  misc_feature (68)..(68): n is a, c, g, or t
  misc_feature (72)..(72): n is a, c, g, or t
  misc_feature (126)..(126): n is a, c, g, or t
  misc_feature (158)..(158): n is a, c, g, or t

SEQ ID NO: 21152 - DNA, 1185 bp, Homo Sapiens; identical to SEQ ID NO: 15502

SEQ ID NO: 21153 - DNA, 468 bp, Homo Sapiens; identical to SEQ ID NO: 15503

SEQ ID NO: 21154 - DNA, 1181 bp, Homo Sapiens; identical to SEQ ID NO: 15504
  misc_feature (53)..(84): n is a, c, g, or t
  misc_feature (159)..(172): n is a, c, g, or t
  misc_feature (586)..(594): n is a, c, g, or t
  misc_feature (610)..(610): n is a, c, g, or t
  misc_feature (823)..(882): n is a, c, g, or t

SEQ ID NO: 21155 - DNA, 1477 bp, Homo Sapiens; identical to SEQ ID NO: 15505
  misc_feature (1083)..(1210): n is a, c, g, or t
  misc_feature (1222)..(1237): n is a, c, g, or t
  misc_feature (1284)..(1332): n is a, c, g, or t
  misc_feature (1414)..(1415): n is a, c, g, or t
  misc_feature (1420)..(1420): n is a, c, g, or t

SEQ ID NO: 21156 - DNA, 1054 bp, Homo Sapiens; identical to SEQ ID NO: 15506
  misc_feature (51)..(51): n is a, c, g, or t

SEQ ID NO: 21157 - DNA, 835 bp, Homo Sapiens; identical to SEQ ID NO: 15507
  misc_feature (91)..(91): n is a, c, g, or t

SEQ ID NO: 21158 - DNA, 1417 bp, Homo Sapiens; identical to SEQ ID NO: 15508
  misc_feature (1356)..(1356): n is a, c, g, or t

SEQ ID NO: 21159 - DNA, 788 bp, Homo Sapiens; identical to SEQ ID NO: 15509

SEQ ID NO: 21160 - DNA, 438 bp, Homo Sapiens; identical to SEQ ID NO: 15510

SEQ ID NO: 21161 - DNA, 1115 bp, Homo Sapiens; identical to SEQ ID NO: 15511

SEQ ID NO: 21162 - DNA, 1704 bp, Homo Sapiens; identical to SEQ ID NO: 15512

SEQ ID NO: 21163 - DNA, 1245 bp, Homo Sapiens; identical to SEQ ID NO: 15513
  misc_feature (38)..(38): n is a, c, g, or t
  misc_feature (47)..(47): n is a, c, g, or t
  misc_feature (1114)..(1115): n is a, c, g, or t

SEQ ID NO: 21164 - DNA, 451 bp, Homo Sapiens; identical to SEQ ID NO: 15514
  misc_feature (46)..(46): n is a, c, g, or t
  misc_feature (52)..(52): n is a, c, g, or t
  misc_feature (116)..(116): n is a, c, g, or t

SEQ ID NO: 21165 - DNA, 800 bp, Homo Sapiens; identical to SEQ ID NO: 15515
  misc_feature (579)..(579): n is a, c, g, or t
  misc_feature (582)..(582): n is a, c, g, or t
  misc_feature (586)..(639): n is a, c, g, or t
  misc_feature (647)..(647): n is a, c, g, or t

SEQ ID NO: 21166 - DNA, 433 bp, Homo Sapiens; identical to SEQ ID NO: 15516

SEQ ID NO: 21167 - DNA, 617 bp, Homo Sapiens; identical to SEQ ID NO: 15517

SEQ ID NO: 21168 - DNA, 1265 bp, Homo Sapiens; identical to SEQ ID NO: 15518
  misc_feature (244)..(253): n is a, c, g, or t
  misc_feature (359)..(379): n is a, c, g, or t

SEQ ID NO: 21169 - DNA, 919 bp, Homo Sapiens; identical to SEQ ID NO: 15519
  misc_feature (97)..(138): n is a, c, g, or t

SEQ ID NO: 21170 - DNA, 927 bp, Homo Sapiens; identical to SEQ ID NO: 15520
  misc_feature (641)..(696): n is a, c, g, or t
  misc_feature (712)..(712): n is a, c, g, or t
  misc_feature (800)..(800): n is a, c, g, or t
  misc_feature (873)..(873): n is a, c, g, or t
  misc_feature (887)..(887): n is a, c, g, or t

SEQ ID NO: 21171 - DNA, 802 bp, Homo Sapiens; identical to SEQ ID NO: 15521
  misc_feature (232)..(258): n is a, c, g, or t

SEQ ID NO: 21172 - DNA, 1311 bp, Homo Sapiens; identical to SEQ ID NO: 15522
  misc_feature (95)..(362): n is a, c, g, or t

SEQ ID NO: 21173 - DNA, 1087 bp, Homo Sapiens; identical to SEQ ID NO: 15523
  misc_feature (151)..(418): n is a, c, g, or t

SEQ ID NO: 21174 - DNA, 655 bp, Homo Sapiens; identical to SEQ ID NO: 15524
  misc_feature (421)..(477): n is a, c, g, or t

SEQ ID NO: 21175 - DNA, 1433 bp, Homo Sapiens; identical to SEQ ID NO: 15525
  misc_feature (45)..(45): n is a, c, g, or t
  misc_feature (58)..(58): n is a, c, g, or t
  misc_feature (109)..(109): n is a, c, g, or t
  misc_feature (135)..(135): n is a, c, g, or t
  misc_feature (178)..(178): n is a, c, g, or t
  misc_feature (185)..(185): n is a, c, g, or t
  misc_feature (201)..(201): n is a, c, g, or t
  misc_feature (253)..(253): n is a, c, g, or t
  misc_feature (263)..(263): n is a, c, g, or t

SEQ ID NO: 21176 - DNA, 403 bp, Homo Sapiens; identical to SEQ ID NO: 15526

SEQ ID NO: 21177 - DNA, 933 bp, Homo Sapiens; identical to SEQ ID NO: 15527
  misc_feature (155)..(155): n is a, c, g, or t
  misc_feature (255)..(282): n is a, c, g, or t
  misc_feature (525)..(540): n is a, c, g, or t

SEQ ID NO: 21178 - DNA, 729 bp, Homo Sapiens; identical to SEQ ID NO: 15528
  misc_feature (186)..(213): n is a, c, g, or t

SEQ ID NO: 21179 - DNA, 923 bp, Homo Sapiens; identical to SEQ ID NO: 15529
  misc_feature (111)..(111): n is a, c, g, or t
  misc_feature (114)..(115): n is a, c, g, or t
  misc_feature (121)..(121): n is a, c, g, or t
  misc_feature (125)..(125): n is a, c, g, or t
  misc_feature (138)..(139): n is a, c, g, or t
  misc_feature (145)..(146): n is a, c, g, or t
  misc_feature (155)..(155): n is a, c, g, or t
  misc_feature (217)..(264): n is a, c, g, or t

SEQ ID NO: 21180 - DNA, 1578 bp, Homo Sapiens; identical to SEQ ID NO: 15530

SEQ ID NO: 21181 - DNA, 1194 bp, Homo Sapiens; identical to SEQ ID NO: 15531
  misc_feature (298)..(315): n is a, c, g, or t
  misc_feature (317)..(417): n is a, c, g, or t
  misc_feature (471)..(565): n is a, c, g, or t
  misc_feature (1083)..(1083): n is a, c, g, or t

SEQ ID NO: 21182 - DNA, 601 bp, Homo Sapiens; identical to SEQ ID NO: 15532

SEQ ID NO: 21183 - DNA, 864 bp, Homo Sapiens; identical to SEQ ID NO: 15533
  misc_feature (638)..(638): n is a, c, g, or t
  misc_feature (772)..(772): n is a, c, g, or t
  misc_feature (778)..(778): n is a, c, g, or t

SEQ ID NO: 21184 - DNA, 415 bp, Homo Sapiens; identical to SEQ ID NO: 15534

SEQ ID NO: 21185 - DNA, 650 bp, Homo Sapiens; identical to SEQ ID NO: 15535

SEQ ID NO: 21186 - DNA, 751 bp, Homo Sapiens; identical to SEQ ID NO: 15536
  misc_feature (683)..(683): n is a, c, g, or t

SEQ ID NO: 21187 - DNA, 227 bp, Homo Sapiens; identical to SEQ ID NO: 15537

SEQ ID NO: 21188 - DNA, 459 bp, Homo Sapiens; identical to SEQ ID NO: 15538
  misc_feature (306)..(355): n is a, c, g, or t
  misc_feature (424)..(424): n is a, c, g, or t
  misc_feature (430)..(430): n is a, c, g, or t

SEQ ID NO: 21189 - DNA, 661 bp, Homo Sapiens; identical to SEQ ID NO: 15539
  misc_feature (401)..(445): n is a, c, g, or t

SEQ ID NO: 21190 - DNA, 1108 bp, Homo Sapiens; identical to SEQ ID NO: 15540
  misc_feature (600)..(600): n is a, c, g, or t

SEQ ID NO: 21191 - DNA, 1010 bp, Homo Sapiens; identical to SEQ ID NO: 15541
  misc_feature (407)..(407): n is a, c, g, or t

SEQ ID NO: 21192 - DNA, 793 bp, Homo Sapiens; identical to SEQ ID NO: 15542
  misc_feature (611)..(616): n is a, c, g, or t

SEQ ID NO: 21193 - DNA, 1363 bp, Homo Sapiens; identical to SEQ ID NO: 15543
  misc_feature (19)..(19): n is a, c, g, or t

SEQ ID NO: 21194 - DNA, 716 bp, Homo Sapiens; identical to SEQ ID NO: 15544
  misc_feature (473)..(482): n is a, c, g, or t
  misc_feature (485)..(485): n is a, c, g, or t
  misc_feature (488)..(491): n is a, c, g, or t
  misc_feature (495)..(553): n is a, c, g, or t
  misc_feature (626)..(626): n is a, c, g, or t

SEQ ID NO: 21195 - DNA, 1154 bp, Homo Sapiens; identical to SEQ ID NO: 15545

SEQ ID NO: 21196 - DNA, 589 bp, Homo Sapiens; identical to SEQ ID NO: 15546
  misc_feature (277)..(312): n is a, c, g, or t

SEQ ID NO: 21197 - DNA, 562 bp, Homo Sapiens; identical to SEQ ID NO: 15547

SEQ ID NO: 21198 - DNA, 831 bp, Homo Sapiens; identical to SEQ ID NO: 15548

SEQ ID NO: 21199 - DNA, 803 bp, Homo Sapiens; identical to SEQ ID NO: 15549
  misc_feature (87)..(87): n is a, c, g, or t

SEQ ID NO: 21200 - DNA, 773 bp, Homo Sapiens; identical to SEQ ID NO: 15550
  misc_feature (573)..(573): n is a, c, g, or t
  misc_feature (738)..(738): n is a, c, g, or t
  misc_feature (744)..(744): n is a, c, g, or t

SEQ ID NO: 21201 - DNA, 1406 bp, Homo Sapiens; identical to SEQ ID NO: 15551

SEQ ID NO: 21202 - DNA, 863 bp, Homo Sapiens; identical to SEQ ID NO: 15552
  misc_feature (96)..(131): n is a, c, g, or t

SEQ ID NO: 21203 - DNA, 811 bp, Homo Sapiens; identical to SEQ ID NO: 15553

SEQ ID NO: 21204 - DNA, 646 bp, Homo Sapiens; identical to SEQ ID NO: 15554

SEQ ID NO: 21205 - DNA, 1037 bp, Homo Sapiens; identical to SEQ ID NO: 15555

SEQ ID NO: 21206 - DNA, 898 bp, Homo Sapiens; identical to SEQ ID NO: 15556
  misc_feature (637)..(734): n is a, c, g, or t

SEQ ID NO: 21207 - DNA, 558 bp, Homo Sapiens; identical to SEQ ID NO: 15557

SEQ ID NO: 21208 - DNA, 821 bp, Homo Sapiens; identical to SEQ ID NO: 15558

SEQ ID NO: 21209 - DNA, 625 bp, Homo Sapiens; identical to SEQ ID NO: 15559
  misc_feature (514)..(514): n is a, c, g, or t
  misc_feature (570)..(570): n is a, c, g, or t
  misc_feature (583)..(583): n is a, c, g, or t
  misc_feature (587)..(587): n is a, c, g, or t
  misc_feature (597)..(597): n is a, c, g, or t
  misc_feature (612)..(612): n is a, c, g, or t

SEQ ID NO: 21210 - DNA, 515 bp, Homo Sapiens; identical to SEQ ID NO: 15560
  misc_feature (470)..(470): n is a, c, g, or t

SEQ ID NO: 21211 - DNA, 437 bp, Homo Sapiens; identical to SEQ ID NO: 15561

SEQ ID NO: 21212 - DNA, 1307 bp, Homo Sapiens; identical to SEQ ID NO: 15562

SEQ ID NO: 21213 - DNA, 877 bp, Homo Sapiens; identical to SEQ ID NO: 15563

SEQ ID NO: 21214 - DNA, 698 bp, Homo Sapiens; identical to SEQ ID NO: 15564
  misc_feature (106)..(210): n is a, c, g, or t

SEQ ID NO: 21215 - DNA, 1840 bp, Homo Sapiens; identical to SEQ ID NO: 15565

SEQ ID NO: 21216 - DNA, 737 bp, Homo Sapiens; identical to SEQ ID NO: 15566

SEQ ID NO: 21217 - DNA, 1012 bp, Homo Sapiens; identical to SEQ ID NO: 15567

SEQ ID NO: 21218 - DNA, 1568 bp, Homo Sapiens; identical to SEQ ID NO: 15568

SEQ ID NO: 21219 - DNA, 1118 bp, Homo Sapiens; identical to SEQ ID NO: 15569

SEQ ID NO: 21220 - DNA, 1357 bp, Homo Sapiens; identical to SEQ ID NO: 15570

SEQ ID NO: 21221 - DNA, 1042 bp, Homo Sapiens; identical to SEQ ID NO: 15571

SEQ ID NO: 21222 - DNA, 642 bp, Homo Sapiens; identical to SEQ ID NO: 15572

SEQ ID NO: 21223 - DNA, 442 bp, Homo Sapiens; identical to SEQ ID NO: 15573

SEQ ID NO: 21224 - DNA, 524 bp, Homo Sapiens; identical to SEQ ID NO: 15574

SEQ ID NO: 21225 - DNA, 955 bp, Homo Sapiens; identical to SEQ ID NO: 15575

SEQ ID NO: 21226 - DNA, 1061 bp, Homo Sapiens; identical to SEQ ID NO: 15576
  misc_feature (64)..(108): n is a, c, g, or t

SEQ ID NO: 21227 - DNA, 571 bp, Homo Sapiens; identical to SEQ ID NO: 15577

SEQ ID NO: 21228 - DNA, 1572 bp, Homo Sapiens; identical to SEQ ID NO: 15578

SEQ ID NO: 21229 - DNA, 413 bp, Homo Sapiens; identical to SEQ ID NO: 15579

SEQ ID NO: 21230 - DNA, 304 bp, Homo Sapiens; identical to SEQ ID NO: 15580

SEQ ID NO: 21231 - DNA, 1110 bp, Homo Sapiens; identical to SEQ ID NO: 15581
  misc_feature (247)..(484): n is a, c, g, or t
  misc_feature (506)..(530): n is a, c, g, or t

SEQ ID NO: 21232 - DNA, 649 bp, Homo Sapiens; identical to SEQ ID NO: 15582

SEQ ID NO: 21233 - DNA, 1755 bp, Homo Sapiens; identical to SEQ ID NO: 15583
  misc_feature (177)..(181): n is a, c, g, or t
  misc_feature (183)..(183): n is a, c, g, or t
  misc_feature (185)..(187): n is a, c, g, or t
  misc_feature (189)..(245): n is a, c, g, or t
  misc_feature (248)..(248): n is a, c, g, or t
  misc_feature (250)..(250): n is a, c, g, or t
  misc_feature (252)..(255): n is a, c, g, or t
  misc_feature (258)..(279): n is a, c, g, or t

SEQ ID NO: 21234 - DNA, 342 bp, Homo Sapiens; identical to SEQ ID NO: 15584

SEQ ID NO: 21235 - DNA, 893 bp, Homo Sapiens; identical to SEQ ID NO: 15585

SEQ ID NO: 21236 - DNA, 921 bp, Homo Sapiens; identical to SEQ ID NO: 15586

SEQ ID NO: 21237 - DNA, 1065 bp, Homo Sapiens; identical to SEQ ID NO: 15587
  misc_feature (116)..(136): n is a, c, g, or t

SEQ ID NO: 21238 - DNA, 976 bp, Homo Sapiens; identical to SEQ ID NO: 15588
  misc_feature (343)..(343): n is a, c, g, or t
  misc_feature (769)..(816): n is a, c, g, or t
  misc_feature (823)..(832): n is a, c, g, or t
  misc_feature (966)..(966): n is a, c, g, or t

SEQ ID NO: 21239 - DNA, 541 bp, Homo Sapiens; identical to SEQ ID NO: 15589
  misc_feature (49)..(184): n is a, c, g, or t
  misc_feature (207)..(223): n is a, c, g, or t

SEQ ID NO: 21240 - DNA, 660 bp, Homo Sapiens; identical to SEQ ID NO: 15590

SEQ ID NO: 21241 - DNA, 1241 bp, Homo Sapiens; identical to SEQ ID NO: 15591
  misc_feature (251)..(251): n is a, c, g, or t
  misc_feature (333)..(333): n is a, c, g, or t

SEQ ID NO: 21242 - DNA, 853 bp, Homo Sapiens; identical to SEQ ID NO: 15592
  misc_feature (806)..(806): n is a, c, g, or t

SEQ ID NO: 21243 - DNA, 687 bp, Homo Sapiens; identical to SEQ ID NO: 15593

SEQ ID NO: 21244 - DNA, 850 bp, Homo Sapiens; identical to SEQ ID NO: 15594
  misc_feature (781)..(782): n is a, c, g, or t
  misc_feature (784)..(786): n is a, c, g, or t
  misc_feature (788)..(791): n is a, c, g, or t
  misc_feature (794)..(796): n is a, c, g, or t
  misc_feature (798)..(807): n is a, c, g, or t

SEQ ID NO: 21245 - DNA, 570 bp, Homo Sapiens; identical to SEQ ID NO: 15595

SEQ ID NO: 21246 - DNA, 831 bp, Homo Sapiens; identical to SEQ ID NO: 15596
  misc_feature (730)..(730): n is a, c, g, or t

SEQ ID NO: 21247 - DNA, 961 bp, Homo Sapiens; identical to SEQ ID NO: 15597

SEQ ID NO: 21248 - DNA, 814 bp, Homo Sapiens; identical to SEQ ID NO: 15598

SEQ ID NO: 21249 - DNA, 553 bp, Homo Sapiens; identical to SEQ ID NO: 15599

SEQ ID NO: 21250 - DNA, 1135 bp, Homo Sapiens; identical to SEQ ID NO: 15600
  misc_feature (363)..(403): n is a, c, g, or t

SEQ ID NO: 21251 - DNA, 953 bp, Homo Sapiens; identical to SEQ ID NO: 15601
  misc_feature (528)..(556): n is a, c, g, or t

SEQ ID NO: 21252 - DNA, 906 bp, Homo Sapiens; identical to SEQ ID NO: 15602
  misc_feature (727)..(727): n is a, c, g, or t

SEQ ID NO: 21253 - DNA, 665 bp, Homo Sapiens; identical to SEQ ID NO: 15603

SEQ ID NO: 21254 - DNA, 1272 bp, Homo Sapiens; identical to SEQ ID NO: 15604
  misc_feature (458)..(458): n is a, c, g, or t
  misc_feature (509)..(534): n is a, c, g, or t
  misc_feature (536)..(536): n is a, c, g, or t
  misc_feature (837)..(851): n is a, c, g, or t
  misc_feature (1046)..(1087): n is a, c, g, or t

SEQ ID NO: 21255 - DNA, 912 bp, Homo Sapiens; identical to SEQ ID NO: 15605
  misc_feature (55)..(112): n is a, c, g, or t
  misc_feature (135)..(135): n is a, c, g, or t

SEQ ID NO: 21256 - DNA, 593 bp, Homo Sapiens; identical to SEQ ID NO: 15606

SEQ ID NO: 21257 - DNA, 890 bp, Homo Sapiens; identical to SEQ ID NO: 15607

SEQ ID NO: 21258 - DNA, 2224 bp, Homo Sapiens; identical to SEQ ID NO: 15608

SEQ ID NO: 21259 - DNA, 918 bp, Homo Sapiens; identical to SEQ ID NO: 15609

SEQ ID NO: 21260 - DNA, 574 bp, Homo Sapiens; identical to SEQ ID NO: 15610
  misc_feature (65)..(127): n is a, c, g, or t

SEQ ID NO: 21261 - DNA, 350 bp, Homo Sapiens; identical to SEQ ID NO: 15611

SEQ ID NO: 21262 - DNA, 678 bp, Homo Sapiens; identical to SEQ ID NO: 15612
  misc_feature (66)..(221): n is a, c, g, or t

SEQ ID NO: 21263 - DNA, 2266 bp, Homo Sapiens; identical to SEQ ID NO: 15613
  misc_feature (652)..(663): n is a, c, g, or t
  misc_feature (1536)..(1600): n is a, c, g, or t
  misc_feature (1707)..(1717): n is a, c, g, or t

SEQ ID NO: 21264 - DNA, 529 bp, Homo Sapiens; identical to SEQ ID NO: 15614

SEQ ID NO: 21265 - DNA, 757 bp, Homo Sapiens; identical to SEQ ID NO: 15615
  misc_feature (45)..(45): n is a, c, g, or t

SEQ ID NO: 21266 - DNA, 715 bp, Homo Sapiens; identical to SEQ ID NO: 15616

SEQ ID NO: 21267 - DNA, 1012 bp, Homo Sapiens; identical to SEQ ID NO: 15617
  misc_feature (888)..(888): n is a, c, g, or t

SEQ ID NO: 21268 - DNA, 393 bp, Homo Sapiens; identical to SEQ ID NO: 15618

SEQ ID NO: 21269 - DNA, 1165 bp, Homo Sapiens; identical to SEQ ID NO: 15619

SEQ ID NO: 21270 - DNA, 419 bp, Homo Sapiens; identical to SEQ ID NO: 15620
  misc_feature (356)..(365): n is a, c, g, or t

SEQ ID NO: 21271 - DNA, 729 bp, Homo Sapiens; identical to SEQ ID NO: 15621

SEQ ID NO: 21272 - DNA, 848 bp, Homo Sapiens; identical to SEQ ID NO: 15622
  misc_feature (15)..(15): n is a, c, g, or t
  misc_feature (158)..(158): n is a, c, g, or t
  misc_feature (406)..(406): n is a, c, g, or t

SEQ ID NO: 21273 - DNA, 1017 bp, Homo Sapiens; identical to SEQ ID NO: 15623

SEQ ID NO: 21274 - DNA, 938 bp, Homo Sapiens; identical to SEQ ID NO: 15624
  misc_feature (119)..(119): n is a, c, g, or t

SEQ ID NO: 21275 - DNA, 873 bp, Homo Sapiens; identical to SEQ ID NO: 15625

SEQ ID NO: 21276 - DNA, 1303 bp, Homo Sapiens; identical to SEQ ID NO: 15626
  misc_feature (728)..(728): n is a, c, g, or t

SEQ ID NO: 21277 - DNA, 639 bp, Homo Sapiens; identical to SEQ ID NO: 15627
  misc_feature (84)..(84): n is a, c, g, or t
  misc_feature (92)..(92): n is a, c, g, or t
  misc_feature (201)..(201): n is a, c, g, or t
  misc_feature (207)..(207): n is a, c, g, or t

SEQ ID NO: 21278 - DNA, 617 bp, Homo Sapiens; identical to SEQ ID NO: 15628
  misc_feature (507)..(507): n is a, c, g, or t

SEQ ID NO: 21279 - DNA, 855 bp, Homo Sapiens; identical to SEQ ID NO: 15629
  misc_feature (732)..(732): n is a, c, g, or t

SEQ ID NO: 21280 - DNA, 679 bp, Homo Sapiens; identical to SEQ ID NO: 15630
  misc_feature (69)..(69): n is a, c, g, or t
  misc_feature (182)..(182): n is a, c, g, or t

SEQ ID NO: 21281 - DNA, 887 bp, Homo Sapiens; identical to SEQ ID NO: 15631

SEQ ID NO: 21282 - DNA, 1095 bp, Homo Sapiens; identical to SEQ ID NO: 15632

SEQ ID NO: 21283 - DNA, 1571 bp, Homo Sapiens; identical to SEQ ID NO: 15633

SEQ ID NO: 21284 - DNA, 368 bp, Homo Sapiens; identical to SEQ ID NO: 15634

SEQ ID NO: 21285 - DNA, 709 bp, Homo Sapiens; identical to SEQ ID NO: 15635

SEQ ID NO: 21286 - DNA, 876 bp, Homo Sapiens; identical to SEQ ID NO: 15636

SEQ ID NO: 21287 - DNA, 989 bp, Homo Sapiens; identical to SEQ ID NO: 15637
  misc_feature (863)..(911): n is a, c, g, or t

SEQ ID NO: 21288 - DNA, 1344 bp, Homo Sapiens; identical to SEQ ID NO: 15638
  misc_feature (1283)..(1283): n is a, c, g, or t

SEQ ID NO: 21289 - DNA, 821 bp, Homo Sapiens; identical to SEQ ID NO: 15639

SEQ ID NO: 21290 - DNA, 1045 bp, Homo Sapiens; identical to SEQ ID NO: 15640

SEQ ID NO: 21291 - DNA, 792 bp, Homo Sapiens; identical to SEQ ID NO: 15641

SEQ ID NO: 21292 - DNA, 701 bp, Homo Sapiens; identical to SEQ ID NO: 15642

SEQ ID NO: 21293 - DNA, 502 bp, Homo Sapiens; identical to SEQ ID NO: 15643

SEQ ID NO: 21294 - DNA, 1182 bp, Homo Sapiens; identical to SEQ ID NO: 15644

SEQ ID NO: 21295 - DNA, 503 bp, Homo Sapiens; identical to SEQ ID NO: 15645

SEQ ID NO: 21296 - DNA, 778 bp, Homo Sapiens; identical to SEQ ID NO: 15646

SEQ ID NO: 21297 - DNA, 1459 bp, Homo Sapiens; identical to SEQ ID NO: 15647
  misc_feature (914)..(968): n is a, c, g, or t

SEQ ID NO: 21298 - DNA, 481 bp, Homo Sapiens; identical to SEQ ID NO: 15648

SEQ ID NO: 21299 - DNA, 849 bp, Homo Sapiens; identical to SEQ ID NO: 15649
  misc_feature (524)..(573): n is a, c, g, or t

SEQ ID NO: 21300 - DNA, 427 bp, Homo Sapiens; identical to SEQ ID NO: 15650

SEQ ID NO: 21301 - DNA, 818 bp, Homo Sapiens; identical to SEQ ID NO: 15651
  misc_feature (738)..(771): n is a, c, g, or t

SEQ ID NO: 21302 - DNA, 588 bp, Homo Sapiens; identical to SEQ ID NO: 15652

SEQ ID NO: 21303 - DNA, 794 bp, Homo Sapiens; identical to SEQ ID NO: 15653

SEQ ID NO: 21304 - DNA, 492 bp, Homo Sapiens; identical to SEQ ID NO: 15654
  misc_feature (452)..(452): n is a, c, g, or t

SEQ ID NO: 21305 - DNA, 542 bp, Homo Sapiens; identical to SEQ ID NO: 15655

SEQ ID NO: 21306 - DNA, 836 bp, Homo Sapiens; identical to SEQ ID NO: 15656

SEQ ID NO: 21307 - DNA, 671 bp, Homo Sapiens; identical to SEQ ID NO: 15657

SEQ ID NO: 21308 - DNA, 594 bp, Homo Sapiens; identical to SEQ ID NO: 15658

SEQ ID NO: 21309 - DNA, 790 bp, Homo Sapiens; identical to SEQ ID NO: 15659

SEQ ID NO: 21310 - DNA, 468 bp, Homo Sapiens; identical to SEQ ID NO: 15660
  misc_feature (207)..(207): n is a, c, g, or t
  misc_feature (209)..(209): n is a, c, g, or t
  misc_feature (244)..(244): n is a, c, g, or t

SEQ ID NO: 21311 - DNA, 620 bp, Homo Sapiens; identical to SEQ ID NO: 15661

SEQ ID NO: 21312 - DNA, 650 bp, Homo Sapiens; identical to SEQ ID NO: 15662

SEQ ID NO: 21313 - DNA, 806 bp, Homo Sapiens; identical to SEQ ID NO: 15663

SEQ ID NO: 21314 - DNA, 639 bp, Homo Sapiens; identical to SEQ ID NO: 15664

SEQ ID NO: 21315 - DNA, 577 bp, Homo Sapiens; identical to SEQ ID NO: 15665
  misc_feature (35)..(35): n is a, c, g, or t
  misc_feature (40)..(40): n is a, c, g, or t
  misc_feature (87)..(87): n is a, c, g, or t
  misc_feature (92)..(92): n is a, c, g, or t
  misc_feature (123)..(123): n is a, c, g, or t
  misc_feature (137)..(137): n is a, c, g, or t

SEQ ID NO: 21316 - DNA, 415 bp, Homo Sapiens; identical to SEQ ID NO: 15666

SEQ ID NO: 21317 - DNA, 414 bp, Homo Sapiens; identical to SEQ ID NO: 15667

SEQ ID NO: 21318 - DNA, 676 bp, Homo Sapiens; identical to SEQ ID NO: 15668

SEQ ID NO: 21319 - DNA, 690 bp, Homo Sapiens; identical to SEQ ID NO: 15669
  misc_feature (13)..(13): n is a, c, g, or t
  misc_feature (71)..(71): n is a, c, g, or t

SEQ ID NO: 21320 - DNA, 854 bp, Homo Sapiens; identical to SEQ ID NO: 15670

SEQ ID NO: 21321 - DNA, 799 bp, Homo Sapiens; identical to SEQ ID NO: 15671
  misc_feature (48)..(48): n is a, c, g, or t
  misc_feature (469)..(524): n is a, c, g, or t
  misc_feature (730)..(730): n is a, c, g, or t

SEQ ID NO: 21322 - DNA, 424 bp, Homo Sapiens; identical to SEQ ID NO: 15672

SEQ ID NO: 21323 - DNA, 679 bp, Homo Sapiens; identical to SEQ ID NO: 15673

SEQ ID NO: 21324 - DNA, 824 bp, Homo Sapiens; identical to SEQ ID NO: 15674

SEQ ID NO: 21325 - DNA, 1234 bp, Homo Sapiens; identical to SEQ ID NO: 15675

SEQ ID NO: 21326 - DNA, 471 bp, Homo Sapiens; identical to SEQ ID NO: 15676

SEQ ID NO: 21327 - DNA, 420 bp, Homo Sapiens; identical to SEQ ID NO: 15677

SEQ ID NO: 21328 - DNA, 475 bp, Homo Sapiens; identical to SEQ ID NO: 15678

SEQ ID NO: 21329 - DNA, 721 bp, Homo Sapiens; identical to SEQ ID NO: 15679

SEQ ID NO: 21330 - DNA, 441 bp, Homo Sapiens; identical to SEQ ID NO: 15680

SEQ ID NO: 21331 - DNA, 534 bp, Homo Sapiens; identical to SEQ ID NO: 15681

SEQ ID NO: 21332 - DNA, 557 bp, Homo Sapiens; identical to SEQ ID NO: 15682

SEQ ID NO: 21333 - DNA, 458 bp, Homo Sapiens; identical to SEQ ID NO: 15683
  misc_feature (222)..(253): n is a, c, g, or t
  misc_feature (316)..(316): n is a, c, g, or t

SEQ ID NO: 21334 - DNA, 430 bp, Homo Sapiens; identical to SEQ ID NO: 15684

SEQ ID NO: 21335 - DNA, 686 bp, Homo Sapiens; identical to SEQ ID NO: 15685

SEQ ID NO: 21336 - DNA, 466 bp, Homo Sapiens; identical to SEQ ID NO: 15686

SEQ ID NO: 21337 - DNA, 661 bp, Homo Sapiens; identical to SEQ ID NO: 15687
  misc_feature (631)..(632): n is a, c, g, or t
  misc_feature (651)..(651): n is a, c, g, or t

SEQ ID NO: 21338 - DNA, 910 bp, Homo Sapiens; identical to SEQ ID NO: 15688

SEQ ID NO: 21339 - DNA, 495 bp, Homo Sapiens; identical to SEQ ID NO: 15689

SEQ ID NO: 21340 - DNA, 590 bp, Homo Sapiens; identical to SEQ ID NO: 15690
  misc_feature (552)..(552): n is a, c, g, or t

SEQ ID NO: 21341 - DNA, 541 bp, Homo Sapiens; identical to SEQ ID NO: 15691

SEQ ID NO: 21342 - DNA, 909 bp, Homo Sapiens; identical to SEQ ID NO: 15692
  misc_feature (414)..(414): n is a, c, g, or t

SEQ ID NO: 21343 - DNA, 653 bp, Homo Sapiens; identical to SEQ ID NO: 15693
  misc_feature (109)..(109): n is a, c, g, or t

SEQ ID NO: 21344 - DNA, 545 bp, Homo Sapiens; identical to SEQ ID NO: 15694

SEQ ID NO: 21345 - DNA, 1370 bp, Homo Sapiens; identical to SEQ ID NO: 15695

SEQ ID NO: 21346 - DNA, 573 bp, Homo Sapiens; identical to SEQ ID NO: 15696

SEQ ID NO: 21347 - DNA, 1839 bp, Homo Sapiens; identical to SEQ ID NO: 15697
  misc_feature (577)..(589): n is a, c, g, or t

SEQ ID NO: 21348 - DNA, 1248 bp, Homo Sapiens; identical to SEQ ID NO: 15698

SEQ ID NO: 21349 - DNA, 501 bp, Homo Sapiens; identical to SEQ ID NO: 15699

SEQ ID NO: 21350 - DNA, 498 bp, Homo Sapiens; identical to SEQ ID NO: 15700

SEQ ID NO: 21351 - DNA, 521 bp, Homo Sapiens; identical to SEQ ID NO: 15701

SEQ ID NO: 21352 - DNA, 456 bp, Homo Sapiens; identical to SEQ ID NO: 15702

SEQ ID NO: 21353 - DNA, 966 bp, Homo Sapiens; identical to SEQ ID NO: 15703

SEQ ID NO: 21354 - DNA, 634 bp, Homo Sapiens; identical to SEQ ID NO: 15704

SEQ ID NO: 21355 - DNA, 1076 bp, Homo Sapiens; identical to SEQ ID NO: 15705
  misc_feature (153)..(176): n is a, c, g, or t

SEQ ID NO: 21356 - DNA, 684 bp, Homo Sapiens; identical to SEQ ID NO: 15706
  misc_feature (603)..(603): n is a, c, g, or t

SEQ ID NO: 21357 - DNA, 316 bp, Homo Sapiens; identical to SEQ ID NO: 15707

SEQ ID NO: 21358 - DNA, 1826 bp, Homo Sapiens; identical to SEQ ID NO: 15708

SEQ ID NO: 21359 - DNA, 468 bp, Homo Sapiens; identical to SEQ ID NO: 15709
  misc_feature (107)..(107): n is a, c, g, or t

SEQ ID NO: 21360 - DNA, 1216 bp, Homo Sapiens; identical to SEQ ID NO: 15710

SEQ ID NO: 21361 - DNA, 915 bp, Homo Sapiens; identical to SEQ ID NO: 15711

SEQ ID NO: 21362 - DNA, 1086 bp, Homo Sapiens; identical to SEQ ID NO: 15712

SEQ ID NO: 21363 - DNA, 474 bp, Homo Sapiens; identical to SEQ ID NO: 15713

SEQ ID NO: 21364 - DNA, 1012 bp, Homo Sapiens; identical to SEQ ID NO: 15714
  misc_feature (58)..(58): n is a, c, g, or t
  misc_feature (114)..(114): n is a, c, g, or t
  misc_feature (728)..(728): n is a, c, g, or t
  misc_feature (733)..(733): n is a, c, g, or t
  misc_feature (849)..(849): n is a, c, g, or t

SEQ ID NO: 21365 - DNA, 606 bp, Homo Sapiens; identical to SEQ ID NO: 15715

SEQ ID NO: 21366 - DNA, 598 bp, Homo Sapiens; identical to SEQ ID NO: 15716

SEQ ID NO: 21367 - DNA, 833 bp, Homo Sapiens; identical to SEQ ID NO: 15717

SEQ ID NO: 21368 - DNA, 1019 bp, Homo Sapiens; identical to SEQ ID NO: 15718
  misc_feature (920)..(948): n is a, c, g, or t

SEQ ID NO: 21369 - DNA, 506 bp, Homo Sapiens; identical to SEQ ID NO: 15719
  misc_feature (409)..(438): n is a, c, g, or t

SEQ ID NO: 21370 - DNA, 1281 bp, Homo Sapiens; identical to SEQ ID NO: 15720
  misc_feature (338)..(370): n is a, c, g, or t
  misc_feature (1039)..(1039): n is a, c, g, or t
  misc_feature (1102)..(1102): n is a, c, g, or t

SEQ ID NO: 21371 - DNA, 694 bp, Homo Sapiens; identical to SEQ ID NO: 15721

SEQ ID NO: 21372 - DNA, 743 bp, Homo Sapiens; identical to SEQ ID NO: 15722

SEQ ID NO: 21373 - DNA, 743 bp, Homo Sapiens; identical to SEQ ID NO: 15722

SEQ ID NO: 21374 - DNA, 684 bp, Homo Sapiens; identical to SEQ ID NO: 15724

SEQ ID NO: 21375 - DNA, 810 bp, Homo Sapiens; identical to SEQ ID NO: 15725
  misc_feature (588)..(588): n is a, c, g, or t
  misc_feature (593)..(593): n is a, c, g, or t
  misc_feature (652)..(652): n is a, c, g, or t
  misc_feature (762)..(762): n is a, c, g, or t

SEQ ID NO: 21376 - DNA, 592 bp, Homo Sapiens; identical to SEQ ID NO: 15726

SEQ ID NO: 21377 - DNA, 1043 bp, Homo Sapiens; identical to SEQ ID NO: 15727

SEQ ID NO: 21378 - DNA, 674 bp, Homo Sapiens; identical to SEQ ID NO: 15728

SEQ ID NO: 21379 - DNA, 1202 bp, Homo Sapiens; identical to SEQ ID NO: 15729
  misc_feature (353)..(416): n is a, c, g, or t

SEQ ID NO: 21380 - DNA, 396 bp, Homo Sapiens; identical to SEQ ID NO: 15730

SEQ ID NO: 21381 - DNA, 581 bp, Homo Sapiens; identical to SEQ ID NO: 15731

SEQ ID NO: 21382 - DNA, 592 bp, Homo Sapiens; identical to SEQ ID NO: 15732

SEQ ID NO: 21383 - DNA, 860 bp, Homo Sapiens; identical to SEQ ID NO: 15733

SEQ ID NO: 21384 - DNA, 485 bp, Homo Sapiens; identical to SEQ ID NO: 15734

SEQ ID NO: 21385 - DNA, 556 bp, Homo Sapiens; identical to SEQ ID NO: 15735
  misc_feature (225)..(261): n is a, c, g, or t

SEQ ID NO: 21386 - DNA, 840 bp, Homo Sapiens; identical to SEQ ID NO: 15736

SEQ ID NO: 21387 - DNA, 751 bp, Homo Sapiens; identical to SEQ ID NO: 15737
  misc_feature (606)..(654): n is a, c, g, or t

SEQ ID NO: 21388 - DNA, 1193 bp, Homo Sapiens; identical to SEQ ID NO: 15738
  misc_feature (500)..(520): n is a, c, g, or t
  misc_feature (705)..(760): n is a, c, g, or t

SEQ ID NO: 21389 - DNA, 815 bp, Homo Sapiens; identical to SEQ ID NO: 15739

SEQ ID NO: 21390 - DNA, 699 bp, Homo Sapiens; identical to SEQ ID NO: 15740

SEQ ID NO: 21391 - DNA, 705 bp, Homo Sapiens; identical to SEQ ID NO: 15741

SEQ ID NO: 21392 - DNA, 1484 bp, Homo Sapiens; identical to SEQ ID NO: 15742

SEQ ID NO: 21393 - DNA, 734 bp, Homo Sapiens; identical to SEQ ID NO: 15743

SEQ ID NO: 21394 - DNA, 607 bp, Homo Sapiens; identical to SEQ ID NO: 15744
  misc_feature (42)..(42): n is a, c, g, or t

SEQ ID NO: 21395 - DNA, 1061 bp, Homo Sapiens; identical to SEQ ID NO: 15745

SEQ ID NO: 21396 - DNA, 497 bp, Homo Sapiens; identical to SEQ ID NO: 15746

SEQ ID NO: 21397 - DNA, 368 bp, Homo Sapiens; identical to SEQ ID NO: 15747

SEQ ID NO: 21398 - DNA, 448 bp, Homo Sapiens; identical to SEQ ID NO: 15748

SEQ ID NO: 21399 - DNA, 441 bp, Homo Sapiens; identical to SEQ ID NO: 15749
  misc_feature (332)..(332): n is a, c, g, or t
  misc_feature (396)..(396): n is a, c, g, or t
  misc_feature (422)..(422): n is a, c, g, or t

SEQ ID NO: 21400 - DNA, 357 bp, Homo Sapiens; identical to SEQ ID NO: 15750

SEQ ID NO: 21401 - DNA, 1089 bp, Homo Sapiens; identical to SEQ ID NO: 15751

SEQ ID NO: 21402 - DNA, 2729 bp, Homo Sapiens; identical to SEQ ID NO: 15752
  misc_feature (493)..(522): n is a, c, g, or t
  misc_feature (914)..(926): n is a, c, g, or t
  misc_feature (2442)..(2442): n is a, c, g, or t

SEQ ID NO: 21403 - DNA, 463 bp, Homo Sapiens; identical to SEQ ID NO: 15753
  misc_feature (220)..(270): n is a, c, g, or t

SEQ ID NO: 21404 - DNA, 456 bp, Homo Sapiens; identical to SEQ ID NO: 15754

SEQ ID NO: 21405 - DNA, 1581 bp, Homo Sapiens; identical to SEQ ID NO: 15755
  misc_feature (132)..(183): n is a, c, g, or t

SEQ ID NO: 21406 - DNA, 1617 bp, Homo Sapiens; identical to SEQ ID NO: 15756
  misc_feature (1541)..(1541): n is a, c, g, or t
  misc_feature (1569)..(1569): n is a, c, g, or t
  misc_feature (1579)..(1579): n is a, c, g, or t

SEQ ID NO: 21407 - DNA, 793 bp, Homo Sapiens; identical to SEQ ID NO: 15757

SEQ ID NO: 21408 - DNA, 413 bp, Homo Sapiens; identical to SEQ ID NO: 15758
  misc_feature (276)..(294): n is a, c, g, or t

SEQ ID NO: 21409 - DNA, 612 bp, Homo Sapiens; identical to SEQ ID NO: 15759

SEQ ID NO: 21410 - DNA, 1672 bp, Homo Sapiens; identical to SEQ ID NO: 15760
  misc_feature (1513)..(1554): n is a, c, g, or t

SEQ ID NO: 21411 - DNA, 942 bp, Homo Sapiens; identical to SEQ ID NO: 15761
  misc_feature (584)..(584): n is a, c, g, or t
  misc_feature (778)..(819): n is a, c, g, or t

SEQ ID NO: 21412 - DNA, 490 bp, Homo Sapiens; identical to SEQ ID NO: 15762

SEQ ID NO: 21413 - DNA, 2319 bp, Homo Sapiens; identical to SEQ ID NO: 15763

SEQ ID NO: 21414 - DNA, 664 bp, Homo Sapiens; identical to SEQ ID NO: 15764

SEQ ID NO: 21415 - DNA, 727 bp, Homo Sapiens; identical to SEQ ID NO: 15765
  misc_feature (79)..(79): n is a, c, g, or t

SEQ ID NO: 21416 - DNA, 854 bp, Homo Sapiens; identical to SEQ ID NO: 15766

SEQ ID NO: 21417 - DNA, 1374 bp, Homo Sapiens; identical to SEQ ID NO: 15767

SEQ ID NO: 21418 - DNA, 368 bp, Homo Sapiens; identical to SEQ ID NO: 15768

SEQ ID NO: 21419 - DNA, 777 bp, Homo Sapiens; identical to SEQ ID NO: 15769
  misc_feature (572)..(573): n is a, c, g, or t
  misc_feature (640)..(655): n is a, c, g, or t

SEQ ID NO: 21420 - DNA, 1067 bp, Homo Sapiens; identical to SEQ ID NO: 15770

SEQ ID NO: 21421 - DNA, 960 bp, Homo Sapiens; identical to SEQ ID NO: 15771

SEQ ID NO: 21422 - DNA, 700 bp, Homo Sapiens; identical to SEQ ID NO: 15772

SEQ ID NO: 21423 - DNA, 684 bp, Homo Sapiens; identical to SEQ ID NO: 15773

SEQ ID NO: 21424 - DNA, 1138 bp, Homo Sapiens; identical to SEQ ID NO: 15774

SEQ ID NO: 21425 - DNA, 432 bp, Homo Sapiens; identical to SEQ ID NO: 15775

SEQ ID NO: 21426 - DNA, 411 bp, Homo Sapiens; identical to SEQ ID NO: 15776

SEQ ID NO: 21427 - DNA, 1006 bp, Homo Sapiens; identical to SEQ ID NO: 15777
  misc_feature (811)..(846): n is a, c, g, or t

SEQ ID NO: 21428 - DNA, 1463 bp, Homo Sapiens; identical to SEQ ID NO: 15778

SEQ ID NO: 21429 - DNA, 400 bp, Homo Sapiens; identical to SEQ ID NO: 15779

SEQ ID NO: 21430 - DNA, 311 bp, Homo Sapiens; identical to SEQ ID NO: 15780

SEQ ID NO: 21431 - DNA, 530 bp, Homo Sapiens; identical to SEQ ID NO: 15781

SEQ ID NO: 21432 - DNA, 879 bp, Homo Sapiens; identical to SEQ ID NO: 15782

SEQ ID NO: 21433 - DNA, 943 bp, Homo Sapiens; identical to SEQ ID NO: 15783

SEQ ID NO: 21434 - DNA, 330 bp, Homo Sapiens; identical to SEQ ID NO: 15784

SEQ ID NO: 21435 - DNA, 479 bp, Homo Sapiens; identical to SEQ ID NO: 15785

SEQ ID NO: 21436 - DNA, 1083 bp, Homo Sapiens; identical to SEQ ID NO: 15786

SEQ ID NO: 21437 - DNA, 586 bp, Homo Sapiens; identical to SEQ ID NO: 15787

SEQ ID NO: 21438 - DNA, 695 bp, Homo Sapiens; identical to SEQ ID NO: 15788

SEQ ID NO: 21439 - DNA, 1169 bp, Homo Sapiens; identical to SEQ ID NO: 15789

SEQ ID NO: 21440 - DNA, 1940 bp, Homo Sapiens; identical to SEQ ID NO: 15790

SEQ ID NO: 21441 - DNA, 1521 bp, Homo Sapiens; identical to SEQ ID NO: 15791
  misc_feature (54)..(54): n is a, c, g, or t
  misc_feature (61)..(61): n is a, c, g, or t

SEQ ID NO: 21442 - DNA, 1030 bp, Homo Sapiens; identical to SEQ ID NO: 15792

SEQ ID NO: 21443 - DNA, 527 bp, Homo Sapiens; identical to SEQ ID NO: 15793

SEQ ID NO: 21444 - DNA, 416 bp, Homo Sapiens; identical to SEQ ID NO: 15794

SEQ ID NO: 21445 - DNA, 525 bp, Homo Sapiens; identical to SEQ ID NO: 15795

SEQ ID NO: 21446 - DNA, 593 bp, Homo Sapiens; identical to SEQ ID NO: 15796
  misc_feature (31)..(31): n is a, c, g, or t
  misc_feature (169)..(169): n is a, c, g, or t
  misc_feature (188)..(188): n is a, c, g, or t
  misc_feature (192)..(192): n is a, c, g, or t
  misc_feature (511)..(511): n is a, c, g, or t

SEQ ID NO: 21447 - DNA, 1589 bp, Homo Sapiens; identical to SEQ ID NO: 15797

SEQ ID NO: 21448 - DNA, 373 bp, Homo Sapiens; identical to SEQ ID NO: 15798
  misc_feature (99)..(99): n is a, c, g, or t

SEQ ID NO: 21449 - DNA, 625 bp, Homo Sapiens; identical to SEQ ID NO: 15799

SEQ ID NO: 21450 - DNA, 473 bp, Homo Sapiens; identical to SEQ ID NO: 15800

SEQ ID NO: 21451 - DNA, 941 bp, Homo Sapiens; identical to SEQ ID NO: 15801

SEQ ID NO: 21452 - DNA, 1260 bp, Homo Sapiens; identical to SEQ ID NO: 15802
  misc_feature (710)..(860): n is a, c, g, or t
  misc_feature (869)..(882): n is a, c, g, or t
  misc_feature (896)..(1019): n is a, c, g, or t
  misc_feature (1024)..(1086): n is a, c, g, or t
  misc_feature (1103)..(1111): n is a, c, g, or t

SEQ ID NO: 21453 - DNA, 1267 bp, Homo Sapiens; identical to SEQ ID NO: 15803

SEQ ID NO: 21454 - DNA, 1004 bp, Homo Sapiens; identical to SEQ ID NO: 15804

SEQ ID NO: 21455 - DNA, 661 bp, Homo Sapiens; identical to SEQ ID NO: 15805

SEQ ID NO: 21456 - DNA, 664 bp, Homo Sapiens; identical to SEQ ID NO: 15806
  misc_feature (73)..(73): n is a, c, g, or t
  misc_feature (380)..(412): n is a, c, g, or t

SEQ ID NO: 21457 - DNA, 893 bp, Homo Sapiens; identical to SEQ ID NO: 15807
  misc_feature (859)..(859): n is a, c, g, or t

SEQ ID NO: 21458 - DNA, 925 bp, Homo Sapiens; identical to SEQ ID NO: 15808

SEQ ID NO: 21459 - DNA, 1188 bp, Homo Sapiens; identical to SEQ ID NO: 15809
  misc_feature (103)..(113): n is a, c, g, or t
  misc_feature (168)..(220): n is a, c, g, or t
  misc_feature (319)..(337): n is a, c, g, or t
  misc_feature (544)..(558): n is a, c, g, or t
  misc_feature (734)..(776): n is a, c, g, or t
  misc_feature (801)..(917): n is a, c, g, or t

SEQ ID NO: 21460 - DNA, 1032 bp, Homo Sapiens; identical to SEQ ID NO: 15810
  misc_feature (890)..(915): n is a, c, g, or t

SEQ ID NO: 21461 - DNA, 995 bp, Homo Sapiens; identical to SEQ ID NO: 15811
  misc_feature (249)..(420): n is a, c, g, or t

SEQ ID NO: 21462 - DNA, 634 bp, Homo Sapiens; identical to SEQ ID NO: 15812
  misc_feature (66)..(103): n is a, c, g, or t
  misc_feature (185)..(256): n is a, c, g, or t
  misc_feature (285)..(285): n is a, c, g, or t
  misc_feature (289)..(289): n is a, c, g, or t
  misc_feature (291)..(295): n is a, c, g, or t
  misc_feature (403)..(468): n is a, c, g, or t

SEQ ID NO: 21463 - DNA, 1089 bp, Homo Sapiens; identical to SEQ ID NO: 15813
  misc_feature (972)..(1027): n is a, c, g, or t

SEQ ID NO: 21464 - DNA, 1119 bp, Homo Sapiens; identical to SEQ ID NO: 15814

SEQ ID NO: 21465 - DNA, 563 bp, Homo Sapiens; identical to SEQ ID NO: 15815

SEQ ID NO: 21466 - DNA, 591 bp, Homo Sapiens; identical to SEQ ID NO: 15816

SEQ ID NO: 21467 - DNA, 447 bp, Homo Sapiens; identical to SEQ ID NO: 15817

SEQ ID NO: 21468 - DNA, 514 bp, Homo Sapiens; identical to SEQ ID NO: 15818

SEQ ID NO: 21469 - DNA, 873 bp, Homo Sapiens; identical to SEQ ID NO: 15819

SEQ ID NO: 21470 - DNA, 603 bp, Homo Sapiens; identical to SEQ ID NO: 15820

SEQ ID NO: 21471 - DNA, 464 bp, Homo Sapiens; identical to SEQ ID NO: 15821

SEQ ID NO: 21472 - DNA, 363 bp, Homo Sapiens; identical to SEQ ID NO: 15822

SEQ ID NO: 21473 - DNA, 859 bp, Homo Sapiens; identical to SEQ ID NO: 15823

SEQ ID NO: 21474 - DNA, 1412 bp, Homo Sapiens; identical to SEQ ID NO: 15824

SEQ ID NO: 21475 - DNA, 299 bp, Homo Sapiens; identical to SEQ ID NO: 15825

SEQ ID NO: 21476 - DNA, 1275 bp, Homo Sapiens; identical to SEQ ID NO: 15826
  misc_feature (32)..(32): n is a, c, g, or t

SEQ ID NO: 21477 - DNA, 454 bp, Homo Sapiens; identical to SEQ ID NO: 15827
  misc_feature (154)..(154): n is a, c, g, or t

SEQ ID NO: 21478 - DNA, 775 bp, Homo Sapiens; identical to SEQ ID NO: 15828

SEQ ID NO: 21479 - DNA, 1044 bp, Homo Sapiens; identical to SEQ ID NO: 15829

SEQ ID NO: 21480 - DNA, 661 bp, Homo Sapiens; identical to SEQ ID NO: 15830
  misc_feature (129)..(149): n is a, c, g, or t
  misc_feature (396)..(411): n is a, c, g, or t

SEQ ID NO: 21481 - DNA, 584 bp, Homo Sapiens; identical to SEQ ID NO: 15831

SEQ ID NO: 21482 - DNA, 922 bp, Homo Sapiens; identical to SEQ ID NO: 15832
  misc_feature (172)..(172): n is a, c, g, or t

SEQ ID NO: 21483 - DNA, 521 bp, Homo Sapiens; identical to SEQ ID NO: 15833

SEQ ID NO: 21484 - DNA, 903 bp, Homo Sapiens; identical to SEQ ID NO: 15834
  misc_feature (601)..(610): n is a, c, g, or t
  misc_feature (624)..(624): n is a, c, g, or t

SEQ ID NO: 21485 - DNA, 947 bp, Homo Sapiens; identical to SEQ ID NO: 15835

SEQ ID NO: 21486 - DNA, 519 bp, Homo Sapiens; identical to SEQ ID NO: 15836

SEQ ID NO: 21487 - DNA, 831 bp, Homo Sapiens; identical to SEQ ID NO: 15837
  misc_feature (596)..(692): n is a, c, g, or t

SEQ ID NO: 21488 - DNA, 409 bp, Homo Sapiens; identical to SEQ ID NO: 15838

SEQ ID NO: 21489 - DNA, 761 bp, Homo Sapiens; identical to SEQ ID NO: 15839

SEQ ID NO: 21490 - DNA, 603 bp, Homo Sapiens; identical to SEQ ID NO: 15840
  misc_feature (540)..(540): n is a, c, g, or t
  misc_feature (543)..(544): n is a, c, g, or t
  misc_feature (549)..(549): n is a, c, g, or t
  misc_feature (551)..(552): n is a, c, g, or t
  misc_feature (556)..(556): n is a, c, g, or t
  misc_feature (558)..(558): n is a, c, g, or t
  misc_feature (589)..(589): n is a, c, g, or t

SEQ ID NO: 21491 - DNA, 921 bp, Homo Sapiens; identical to SEQ ID NO: 15841

SEQ ID NO: 21492 - DNA, 667 bp, Homo Sapiens; identical to SEQ ID NO: 15842

SEQ ID NO: 21493 - DNA, 837 bp, Homo Sapiens; identical to SEQ ID NO: 15843

SEQ ID NO: 21494 - DNA, 519 bp, Homo Sapiens; identical to SEQ ID NO: 15844

SEQ ID NO: 21495 - DNA, 502 bp, Homo Sapiens; identical to SEQ ID NO: 15845

SEQ ID NO: 21496 - DNA, 872 bp, Homo Sapiens; identical to SEQ ID NO: 15846

SEQ ID NO: 21497 - DNA, 460 bp, Homo Sapiens; identical to SEQ ID NO: 15847

SEQ ID NO: 21498 - DNA, 837 bp, Homo Sapiens; identical to SEQ ID NO: 15848

SEQ ID NO: 21499 - DNA, 813 bp, Homo Sapiens; identical to SEQ ID NO: 15849

SEQ ID NO: 21500 - DNA, 939 bp, Homo Sapiens; identical to SEQ ID NO: 15850
  misc_feature (113)..(197): n is a, c, g, or t
  misc_feature (238)..(263): n is a, c, g, or t

SEQ ID NO: 21501 - DNA, 740 bp, Homo Sapiens; identical to SEQ ID NO: 15851
  misc_feature (294)..(357): n is a, c, g, or t
  misc_feature (574)..(584): n is a, c, g, or t

SEQ ID NO: 21502 - DNA, 857 bp, Homo Sapiens; identical to SEQ ID NO: 15852

SEQ ID NO: 21503 - DNA, 434 bp, Homo Sapiens; identical to SEQ ID NO: 15853

SEQ ID NO: 21504 - DNA, 671 bp, Homo Sapiens; identical to SEQ ID NO: 15854
  misc_feature (567)..(567): n is a, c, g, or t

SEQ ID NO: 21505 - DNA, 1742 bp, Homo Sapiens; identical to SEQ ID NO: 15855
  misc_feature (1243)..(1251): n is a, c, g, or t
  misc_feature (1335)..(1382): n is a, c, g, or t

SEQ ID NO: 21506 - DNA, 668 bp, Homo Sapiens; identical to SEQ ID NO: 15856
  misc_feature (195)..(195): n is a, c, g, or t

SEQ ID NO: 21507 - DNA, 457 bp, Homo Sapiens; identical to SEQ ID NO: 15857

SEQ ID NO: 21508 - DNA, 540 bp, Homo Sapiens; identical to SEQ ID NO: 15858
  misc_feature (384)..(384): n is a, c, g, or t

SEQ ID NO: 21509 - DNA, 575 bp, Homo Sapiens; identical to SEQ ID NO: 15859

SEQ ID NO: 21510 - DNA, 547 bp, Homo Sapiens; identical to SEQ ID NO: 15860

SEQ ID NO: 21511 - DNA, 1143 bp, Homo Sapiens; identical to SEQ ID NO: 15861
  misc_feature (88)..(110): n is a, c, g, or t
  misc_feature (978)..(987): n is a, c, g, or t

SEQ ID NO: 21512 - DNA, 839 bp, Homo Sapiens; identical to SEQ ID NO: 15862
  misc_feature (146)..(267): n is a, c, g, or t
  misc_feature (727)..(746): n is a, c, g, or t

SEQ ID NO: 21513 - DNA, 825 bp, Homo Sapiens; identical to SEQ ID NO: 15863
  misc_feature (57)..(57): n is a, c, g, or t

SEQ ID NO: 21514 - DNA, 823 bp, Homo Sapiens; identical to SEQ ID NO: 15864
  misc_feature (778)..(778): n is a, c, g, or t

SEQ ID NO: 21515 - DNA, 429 bp, Homo Sapiens; identical to SEQ ID NO: 15865
  misc_feature (46)..(89): n is a, c, g, or t

SEQ ID NO: 21516 - DNA, 772 bp, Homo Sapiens; identical to SEQ ID NO: 15866

SEQ ID NO: 21517 - DNA, 1323 bp, Homo Sapiens; identical to SEQ ID NO: 15867
  misc_feature (139)..(156): n is a, c, g, or t
  misc_feature (251)..(285): n is a, c, g, or t
  misc_feature (1310)..(1310): n is a, c, g, or t

SEQ ID NO: 21518 - DNA, 527 bp, Homo Sapiens; identical to SEQ ID NO: 15868
  misc_feature (160)..(229): n is a, c, g, or t

SEQ ID NO: 21519 - DNA, 965 bp, Homo Sapiens; identical to SEQ ID NO: 15869
  misc_feature (413)..(415): n is a, c, g, or t
  misc_feature (418)..(553): n is a, c, g, or t
  misc_feature (565)..(635): n is a, c, g, or t
  misc_feature (668)..(723): n is a, c, g, or t
  misc_feature (747)..(796): n is a, c, g, or t

SEQ ID NO: 21520 - DNA, 814 bp, Homo Sapiens; identical to SEQ ID NO: 15870

SEQ ID NO: 21521 - DNA, 874 bp, Homo Sapiens; identical to SEQ ID NO: 15871
  misc_feature (789)..(805): n is a, c, g, or t

SEQ ID NO: 21522 - DNA, 653 bp, Homo Sapiens; identical to SEQ ID NO: 15872

SEQ ID NO: 21523 - DNA, 490 bp, Homo Sapiens; identical to SEQ ID NO: 15873

SEQ ID NO: 21524 - DNA, 486 bp, Homo Sapiens; identical to SEQ ID NO: 15874

SEQ ID NO: 21525 - DNA, 611 bp, Homo Sapiens; identical to SEQ ID NO: 15875
  misc_feature (14)..(14): n is a, c, g, or t
  misc_feature (51)..(51): n is a, c, g, or t

SEQ ID NO: 21526 - DNA, 475 bp, Homo Sapiens; identical to SEQ ID NO: 15876

SEQ ID NO: 21527 - DNA, 557 bp, Homo Sapiens; identical to SEQ ID NO: 15877

SEQ ID NO: 21528 - DNA, 810 bp, Homo Sapiens; identical to SEQ ID NO: 15878
  misc_feature (655)..(694): n is a, c, g, or t
  misc_feature (697)..(704): n is a, c, g, or t
  misc_feature (706)..(729): n is a, c, g, or t

SEQ ID NO: 21529 - DNA, 888 bp, Homo Sapiens; identical to SEQ ID NO: 15879
  misc_feature (772)..(772): n is a, c, g, or t

SEQ ID NO: 21530 - DNA, 1046 bp, Homo Sapiens; identical to SEQ ID NO: 15880

SEQ ID NO: 21531 - DNA, 1626 bp, Homo Sapiens; identical to SEQ ID NO: 15881

SEQ ID NO: 21532 - DNA, 247 bp, Homo Sapiens; identical to SEQ ID NO: 15882

SEQ ID NO: 21533 - DNA, 362 bp, Homo Sapiens; identical to SEQ ID NO: 15883

SEQ ID NO: 21534 - DNA, 590 bp, Homo Sapiens; identical to SEQ ID NO: 15884

SEQ ID NO: 21535 - DNA, 1243 bp, Homo Sapiens; identical to SEQ ID NO: 15885
  misc_feature (673)..(723): n is a, c, g, or t

SEQ ID NO: 21536 - DNA, 587 bp, Homo Sapiens; identical to SEQ ID NO: 15886

SEQ ID NO: 21537 - DNA, 604 bp, Homo Sapiens; identical to SEQ ID NO: 15887

SEQ ID NO: 21538 - DNA, 1108 bp, Homo Sapiens; identical to SEQ ID NO: 15888

SEQ ID NO: 21539 - DNA, 597 bp, Homo Sapiens; identical to SEQ ID NO: 15889
  misc_feature (576)..(576): n is a, c, g, or t

SEQ ID NO: 21540 - DNA, 833 bp, Homo Sapiens; identical to SEQ ID NO: 15890

SEQ ID NO: 21541 - DNA, 427 bp, Homo Sapiens; identical to SEQ ID NO: 15891

SEQ ID NO: 21542 - DNA, 1056 bp, Homo Sapiens; identical to SEQ ID NO: 15892
  misc_feature (195)..(196): n is a, c, g, or t

SEQ ID NO: 21543 - DNA, 337 bp, Homo Sapiens; identical to SEQ ID NO: 15893
  misc_feature (46)..(46): n is a, c, g, or t

SEQ ID NO: 21544 - DNA, 1100 bp, Homo Sapiens; identical to SEQ ID NO: 15894

SEQ ID NO: 21545 - DNA, 339 bp, Homo Sapiens; identical to SEQ ID NO: 15895

SEQ ID NO: 21546 - DNA, 557 bp, Homo Sapiens; identical to SEQ ID NO: 15896
  misc_feature (87)..(89): n is a, c, g, or t
  misc_feature (121)..(121): n is a, c, g, or t

SEQ ID NO: 21547 - DNA, 1849 bp, Homo Sapiens; identical to SEQ ID NO: 15897

SEQ ID NO: 21548 - DNA, 874 bp, Homo Sapiens; identical to SEQ ID NO: 15898
  misc_feature (738)..(746): n is a, c, g, or t

SEQ ID NO: 21549 - DNA, 425 bp, Homo Sapiens; identical to SEQ ID NO: 15899

SEQ ID NO: 21550 - DNA, 947 bp, Homo Sapiens; identical to SEQ ID NO: 15900

SEQ ID NO: 21551 - DNA, 1061 bp, Homo Sapiens; identical to SEQ ID NO: 15901
  misc_feature (994)..(1002): n is a, c, g, or t

SEQ ID NO: 21552 - DNA, 1148 bp, Homo Sapiens; identical to SEQ ID NO: 15902

SEQ ID NO: 21553 - DNA, 567 bp, Homo Sapiens; identical to SEQ ID NO: 15903
  misc_feature (259)..(259): n is a, c, g, or t

SEQ ID NO: 21554 - DNA, 1056 bp, Homo Sapiens; identical to SEQ ID NO: 15904

SEQ ID NO: 21555 - DNA, 904 bp, Homo Sapiens; identical to SEQ ID NO: 15905

SEQ ID NO: 21556 - DNA, 833 bp, Homo Sapiens; identical to SEQ ID NO: 15906

SEQ ID NO: 21557 - DNA, 1033 bp, Homo Sapiens; identical to SEQ ID NO: 15907
  misc_feature (146)..(146): n is a, c, g, or t
  misc_feature (158)..(159): n is a, c, g, or t
  misc_feature (166)..(171): n is a, c, g, or t

SEQ ID NO: 21558 - DNA, 450 bp, Homo Sapiens; identical to SEQ ID NO: 15908

SEQ ID NO: 21559 - DNA, 842 bp, Homo Sapiens; identical to SEQ ID NO: 15909
  misc_feature (597)..(597): n is a, c, g, or t
  misc_feature (600)..(600): n is a, c, g, or t
  misc_feature (604)..(604): n is a, c, g, or t

SEQ ID NO: 21560 - DNA, 752 bp, Homo Sapiens; identical to SEQ ID NO: 15910

SEQ ID NO: 21561 - DNA, 1325 bp, Homo Sapiens; identical to SEQ ID NO: 15911

SEQ ID NO: 21562 - DNA, 1135 bp, Homo Sapiens; identical to SEQ ID NO: 15912

SEQ ID NO: 21563 - DNA, 354 bp, Homo Sapiens; identical to SEQ ID NO: 15913
  misc_feature (15)..(15): n is a, c, g, or t
  misc_feature (147)..(187): n is a, c, g, or t

SEQ ID NO: 21564 - DNA, 821 bp, Homo Sapiens; identical to SEQ ID NO: 15914

SEQ ID NO: 21565 - DNA, 662 bp, Homo Sapiens; identical to SEQ ID NO: 15915

SEQ ID NO: 21566 - DNA, 724 bp, Homo Sapiens; identical to SEQ ID NO: 15916

SEQ ID NO: 21567 - DNA, 651 bp, Homo Sapiens; identical to SEQ ID NO: 15917

SEQ ID NO: 21568 - DNA, 878 bp, Homo Sapiens; identical to SEQ ID NO: 15918
  misc_feature (273)..(297): n is a, c, g, or t
  misc_feature (300)..(459): n is a, c, g, or t

SEQ ID NO: 21569 - DNA, 740 bp, Homo Sapiens; identical to SEQ ID NO: 15919
  misc_feature (132)..(133): n is a, c, g, or t
  misc_feature (135)..(135): n is a, c, g, or t
  misc_feature (427)..(437): n is a, c, g, or t

SEQ ID NO: 21570 - DNA, 1327 bp, Homo Sapiens; identical to SEQ ID NO: 15920
  misc_feature (102)..(102): n is a, c, g, or t
  misc_feature (804)..(816): n is a, c, g, or t
  misc_feature (1140)..(1150): n is a, c, g, or t

SEQ ID NO: 21571 - DNA, 780 bp, Homo Sapiens; identical to SEQ ID NO: 15921

SEQ ID NO: 21572 - DNA, 999 bp, Homo Sapiens; identical to SEQ ID NO: 15922

SEQ ID NO: 21573 - DNA, 1313 bp, Homo Sapiens; identical to SEQ ID NO: 15923
  misc_feature (568)..(568): n is a, c, g, or t

SEQ ID NO: 21574 - DNA, 867 bp, Homo Sapiens; identical to SEQ ID NO: 15924

SEQ ID NO: 21575 - DNA, 814 bp, Homo Sapiens; identical to SEQ ID NO: 15925

SEQ ID NO: 21576 - DNA, 666 bp, Homo Sapiens; identical to SEQ ID NO: 15926
  misc_feature (14)..(14): n is a, c, g, or t

SEQ ID NO: 21577 - DNA, 1034 bp, Homo Sapiens; identical to SEQ ID NO: 15927

SEQ ID NO: 21578 - DNA, 1052 bp, Homo Sapiens; identical to SEQ ID NO: 15928
  misc_feature (95)..(141): n is a, c, g, or t

SEQ ID NO: 21579 - DNA, 565 bp, Homo Sapiens; identical to SEQ ID NO: 15929

SEQ ID NO: 21580 - DNA, 682 bp, Homo Sapiens; identical to SEQ ID NO: 15930
  misc_feature (58)..(58): n is a, c, g, or t
  misc_feature (136)..(136): n is a, c, g, or t
  misc_feature (139)..(139): n is a, c, g, or t

SEQ ID NO: 21581 - DNA, 1188 bp, Homo Sapiens; identical to SEQ ID NO: 15931

SEQ ID NO: 21582 - DNA, 810 bp, Homo Sapiens; identical to SEQ ID NO: 15932
  misc_feature (367)..(410): n is a, c, g, or t

SEQ ID NO: 21583 - DNA, 1198 bp, Homo Sapiens; identical to SEQ ID NO: 15933

SEQ ID NO: 21584 - DNA, 430 bp, Homo Sapiens; identical to SEQ ID NO: 15934

SEQ ID NO: 21585 - DNA, 1349 bp, Homo Sapiens; identical to SEQ ID NO: 15935

SEQ ID NO: 21586 - DNA, 505 bp, Homo Sapiens; identical to SEQ ID NO: 15936
  misc_feature (402)..(402): n is a, c, g, or t
  misc_feature (426)..(426): n is a, c, g, or t
  misc_feature (445)..(445): n is a, c, g, or t

SEQ ID NO: 21587 - DNA, 682 bp, Homo Sapiens; identical to SEQ ID NO: 15937

SEQ ID NO: 21588 - DNA, 887 bp, Homo Sapiens; identical to SEQ ID NO: 15938

SEQ ID NO: 21589 - DNA, 804 bp, Homo Sapiens; identical to SEQ ID NO: 15939
  misc_feature (657)..(657): n is a, c, g, or t

SEQ ID NO: 21590 - DNA, 441 bp, Homo Sapiens; identical to SEQ ID NO: 15940

SEQ ID NO: 21591 - DNA, 798 bp, Homo Sapiens; identical to SEQ ID NO: 15941

SEQ ID NO: 21592 - DNA, 812 bp, Homo Sapiens; identical to SEQ ID NO: 15942

SEQ ID NO: 21593 - DNA, 704 bp, Homo Sapiens; identical to SEQ ID NO: 15943

SEQ ID NO: 21594 - DNA, 1110 bp, Homo Sapiens; identical to SEQ ID NO: 15944

SEQ ID NO: 21595 - DNA, 292 bp, Homo Sapiens; identical to SEQ ID NO: 15945
  misc_feature (12)..(12): n is a, c, g, or t

SEQ ID NO: 21596 - DNA, 947 bp, Homo Sapiens; identical to SEQ ID NO: 15946

SEQ ID NO: 21597 - DNA, 506 bp, Homo Sapiens; identical to SEQ ID NO: 15947

SEQ ID NO: 21598 - DNA, 422 bp, Homo Sapiens; identical to SEQ ID NO: 15948
  misc_feature (91)..(91): n is a, c, g, or t

SEQ ID NO: 21599 - DNA, 1343 bp, Homo Sapiens; identical to SEQ ID NO: 15949

SEQ ID NO: 21600 - DNA, 1091 bp, Homo Sapiens; identical to SEQ ID NO: 15950
  misc_feature (976)..(1005): n is a, c, g, or t

SEQ ID NO: 21601 - DNA, 426 bp, Homo Sapiens; identical to SEQ ID NO: 15951
  misc_feature (25)..(25): n is a, c, g, or t
  misc_feature (34)..(35): n is a, c, g, or t

SEQ ID NO: 21602 - DNA, 800 bp, Homo Sapiens; identical to SEQ ID NO: 15952

SEQ ID NO: 21603 - DNA, 1051 bp, Homo Sapiens; identical to SEQ ID NO: 15953

SEQ ID NO: 21604 - DNA, 1050 bp, Homo Sapiens; identical to SEQ ID NO: 15954
  misc_feature (398)..(436): n is a, c, g, or t

SEQ ID NO: 21605 - DNA, 637 bp, Homo Sapiens; identical to SEQ ID NO: 15955
  misc_feature (170)..(186): n is a, c, g, or t

SEQ ID NO: 21606 - DNA, 387 bp, Homo Sapiens; identical to SEQ ID NO: 15956

SEQ ID NO: 21607 - DNA, 467 bp, Homo Sapiens; identical to SEQ ID NO: 15957

SEQ ID NO: 21608 - DNA, 584 bp, Homo Sapiens; identical to SEQ ID NO: 15958

SEQ ID NO: 21609 - DNA, 813 bp, Homo Sapiens; identical to SEQ ID NO: 15959

SEQ ID NO: 21610 - DNA, 1395 bp, Homo Sapiens; identical to SEQ ID NO: 15960

SEQ ID NO: 21611 - DNA, 544 bp, Homo Sapiens; identical to SEQ ID NO: 15961

SEQ ID NO: 21612 - DNA, 1104 bp, Homo Sapiens; identical to SEQ ID NO: 15962

SEQ ID NO: 21613 - DNA, 782 bp, Homo Sapiens; identical to SEQ ID NO: 15963
  misc_feature (116)..(116): n is a, c, g, or t
  misc_feature (121)..(121): n is a, c, g, or t

SEQ ID NO: 21614 - DNA, 529 bp, Homo Sapiens; identical to SEQ ID NO: 15964

SEQ ID NO: 21615 - DNA, 514 bp, Homo Sapiens; identical to SEQ ID NO: 15965

SEQ ID NO: 21616 - DNA, 1097 bp, Homo Sapiens; identical to SEQ ID NO: 15966

SEQ ID NO: 21617 - DNA, 698 bp, Homo Sapiens; identical to SEQ ID NO: 15967
  misc_feature (104)..(104): n is a, c, g, or t
  misc_feature (108)..(108): n is a, c, g, or t
  misc_feature (136)..(136): n is a, c, g, or t

SEQ ID NO: 21618 - DNA, 652 bp, Homo Sapiens; identical to SEQ ID NO: 15968

SEQ ID NO: 21619 - DNA, 461 bp, Homo Sapiens; identical to SEQ ID NO: 15969

SEQ ID NO: 21620 - DNA, 854 bp, Homo Sapiens; identical to SEQ ID NO: 15970
  misc_feature (521)..(547): n is a, c, g, or t

SEQ ID NO: 21621 - DNA, 520 bp, Homo Sapiens; identical to SEQ ID NO: 15971
  misc_feature (370)..(370): n is a, c, g, or t
  misc_feature (496)..(496): n is a, c, g, or t

SEQ ID NO: 21622 - DNA, 905 bp, Homo Sapiens; identical to SEQ ID NO: 15972

SEQ ID NO: 21623 - DNA, 795 bp, Homo Sapiens; identical to SEQ ID NO: 15973

SEQ ID NO: 21624 - DNA, 448 bp, Homo Sapiens; identical to SEQ ID NO: 15974

SEQ ID NO: 21625 - DNA, 495 bp, Homo Sapiens; identical to SEQ ID NO: 15975

SEQ ID NO: 21626 - DNA, 1174 bp, Homo Sapiens; identical to SEQ ID NO: 15976

SEQ ID NO: 21627 - DNA, 680 bp, Homo Sapiens; identical to SEQ ID NO: 15977

SEQ ID NO: 21628 - DNA, 1055 bp, Homo Sapiens; identical to SEQ ID NO: 15978

SEQ ID NO: 21629 - DNA, 480 bp, Homo Sapiens; identical to SEQ ID NO: 15979

SEQ ID NO: 21630 - DNA, 480 bp, Homo Sapiens; identical to SEQ ID NO: 15980

SEQ ID NO: 21631 - DNA, 802 bp, Homo Sapiens; identical to SEQ ID NO: 15981
  misc_feature (73)..(73): n is a, c, g, or t
  misc_feature (78)..(78): n is a, c, g, or t

SEQ ID NO: 21632 - DNA, 450 bp, Homo Sapiens; identical to SEQ ID NO: 15982

SEQ ID NO: 21633 - DNA, 820 bp, Homo Sapiens; identical to SEQ ID NO: 15983
  misc_feature (168)..(168): n is a, c, g, or t
  misc_feature (498)..(498): n is a, c, g, or t

SEQ ID NO: 21634 - DNA, 650 bp, Homo Sapiens; identical to SEQ ID NO: 15984

SEQ ID NO: 21635 - DNA, 761 bp, Homo Sapiens; identical to SEQ ID NO: 15985

SEQ ID NO: 21636 - DNA, 1299 bp, Homo Sapiens; identical to SEQ ID NO: 15986

SEQ ID NO: 21637 - DNA, 300 bp, Homo Sapiens; identical to SEQ ID NO: 15987

SEQ ID NO: 21638 - DNA, 661 bp, Homo Sapiens; identical to SEQ ID NO: 15988

SEQ ID NO: 21639 - DNA, 481 bp, Homo Sapiens; identical to SEQ ID NO: 15989

SEQ ID NO: 21640 - DNA, 1775 bp, Homo Sapiens; identical to SEQ ID NO: 15990

SEQ ID NO: 21641 - DNA, 1007 bp, Homo Sapiens; identical to SEQ ID NO: 15991

SEQ ID NO: 21642 - DNA, 475 bp, Homo Sapiens; identical to SEQ ID NO: 15992

SEQ ID NO: 21643 - DNA, 585 bp, Homo Sapiens; identical to SEQ ID NO: 15993
  misc_feature (152)..(220): n is a, c, g, or t

SEQ ID NO: 21644 - DNA, 578 bp, Homo Sapiens; identical to SEQ ID NO: 15994
  misc_feature (530)..(530): n is a, c, g, or t

SEQ ID NO: 21645 - DNA, 1110 bp, Homo Sapiens; identical to SEQ ID NO: 15995
  misc_feature (142)..(142): n is a, c, g, or t
  misc_feature (995)..(1056): n is a, c, g, or t

SEQ ID NO: 21646 - DNA, 870 bp, Homo Sapiens; identical to SEQ ID NO: 15996
  misc_feature (480)..(493): n is a, c, g, or t

SEQ ID NO: 21647 - DNA, 716 bp, Homo Sapiens; identical to SEQ ID NO: 15997

SEQ ID NO: 21648 - DNA, 546 bp, Homo Sapiens; identical to SEQ ID NO: 15998

SEQ ID NO: 21649 - DNA, 467 bp, Homo Sapiens; identical to SEQ ID NO: 15999
  misc_feature (314)..(314): n is a, c, g, or t

SEQ ID NO: 21650 - DNA, 493 bp, Homo Sapiens; identical to SEQ ID NO: 16000
  misc_feature (157)..(157): n is a, c, g, or t
  misc_feature (168)..(168): n is a, c, g, or t
  misc_feature (174)..(174): n is a, c, g, or t
  misc_feature (177)..(177): n is a, c, g, or t
  misc_feature (180)..(180): n is a, c, g, or t
  misc_feature (183)..(183): n is a, c, g, or t
  misc_feature (186)..(186): n is a, c, g, or t

SEQ ID NO: 21651 - DNA, 345 bp, Homo Sapiens; identical to SEQ ID NO: 16001
  misc_feature (273)..(300): n is a, c, g, or t

SEQ ID NO: 21652 - DNA, 464 bp, Homo Sapiens; identical to SEQ ID NO: 16002

SEQ ID NO: 21653 - DNA, 536 bp, Homo Sapiens; identical to SEQ ID NO: 16003
  misc_feature (24)..(24): n is a, c, g, or t

SEQ ID NO: 21654 - DNA, 1013 bp, Homo Sapiens; identical to SEQ ID NO: 16004
  misc_feature (222)..(578): n is a, c, g, or t
  misc_feature (887)..(901): n is a, c, g, or t
  misc_feature (906)..(951): n is a, c, g, or t
  misc_feature (960)..(962): n is a, c, g, or t
  misc_feature (984)..(984): n is a, c, g, or t
  misc_feature (993)..(993): n is a, c, g, or t

SEQ ID NO: 21655 - DNA, 878 bp, Homo Sapiens; identical to SEQ ID NO: 16005
  misc_feature (700)..(725): n is a, c, g, or t

SEQ ID NO: 21656 - DNA, 1030 bp, Homo Sapiens; identical to SEQ ID NO: 16006
  misc_feature (839)..(839): n is a, c, g, or t
  misc_feature (872)..(873): n is a, c, g, or t

SEQ ID NO: 21657 - DNA, 579 bp, Homo Sapiens; identical to SEQ ID NO: 16007

SEQ ID NO: 21658 - DNA, 299 bp, Homo Sapiens; identical to SEQ ID NO: 16008

SEQ ID NO: 21659 - DNA, 824 bp, Homo Sapiens; identical to SEQ ID NO: 16009
  misc_feature (663)..(702): n is a, c, g, or t

SEQ ID NO: 21660 - DNA, 885 bp, Homo Sapiens; identical to SEQ ID NO: 16010

SEQ ID NO: 21661 - DNA, 933 bp, Homo Sapiens; identical to SEQ ID NO: 16011

SEQ ID NO: 21662 - DNA, 564 bp, Homo Sapiens; identical to SEQ ID NO: 16012

SEQ ID NO: 21663 - DNA, 481 bp, Homo Sapiens; identical to SEQ ID NO: 16013
  misc_feature (412)..(412): n is a, c, g, or t
  misc_feature (454)..(454): n is a, c, g, or t

SEQ ID NO: 21664 - DNA, 1449 bp, Homo Sapiens; identical to SEQ ID NO: 16014
  misc_feature (944)..(962): n is a, c, g, or t
  misc_feature (1086)..(1179): n is a, c, g, or t

SEQ ID NO: 21665 - DNA, 544 bp, Homo Sapiens; identical to SEQ ID NO: 16015

SEQ ID NO: 21666 - DNA, 705 bp, Homo Sapiens; identical to SEQ ID NO: 16016

SEQ ID NO: 21667 - DNA, 469 bp, Homo Sapiens; identical to SEQ ID NO: 16017

SEQ ID NO: 21668 - DNA, 1377 bp, Homo Sapiens; identical to SEQ ID NO: 16018
  misc_feature (257)..(481): n is a, c, g, or t

SEQ ID NO: 21669 - DNA, 999 bp, Homo Sapiens; identical to SEQ ID NO: 16019
  misc_feature (171)..(180): n is a, c, g, or t

SEQ ID NO: 21670 - DNA, 789 bp, Homo Sapiens; identical to SEQ ID NO: 16020
  misc_feature (717)..(717): n is a, c, g, or t

SEQ ID NO: 21671 - DNA, 1442 bp, Homo Sapiens; identical to SEQ ID NO: 16021
  misc_feature (975)..(975): n is a, c, g, or t

SEQ ID NO: 21672 - DNA, 398 bp, Homo Sapiens; identical to SEQ ID NO: 16022

SEQ ID NO: 21673 - DNA, 540 bp, Homo Sapiens; identical to SEQ ID NO: 16023

SEQ ID NO: 21674 - DNA, 876 bp, Homo Sapiens; identical to SEQ ID NO: 16024
  misc_feature (145)..(145): n is a, c, g, or t
  misc_feature (242)..(242): n is a, c, g, or t
  misc_feature (262)..(262): n is a, c, g, or t

SEQ ID NO: 21675 - DNA, 754 bp, Homo Sapiens; identical to SEQ ID NO: 16025
  misc_feature (272)..(272): n is a, c, g, or t

SEQ ID NO: 21676 - DNA, 346 bp, Homo Sapiens; identical to SEQ ID NO: 16026

SEQ ID NO: 21677 - DNA, 493 bp, Homo Sapiens; identical to SEQ ID NO: 16027

SEQ ID NO: 21678 - DNA, 452 bp, Homo Sapiens; identical to SEQ ID NO: 16028
  misc_feature (117)..(173): n is a, c, g, or t

SEQ ID NO: 21679 - DNA, 559 bp, Homo Sapiens; identical to SEQ ID NO: 16029
  misc_feature (477)..(477): n is a, c, g, or t
  misc_feature (524)..(524): n is a, c, g, or t

SEQ ID NO: 21680 - DNA, 485 bp, Homo Sapiens; identical to SEQ ID NO: 16030

SEQ ID NO: 21681 - DNA, 565 bp, Homo Sapiens; identical to SEQ ID NO: 16031

SEQ ID NO: 21682 - DNA, 669 bp, Homo Sapiens; identical to SEQ ID NO: 16032

SEQ ID NO: 21683 - DNA, 423 bp, Homo Sapiens; identical to SEQ ID NO: 16033

SEQ ID NO: 21684 - DNA, 586 bp, Homo Sapiens; identical to SEQ ID NO: 16034
  misc_feature (518)..(518): n is a, c, g, or t

SEQ ID NO: 21685 - DNA, 467 bp, Homo Sapiens; identical to SEQ ID NO: 16035

SEQ ID NO: 21686 - DNA, 911 bp, Homo Sapiens; identical to SEQ ID NO: 16036

SEQ ID NO: 21687 - DNA, 638 bp, Homo Sapiens; identical to SEQ ID NO: 16037
  misc_feature (28)..(28): n is a, c, g, or t
  misc_feature (92)..(92): n is a, c, g, or t
  misc_feature (94)..(94): n is a, c, g, or t

SEQ ID NO: 21688 - DNA, 411 bp, Homo Sapiens; identical to SEQ ID NO: 16038

SEQ ID NO: 21689 - DNA, 1070 bp, Homo Sapiens; identical to SEQ ID NO: 16039

SEQ ID NO: 21690 - DNA, 444 bp, Homo Sapiens; identical to SEQ ID NO: 16040

SEQ ID NO: 21691 - DNA, 232 bp, Homo Sapiens; identical to SEQ ID NO: 16041

SEQ ID NO: 21692 - DNA, 550 bp, Homo Sapiens; identical to SEQ ID NO: 16042
  misc_feature (405)..(427): n is a, c, g, or t

SEQ ID NO: 21693 - DNA, 1320 bp, Homo Sapiens; identical to SEQ ID NO: 16043

SEQ ID NO: 21694 - DNA, 715 bp, Homo Sapiens; identical to SEQ ID NO: 16044

SEQ ID NO: 21695 - DNA, 498 bp, Homo Sapiens; identical to SEQ ID NO: 16045

SEQ ID NO: 21696 - DNA, 668 bp, Homo Sapiens; identical to SEQ ID NO: 16046
  misc_feature (141)..(141): n is a, c, g, or t
  misc_feature (360)..(360): n is a, c, g, or t
  misc_feature (475)..(475): n is a, c, g, or t

SEQ ID NO: 21697 - DNA, 574 bp, Homo Sapiens; identical to SEQ ID NO: 16047

SEQ ID NO: 21698 - DNA, 802 bp, Homo Sapiens; identical to SEQ ID NO: 16048

SEQ ID NO: 21699 - DNA, 482 bp, Homo Sapiens; identical to SEQ ID NO: 16049

SEQ ID NO: 21700 - DNA, 597 bp, Homo Sapiens; identical to SEQ ID NO: 16050
  misc_feature (36)..(36): n is a, c, g, or t

SEQ ID NO: 21701 - DNA, 866 bp, Homo Sapiens; identical to SEQ ID NO: 16051

SEQ ID NO: 21702 - DNA, 554 bp, Homo Sapiens; identical to SEQ ID NO: 16052
  misc_feature (99)..(99): n is a, c, g, or t
  misc_feature (136)..(148): n is a, c, g, or t
  misc_feature (209)..(209): n is a, c, g, or t

SEQ ID NO: 21703 - DNA, 732 bp, Homo Sapiens; identical to SEQ ID NO: 16053

SEQ ID NO: 21704 - DNA, 1646 bp, Homo Sapiens; identical to SEQ ID NO: 16054
  misc_feature (1050)..(1050): n is a, c, g, or t

SEQ ID NO: 21705 - DNA, 731 bp, Homo Sapiens; identical to SEQ ID NO: 16055

SEQ ID NO: 21706 - DNA, 792 bp, Homo Sapiens; identical to SEQ ID NO: 16056

SEQ ID NO: 21707 - DNA, 661 bp, Homo Sapiens; identical to SEQ ID NO: 16057

SEQ ID NO: 21708 - DNA, 534 bp, Homo Sapiens; identical to SEQ ID NO: 16058
  misc_feature (31)..(31): n is a, c, g, or t

SEQ ID NO: 21709 - DNA, 908 bp, Homo Sapiens; identical to SEQ ID NO: 16059

SEQ ID NO: 21710 - DNA, 687 bp, Homo Sapiens; identical to SEQ ID NO: 16060

SEQ ID NO: 21711 - DNA, 858 bp, Homo Sapiens; identical to SEQ ID NO: 16061
  misc_feature (844)..(844): n is a, c, g, or t

SEQ ID NO: 21712 - DNA, 893 bp, Homo Sapiens; identical to SEQ ID NO: 16062

SEQ ID NO: 21713 - DNA, 563 bp, Homo Sapiens; identical to SEQ ID NO: 16063

SEQ ID NO: 21714 - DNA, 607 bp, Homo Sapiens; identical to SEQ ID NO: 16064

SEQ ID NO: 21715 - DNA, 488 bp, Homo Sapiens; identical to SEQ ID NO: 16065

SEQ ID NO: 21716 - DNA, 548 bp, Homo Sapiens; identical to SEQ ID NO: 16066
  misc_feature (354)..(354): n is a, c, g, or t

SEQ ID NO: 21717 - DNA, 551 bp, Homo Sapiens; identical to SEQ ID NO: 16067

SEQ ID NO: 21718 - DNA, 479 bp, Homo Sapiens; identical to SEQ ID NO: 16068
  misc_feature (278)..(278): n is a, c, g, or t

SEQ ID NO: 21719 - DNA, 682 bp, Homo Sapiens; identical to SEQ ID NO: 16069
  misc_feature (58)..(58): n is a, c, g, or t
  misc_feature (66)..(66): n is a, c, g, or t

SEQ ID NO: 21720 - DNA, 333 bp, Homo Sapiens; identical to SEQ ID NO: 16070

SEQ ID NO: 21721 - DNA, 519 bp, Homo Sapiens; identical to SEQ ID NO: 16071

SEQ ID NO: 21722 - DNA, 955 bp, Homo Sapiens; identical to SEQ ID NO: 16072

SEQ ID NO: 21723 - DNA, 508 bp, Homo Sapiens; identical to SEQ ID NO: 16073

SEQ ID NO: 21724 - DNA, 595 bp, Homo Sapiens; identical to SEQ ID NO: 16074
  misc_feature (558)..(558): n is a, c, g, or t

SEQ ID NO: 21725 - DNA, 481 bp, Homo Sapiens; identical to SEQ ID NO: 16075

SEQ ID NO: 21726 - DNA, 701 bp, Homo Sapiens; identical to SEQ ID NO: 16076

SEQ ID NO: 21727 - DNA, 621 bp, Homo Sapiens; identical to SEQ ID NO: 16077
  misc_feature (52)..(52): n is a, c, g, or t
  misc_feature (133)..(133): n is a, c, g, or t

SEQ ID NO: 21728 - DNA, 519 bp, Homo Sapiens; identical to SEQ ID NO: 16078
  misc_feature (435)..(443): n is a, c, g, or t

SEQ ID NO: 21729 - DNA, 527 bp, Homo Sapiens; identical to SEQ ID NO: 16079

SEQ ID NO: 21730 - DNA, 1352 bp, Homo Sapiens; identical to SEQ ID NO: 16080
  misc_feature (1291)..(1291): n is a, c, g, or t

SEQ ID NO: 21731 - DNA, 693 bp, Homo Sapiens; identical to SEQ ID NO: 16081
  misc_feature (132)..(132): n is a, c, g, or t

SEQ ID NO: 21732 - DNA, 491 bp, Homo Sapiens; identical to SEQ ID NO: 16082

SEQ ID NO: 21733 - DNA, 677 bp, Homo Sapiens; identical to SEQ ID NO: 16083

SEQ ID NO: 21734 - DNA, 985 bp, Homo Sapiens; identical to SEQ ID NO: 16084

SEQ ID NO: 21735 - DNA, 546 bp, Homo Sapiens; identical to SEQ ID NO: 16085

SEQ ID NO: 21736 - DNA, 385 bp, Homo Sapiens; identical to SEQ ID NO: 16086

SEQ ID NO: 21737 - DNA, 392 bp, Homo Sapiens; identical to SEQ ID NO: 16087

SEQ ID NO: 21738 - DNA, 637 bp, Homo Sapiens; identical to SEQ ID NO: 16088
  misc_feature (137)..(155): n is a, c, g, or t
  misc_feature (467)..(482): n is a, c, g, or t

SEQ ID NO: 21739 - DNA, 1155 bp, Homo Sapiens; identical to SEQ ID NO: 16089

SEQ ID NO: 21740 - DNA, 1195 bp, Homo Sapiens; identical to SEQ ID NO: 16090
  misc_feature (164)..(164): n is a, c, g, or t

SEQ ID NO: 21741 - DNA, 478 bp, Homo Sapiens; identical to SEQ ID NO: 16091

SEQ ID NO: 21742 - DNA, 1383 bp, Homo Sapiens; identical to SEQ ID NO: 16092

SEQ ID NO: 21743 - DNA, 771 bp, Homo Sapiens; identical to SEQ ID NO: 16093

SEQ ID NO: 21744 - DNA, 463 bp, Homo Sapiens; identical to SEQ ID NO: 16094

SEQ ID NO: 21745 - DNA, 1179 bp, Homo Sapiens; identical to SEQ ID NO: 16095

SEQ ID NO: 21746 - DNA, 491 bp, Homo Sapiens; identical to SEQ ID NO: 16096
  misc_feature (32)..(32): n is a, c, g, or t

SEQ ID NO: 21747 - DNA, 936 bp, Homo Sapiens; identical to SEQ ID NO: 16097

SEQ ID NO: 21748 - DNA, 492 bp, Homo Sapiens; identical to SEQ ID NO: 16098

SEQ ID NO: 21749 - DNA, 628 bp, Homo Sapiens; identical to SEQ ID NO: 16099

SEQ ID NO: 21750 - DNA, 315 bp, Homo Sapiens; identical to SEQ ID NO: 16100

SEQ ID NO: 21751 - DNA, 558 bp, Homo Sapiens; identical to SEQ ID NO: 16101

SEQ ID NO: 21752 - DNA, 854 bp, Homo Sapiens; identical to SEQ ID NO: 16102

SEQ ID NO: 21753 - DNA, 302 bp, Homo Sapiens; identical to SEQ ID NO: 16103

SEQ ID NO: 21754 - DNA, 505 bp, Homo Sapiens; identical to SEQ ID NO: 16104

SEQ ID NO: 21755 - DNA, 500 bp, Homo Sapiens; identical to SEQ ID NO: 16105

SEQ ID NO: 21756 - DNA, 533 bp, Homo Sapiens; identical to SEQ ID NO: 16106
  misc_feature (100)..(160): n is a, c, g, or t
  misc_feature (421)..(481): n is a, c, g, or t

SEQ ID NO: 21757 - DNA, 437 bp, Homo Sapiens; identical to SEQ ID NO: 16107

SEQ ID NO: 21758 - DNA, 434 bp, Homo Sapiens; identical to SEQ ID NO: 16108

SEQ ID NO: 21759 - DNA, 613 bp, Homo Sapiens; identical to SEQ ID NO: 16109

SEQ ID NO: 21760 - DNA, 639 bp, Homo Sapiens; identical to SEQ ID NO: 16110

SEQ ID NO: 21761 - DNA, 471 bp, Homo Sapiens; identical to SEQ ID NO: 16111

SEQ ID NO: 21762 - DNA, 511 bp, Homo Sapiens; identical to SEQ ID NO: 16112

SEQ ID NO: 21763 - DNA, 585 bp, Homo Sapiens; identical to SEQ ID NO: 16113

SEQ ID NO: 21764 - DNA, 728 bp, Homo Sapiens; identical to SEQ ID NO: 16114
  misc_feature (339)..(390): n is a, c, g, or t

SEQ ID NO: 21765 - DNA, 504 bp, Homo Sapiens; identical to SEQ ID NO: 16115

SEQ ID NO: 21766 - DNA, 224 bp, Homo Sapiens; identical to SEQ ID NO: 16116

SEQ ID NO: 21767 - DNA, 351 bp, Homo Sapiens; identical to SEQ ID NO: 16117

SEQ ID NO: 21768 - DNA, 1117 bp, Homo Sapiens; identical to SEQ ID NO: 16118

SEQ ID NO: 21769 - DNA, 596 bp, Homo Sapiens; identical to SEQ ID NO: 16119

SEQ ID NO: 21770 - DNA, 558 bp, Homo Sapiens; identical to SEQ ID NO: 16120

SEQ ID NO: 21771 - DNA, 1617 bp, Homo Sapiens; identical to SEQ ID NO: 16121
  misc_feature (56)..(95): n is a, c, g, or t

SEQ ID NO: 21772 - DNA, 842 bp, Homo Sapiens; identical to SEQ ID NO: 16122

SEQ ID NO: 21773 - DNA, 600 bp, Homo Sapiens; identical to SEQ ID NO: 16123

SEQ ID NO: 21774 - DNA, 1322 bp, Homo Sapiens; identical to SEQ ID NO: 16124

SEQ ID NO: 21775 - DNA, 460 bp, Homo Sapiens; identical to SEQ ID NO: 16125

SEQ ID NO: 21776 - DNA, 656 bp, Homo Sapiens; identical to SEQ ID NO: 16126

SEQ ID NO: 21777 - DNA, 794 bp, Homo Sapiens; identical to SEQ ID NO: 16127

SEQ ID NO: 21778 - DNA, 392 bp, Homo Sapiens; identical to SEQ ID NO: 16128

SEQ ID NO: 21779 - DNA, 1117 bp, Homo Sapiens; identical to SEQ ID NO: 16129
  misc_feature (75)..(76): n is a, c, g, or t
  misc_feature (931)..(948): n is a, c, g, or t

SEQ ID NO: 21780 - DNA, 614 bp, Homo Sapiens; identical to SEQ ID NO: 16130
  misc_feature (70)..(89): n is a, c, g, or t

SEQ ID NO: 21781 - DNA, 781 bp, Homo Sapiens; identical to SEQ ID NO: 16131

SEQ ID NO: 21782 - DNA, 1019 bp, Homo Sapiens; identical to SEQ ID NO: 16132

SEQ ID NO: 21783 - DNA, 483 bp, Homo Sapiens; identical to SEQ ID NO: 16133

SEQ ID NO: 21784 - DNA, 775 bp, Homo Sapiens; identical to SEQ ID NO: 16134
  misc_feature (607)..(607): n is a, c, g, or t
  misc_feature (627)..(627): n is a, c, g, or t
  misc_feature (651)..(651): n is a, c, g, or t
  misc_feature (670)..(670): n is a, c, g, or t

SEQ ID NO: 21785 - DNA, 770 bp, Homo Sapiens; identical to SEQ ID NO: 16135

SEQ ID NO: 21786 - DNA, 458 bp, Homo Sapiens; identical to SEQ ID NO: 16136

SEQ ID NO: 21787 - DNA, 881 bp, Homo Sapiens; identical to SEQ ID NO: 16137
  misc_feature (591)..(591): n is a, c, g, or t

SEQ ID NO: 21788 - DNA, 679 bp, Homo Sapiens; identical to SEQ ID NO: 16138

SEQ ID NO: 21789 - DNA, 477 bp, Homo Sapiens; identical to SEQ ID NO: 16139
  misc_feature (414)..(414): n is a, c, g, or t

SEQ ID NO: 21790 - DNA, 1021 bp, Homo Sapiens; identical to SEQ ID NO: 16140

SEQ ID NO: 21791 - DNA, 770 bp, Homo Sapiens; identical to SEQ ID NO: 16141

SEQ ID NO: 21792 - DNA, 311 bp, Homo Sapiens; identical to SEQ ID NO: 16142

SEQ ID NO: 21793 - DNA, 1241 bp, Homo Sapiens; identical to SEQ ID NO: 16143

SEQ ID NO: 21794 - DNA, 680 bp, Homo Sapiens; identical to SEQ ID NO: 16144

SEQ ID NO: 21795 - DNA, 784 bp, Homo Sapiens; identical to SEQ ID NO: 16145

SEQ ID NO: 21796 - DNA, 701 bp, Homo Sapiens; identical to SEQ ID NO: 16146

SEQ ID NO: 21797 - DNA, 639 bp, Homo Sapiens; identical to SEQ ID NO: 16147

SEQ ID NO: 21798 - DNA, 611 bp, Homo Sapiens; identical to SEQ ID NO: 16148
  misc_feature (124)..(124): n is a, c, g, or t

SEQ ID NO: 21799 - DNA, 759 bp, Homo Sapiens; identical to SEQ ID NO: 16149

SEQ ID NO: 21800 - DNA, 1239 bp, Homo Sapiens; identical to SEQ ID NO: 16150

SEQ ID NO: 21801 - DNA, 578 bp, Homo Sapiens; identical to SEQ ID NO: 16151

SEQ ID NO: 21802 - DNA, 2348 bp, Homo Sapiens; identical to SEQ ID NO: 16152

SEQ ID NO: 21803 - DNA, 652 bp, Homo Sapiens; identical to SEQ ID NO: 16153

SEQ ID NO: 21804 - DNA, 377 bp, Homo Sapiens; identical to SEQ ID NO: 16154

SEQ ID NO: 21805 - DNA, 1103 bp, Homo Sapiens; identical to SEQ ID NO: 16155
  misc_feature (970)..(970): n is a, c, g, or t

SEQ ID NO: 21806 - DNA, 1558 bp, Homo Sapiens; identical to SEQ ID NO: 16156
  misc_feature (1334)..(1374): n is a, c, g, or t

SEQ ID NO: 21807 - DNA, 694 bp, Homo Sapiens; identical to SEQ ID NO: 16157

SEQ ID NO: 21808 - DNA, 207 bp, Homo Sapiens; identical to SEQ ID NO: 16158

SEQ ID NO: 21809 - DNA, 647 bp, Homo Sapiens; identical to SEQ ID NO: 16159

SEQ ID NO: 21810 - DNA, 635 bp, Homo Sapiens; identical to SEQ ID NO: 16160

SEQ ID NO: 21811 - DNA, 561 bp, Homo Sapiens; identical to SEQ ID NO: 16161

SEQ ID NO: 21812 - DNA, 375 bp, Homo Sapiens; identical to SEQ ID NO: 16162

SEQ ID NO: 21813 - DNA, 625 bp, Homo Sapiens; identical to SEQ ID NO: 16163

SEQ ID NO: 21814 - DNA, 699 bp, Homo Sapiens; identical to SEQ ID NO: 16164

SEQ ID NO: 21815 - DNA, 573 bp, Homo Sapiens; identical to SEQ ID NO: 16165
  misc_feature (23)..(23): n is a, c, g, or t

SEQ ID NO: 21816 - DNA, 606 bp, Homo Sapiens; identical to SEQ ID NO: 16166

SEQ ID NO: 21817 - DNA, 561 bp, Homo Sapiens; identical to SEQ ID NO: 16167

SEQ ID NO: 21818 - DNA, 538 bp, Homo Sapiens; identical to SEQ ID NO: 16168

SEQ ID NO: 21819 - DNA, 1531 bp, Homo Sapiens; identical to SEQ ID NO: 16169
  misc_feature (124)..(144): n is a, c, g, or t
  misc_feature (997)..(1028): n is a, c, g, or t

SEQ ID NO: 21820 - DNA, 1070 bp, Homo Sapiens; identical to SEQ ID NO: 16170
  misc_feature (883)..(914): n is a, c, g, or t

SEQ ID NO: 21821 - DNA, 242 bp, Homo Sapiens; identical to SEQ ID NO: 16171

SEQ ID NO: 21822 - DNA, 1369 bp, Homo Sapiens; identical to SEQ ID NO: 16172
  misc_feature (622)..(645): n is a, c, g, or t
  misc_feature (781)..(1066): n is a, c, g, or t
  misc_feature (1270)..(1292): n is a, c, g, or t

SEQ ID NO: 21823 - DNA, 661 bp, Homo Sapiens; identical to SEQ ID NO: 16173

SEQ ID NO: 21824 - DNA, 519 bp, Homo Sapiens; identical to SEQ ID NO: 16174

SEQ ID NO: 21825 - DNA, 706 bp, Homo Sapiens; identical to SEQ ID NO: 16175

SEQ ID NO: 21826 - DNA, 695 bp, Homo Sapiens; identical to SEQ ID NO: 16176

SEQ ID NO: 21827 - DNA, 708 bp, Homo Sapiens; identical to SEQ ID NO: 16177

SEQ ID NO: 21828 - DNA, 831 bp, Homo Sapiens; identical to SEQ ID NO: 16178

SEQ ID NO: 21829 - DNA, 541 bp, Homo Sapiens; identical to SEQ ID NO: 16179

SEQ ID NO: 21830 - DNA, 717 bp, Homo Sapiens; identical to SEQ ID NO: 16180

SEQ ID NO: 21831 - DNA, 1391 bp, Homo Sapiens; identical to SEQ ID NO: 16181

SEQ ID NO: 21832 - DNA, 882 bp, Homo Sapiens; identical to SEQ ID NO: 16182

SEQ ID NO: 21833 - DNA, 449 bp, Homo Sapiens; identical to SEQ ID NO: 16183

SEQ ID NO: 21834 - DNA, 839 bp, Homo Sapiens; identical to SEQ ID NO: 16184

SEQ ID NO: 21835 - DNA, 690 bp, Homo Sapiens; identical to SEQ ID NO: 16185
  misc_feature (346)..(369): n is a, c, g, or t
  misc_feature (563)..(617): n is a, c, g, or t

SEQ ID NO: 21836 - DNA, 547 bp, Homo Sapiens; identical to SEQ ID NO: 16186

SEQ ID NO: 21837 - DNA, 583 bp, Homo Sapiens; identical to SEQ ID NO: 16187
  misc_feature (104)..(191): n is a, c, g, or t

SEQ ID NO: 21838 - DNA, 317 bp, Homo Sapiens; identical to SEQ ID NO: 16188

SEQ ID NO: 21839 - DNA, 777 bp, Homo Sapiens; identical to SEQ ID NO: 16189
  misc_feature (682)..(682): n is a, c, g, or t
  misc_feature (754)..(754): n is a, c, g, or t

SEQ ID NO: 21840 - DNA, 1263 bp, Homo Sapiens; identical to SEQ ID NO: 16190

SEQ ID NO: 21841 - DNA, 605 bp, Homo Sapiens; identical to SEQ ID NO: 16191

SEQ ID NO: 21842 - DNA, 835 bp, Homo Sapiens; identical to SEQ ID NO: 16192

SEQ ID NO: 21843 - DNA, 1060 bp, Homo Sapiens; identical to SEQ ID NO: 16193

SEQ ID NO: 21844 - DNA, 831 bp, Homo Sapiens; identical to SEQ ID NO: 16194

SEQ ID NO: 21845 - DNA, 377 bp, Homo Sapiens; identical to SEQ ID NO: 16195

SEQ ID NO: 21846 - DNA, 370 bp, Homo Sapiens; identical to SEQ ID NO: 16196
  misc_feature (347)..(347): n is a, c, g, or t

SEQ ID NO: 21847 - DNA, 653 bp, Homo Sapiens; identical to SEQ ID NO: 16197
  misc_feature (346)..(383): n is a, c, g, or t
  misc_feature (397)..(526): n is a, c, g, or t

SEQ ID NO: 21848 - DNA, 600 bp, Homo Sapiens; identical to SEQ ID NO: 16198
  misc_feature (133)..(282): n is a, c, g, or t

SEQ ID NO: 21849 - DNA, 553 bp, Homo Sapiens; identical to SEQ ID NO: 16199

SEQ ID NO: 21850 - DNA, 797 bp, Homo Sapiens; identical to SEQ ID NO: 16200

SEQ ID NO: 21851 - DNA, 814 bp, Homo Sapiens; identical to SEQ ID NO: 16201

SEQ ID NO: 21852 - DNA, 456 bp, Homo Sapiens; identical to SEQ ID NO: 16202

SEQ ID NO: 21853 - DNA, 765 bp, Homo Sapiens; identical to SEQ ID NO: 16203
  misc_feature (484)..(484): n is a, c, g, or t

SEQ ID NO: 21854 - DNA, 502 bp, Homo Sapiens; identical to SEQ ID NO: 16204
  misc_feature (416)..(417): n is a, c, g, or t

SEQ ID NO: 21855 - DNA, 615 bp, Homo Sapiens; identical to SEQ ID NO: 16205

SEQ ID NO: 21856 - DNA, 1000 bp, Homo Sapiens; identical to SEQ ID NO: 16206
  misc_feature (443)..(461): n is a, c, g, or t
  misc_feature (711)..(774): n is a, c, g, or t

SEQ ID NO: 21857 - DNA, 868 bp, Homo Sapiens; identical to SEQ ID NO: 16207
  misc_feature (174)..(217): n is a, c, g, or t
  misc_feature (244)..(263): n is a, c, g, or t

SEQ ID NO: 21858 - DNA, 678 bp, Homo Sapiens; identical to SEQ ID NO: 16208

SEQ ID NO: 21859 - DNA, 786 bp, Homo Sapiens; identical to SEQ ID NO: 16209

SEQ ID NO: 21860 - DNA, 1192 bp, Homo Sapiens; identical to SEQ ID NO: 16210

SEQ ID NO: 21861 - DNA, 1755 bp, Homo Sapiens; identical to SEQ ID NO: 16211
  misc_feature (1460)..(1506): n is a, c, g, or t

SEQ ID NO: 21862 - DNA, 505 bp, Homo Sapiens; identical to SEQ ID NO: 16212
  misc_feature (193)..(193): n is a, c, g, or t

SEQ ID NO: 21863 - DNA, 367 bp, Homo Sapiens; identical to SEQ ID NO: 16213

SEQ ID NO: 21864 - DNA, 1300 bp, Homo Sapiens; identical to SEQ ID NO: 16214
  misc_feature (456)..(456): n is a, c, g, or t
  misc_feature (506)..(506): n is a, c, g, or t

SEQ ID NO: 21865 - DNA, 248 bp, Homo Sapiens; identical to SEQ ID NO: 16215

SEQ ID NO: 21866 - DNA, 1008 bp, Homo Sapiens; identical to SEQ ID NO: 16216
  misc_feature (64)..(64): n is a, c, g, or t
  misc_feature (148)..(148): n is a, c, g, or t

SEQ ID NO: 21867 - DNA, 653 bp, Homo Sapiens; identical to SEQ ID NO: 16217

SEQ ID NO: 21868 - DNA, 618 bp, Homo Sapiens; identical to SEQ ID NO: 16218
  misc_feature (369)..(446): n is a, c, g, or t

SEQ ID NO: 21869 - DNA, 509 bp, Homo Sapiens; identical to SEQ ID NO: 16219

SEQ ID NO: 21870 - DNA, 671 bp, Homo Sapiens; identical to SEQ ID NO: 16220

SEQ ID NO: 21871 - DNA, 901 bp, Homo Sapiens; identical to SEQ ID NO: 16221

SEQ ID NO: 21872 - DNA, 568 bp, Homo Sapiens; identical to SEQ ID NO: 16222
  misc_feature (139)..(139): n is a, c, g, or t

SEQ ID NO: 21873 - DNA, 612 bp, Homo Sapiens; identical to SEQ ID NO: 16223

SEQ ID NO: 21874 - DNA, 520 bp, Homo Sapiens; identical to SEQ ID NO: 16224

SEQ ID NO: 21875 - DNA, 571 bp, Homo Sapiens; identical to SEQ ID NO: 16225

SEQ ID NO: 21876 - DNA, 502 bp, Homo Sapiens; identical to SEQ ID NO: 16226
  misc_feature (299)..(411): n is a, c, g, or t

SEQ ID NO: 21877 - DNA, 687 bp, Homo Sapiens; identical to SEQ ID NO: 16227

SEQ ID NO: 21878 - DNA, 1619 bp, Homo Sapiens; identical to SEQ ID NO: 16228
  misc_feature (196)..(276): n is a, c, g, or t
  misc_feature (1024)..(1078): n is a, c, g, or t

SEQ ID NO: 21879 - DNA, 964 bp, Homo Sapiens; identical to SEQ ID NO: 16229
  misc_feature (840)..(898): n is a, c, g, or t

SEQ ID NO: 21880 - DNA, 812 bp, Homo Sapiens; identical to SEQ ID NO: 16230

SEQ ID NO: 21881 - DNA, 528 bp, Homo Sapiens; identical to SEQ ID NO: 16231
  misc_feature (517)..(517): n is a, c, g, or t

SEQ ID NO: 21882 - DNA, 735 bp, Homo Sapiens; identical to SEQ ID NO: 16232

SEQ ID NO: 21883 - DNA, 523 bp, Homo Sapiens; identical to SEQ ID NO: 16233

SEQ ID NO: 21884 - DNA, 648 bp, Homo Sapiens; identical to SEQ ID NO: 16234

SEQ ID NO: 21885 - DNA, 863 bp, Homo Sapiens; identical to SEQ ID NO: 16235

SEQ ID NO: 21886 - DNA, 483 bp, Homo Sapiens; identical to SEQ ID NO: 16236

SEQ ID NO: 21887 - DNA, 554 bp, Homo Sapiens; identical to SEQ ID NO: 16237

SEQ ID NO: 21888 - DNA, 511 bp, Homo Sapiens; identical to SEQ ID NO: 16238

SEQ ID NO: 21889 - DNA, 683 bp, Homo Sapiens; identical to SEQ ID NO: 16239

SEQ ID NO: 21890 - DNA, 604 bp, Homo Sapiens; identical to SEQ ID NO: 16240

SEQ ID NO: 21891 - DNA, 581 bp, Homo Sapiens; identical to SEQ ID NO: 16241
  misc_feature (496)..(509): n is a, c, g, or t

SEQ ID NO: 21892 - DNA, 516 bp, Homo Sapiens; identical to SEQ ID NO: 16242
  misc_feature (220)..(242): n is a, c, g, or t

SEQ ID NO: 21893 - DNA, 510 bp, Homo Sapiens; identical to SEQ ID NO: 16243

SEQ ID NO: 21894 - DNA, 998 bp, Homo Sapiens; identical to SEQ ID NO: 16244
  misc_feature (679)..(747): n is a, c, g, or t
  misc_feature (944)..(953): n is a, c, g, or t

SEQ ID NO: 21895 - DNA, 330 bp, Homo Sapiens; identical to SEQ ID NO: 16245
  misc_feature (101)..(117): n is a, c, g, or t

SEQ ID NO: 21896 - DNA, 611 bp, Homo Sapiens; identical to SEQ ID NO: 16246

SEQ ID NO: 21897 - DNA, 656 bp, Homo Sapiens; identical to SEQ ID NO: 16247

SEQ ID NO: 21898 - DNA, 724 bp, Homo Sapiens; identical to SEQ ID NO: 16248

SEQ ID NO: 21899 - DNA, 1014 bp, Homo Sapiens; identical to SEQ ID NO: 16249

SEQ ID NO: 21900 - DNA, 563 bp, Homo Sapiens; identical to SEQ ID NO: 16250

SEQ ID NO: 21901 - DNA, 850 bp, Homo Sapiens; identical to SEQ ID NO: 16251
  misc_feature (59)..(59): n is a, c, g, or t
  misc_feature (708)..(708): n is a, c, g, or t

SEQ ID NO: 21902 - DNA, 491 bp, Homo Sapiens; identical to SEQ ID NO: 16252

SEQ ID NO: 21903 - DNA, 1080 bp, Homo Sapiens; identical to SEQ ID NO: 16253

SEQ ID NO: 21904 - DNA, 987 bp, Homo Sapiens; identical to SEQ ID NO: 16254
  misc_feature (725)..(787): n is a, c, g, or t

SEQ ID NO: 21905 - DNA, 1809 bp, Homo Sapiens; identical to SEQ ID NO: 16255
  misc_feature (814)..(822): n is a, c, g, or t

SEQ ID NO: 21906 - DNA, 586 bp, Homo Sapiens; identical to SEQ ID NO: 16256
  misc_feature (235)..(235): n is a, c, g, or t

SEQ ID NO: 21907 - DNA, 1310 bp, Homo Sapiens; identical to SEQ ID NO: 16257

SEQ ID NO: 21908 - DNA, 925 bp, Homo Sapiens; identical to SEQ ID NO: 16258

SEQ ID NO: 21909 - DNA, 665 bp, Homo Sapiens; identical to SEQ ID NO: 16259

SEQ ID NO: 21910 - DNA, 826 bp, Homo Sapiens; identical to SEQ ID NO: 16260
  misc_feature (274)..(274): n is a, c, g, or t
  misc_feature (302)..(302): n is a, c, g, or t
  misc_feature (386)..(386): n is a, c, g, or t

SEQ ID NO: 21911 - DNA, 293 bp, Homo Sapiens; identical to SEQ ID NO: 16261

SEQ ID NO: 21912 - DNA, 663 bp, Homo Sapiens; identical to SEQ ID NO: 16262

SEQ ID NO: 21913 - DNA, 870 bp, Homo Sapiens; identical to SEQ ID NO: 16263

SEQ ID NO: 21914 - DNA, 903 bp, Homo Sapiens; identical to SEQ ID NO: 16264

SEQ ID NO: 21915 - DNA, 705 bp, Homo Sapiens; identical to SEQ ID NO: 16265

SEQ ID NO: 21916 - DNA, 1048 bp, Homo Sapiens; identical to SEQ ID NO: 16266

SEQ ID NO: 21917 - DNA, 1411 bp, Homo Sapiens; identical to SEQ ID NO: 16267

SEQ ID NO: 21918 - DNA, 590 bp, Homo Sapiens; identical to SEQ ID NO: 16268

SEQ ID NO: 21919 - DNA, 1510 bp, Homo Sapiens; identical to SEQ ID NO: 16269

SEQ ID NO: 21920 - DNA, 839 bp, Homo Sapiens; identical to SEQ ID NO: 16270
  misc_feature (637)..(731): n is a, c, g, or t

SEQ ID NO: 21921 - DNA, 834 bp, Homo Sapiens; identical to SEQ ID NO: 16271

SEQ ID NO: 21922 - DNA, 551 bp, Homo Sapiens; identical to SEQ ID NO: 16272

SEQ ID NO: 21923 - DNA, 482 bp, Homo Sapiens; identical to SEQ ID NO: 16273
  misc_feature (307)..(409): n is a, c, g, or t

SEQ ID NO: 21924 - DNA, 717 bp, Homo Sapiens; identical to SEQ ID NO: 16274

SEQ ID NO: 21925 - DNA, 572 bp, Homo Sapiens; identical to SEQ ID NO: 16275

SEQ ID NO: 21926 - DNA, 251 bp, Homo Sapiens; identical to SEQ ID NO: 16276

SEQ ID NO: 21927 - DNA, 529 bp, Homo Sapiens; identical to SEQ ID NO: 16277

SEQ ID NO: 21928 - DNA, 552 bp, Homo Sapiens; identical to SEQ ID NO: 16278

SEQ ID NO: 21929 - DNA, 430 bp, Homo Sapiens; identical to SEQ ID NO: 16279

SEQ ID NO: 21930 - DNA, 495 bp, Homo Sapiens; identical to SEQ ID NO: 16280

SEQ ID NO: 21931 - DNA, 222 bp, Homo Sapiens; identical to SEQ ID NO: 16281

SEQ ID NO: 21932 - DNA, 428 bp, Homo Sapiens; identical to SEQ ID NO: 16282

SEQ ID NO: 21933 - DNA, 717 bp, Homo Sapiens; identical to SEQ ID NO: 16283
  misc_feature (620)..(620): n is a, c, g, or t

SEQ ID NO: 21934 - DNA, 448 bp, Homo Sapiens; identical to SEQ ID NO: 16284

SEQ ID NO: 21935 - DNA, 577 bp, Homo Sapiens; identical to SEQ ID NO: 16285

SEQ ID NO: 21936 - DNA, 233 bp, Homo Sapiens; identical to SEQ ID NO: 16286

SEQ ID NO: 21937 - DNA, 670 bp, Homo Sapiens; identical to SEQ ID NO: 16287
  misc_feature (290)..(290): n is a, c, g, or t
  misc_feature (545)..(605): n is a, c, g, or t

SEQ ID NO: 21938 - DNA, 849 bp, Homo Sapiens; identical to SEQ ID NO: 16288
  misc_feature (484)..(531): n is a, c, g, or t

SEQ ID NO: 21939 - DNA, 272 bp, Homo Sapiens; identical to SEQ ID NO: 16289
  misc_feature (145)..(153): n is a, c, g, or t

SEQ ID NO: 21940 - DNA, 539 bp, Homo Sapiens; identical to SEQ ID NO: 16290
  misc_feature (313)..(321): n is a, c, g, or t

SEQ ID NO: 21941 - DNA, 1118 bp, Homo Sapiens; identical to SEQ ID NO: 16291
  misc_feature (914)..(922): n is a, c, g, or t
  misc_feature (952)..(952): n is a, c, g, or t
  misc_feature (989)..(1019): n is a, c, g, or t

SEQ ID NO: 21942 - DNA, 1165 bp, Homo Sapiens; identical to SEQ ID NO: 16292

SEQ ID NO: 21943 - DNA, 784 bp, Homo Sapiens; identical to SEQ ID NO: 16293

SEQ ID NO: 21944 - DNA, 316 bp, Homo Sapiens; identical to SEQ ID NO: 16294

SEQ ID NO: 21945 - DNA, 877 bp, Homo Sapiens; identical to SEQ ID NO: 16295

SEQ ID NO: 21946 - DNA, 271 bp, Homo Sapiens; identical to SEQ ID NO: 16296

SEQ ID NO: 21947 - DNA, 521 bp, Homo Sapiens; identical to SEQ ID NO: 16297
  misc_feature (35)..(35): n is a, c, g, or t
  misc_feature (51)..(51): n is a, c, g, or t
  misc_feature (59)..(59): n is a, c, g, or t
  misc_feature (61)..(61): n is a, c, g, or t
  misc_feature (74)..(76): n is a, c, g, or t
  misc_feature (79)..(79): n is a, c, g, or t
  misc_feature (100)..(100): n is a, c, g, or t
  misc_feature (165)..(165): n is a, c, g, or t

SEQ ID NO: 21948 - DNA, 485 bp, Homo Sapiens; identical to SEQ ID NO: 16298

SEQ ID NO: 21949 - DNA, 366 bp, Homo Sapiens; identical to SEQ ID NO: 16299

SEQ ID NO: 21950 - DNA, 483 bp, Homo Sapiens; identical to SEQ ID NO: 16300
  misc_feature (389)..(389): n is a, c, g, or t

SEQ ID NO: 21951 - DNA, 462 bp, Homo Sapiens; identical to SEQ ID NO: 16301

SEQ ID NO: 21952 - DNA, 933 bp, Homo Sapiens; identical to SEQ ID NO: 16302

SEQ ID NO: 21953 - DNA, 848 bp, Homo Sapiens; identical to SEQ ID NO: 16303
  misc_feature (676)..(702): n is a, c, g, or t
  misc_feature (791)..(791): n is a, c, g, or t

SEQ ID NO: 21954 - DNA, 575 bp, Homo Sapiens; identical to SEQ ID NO: 16304
  misc_feature (201)..(201): n is a, c, g, or t

SEQ ID NO: 21955 - DNA, 1618 bp, Homo Sapiens; identical to SEQ ID NO: 16305

SEQ ID NO: 21956 - DNA, 784 bp, Homo Sapiens; identical to SEQ ID NO: 16306

SEQ ID NO: 21957 - DNA, 1001 bp, Homo Sapiens; identical to SEQ ID NO: 16307
  misc_feature (22)..(22): n is a, c, g, or t

SEQ ID NO: 21958 - DNA, 515 bp, Homo Sapiens; identical to SEQ ID NO: 16308
  misc_feature (98)..(195): n is a, c, g, or t

SEQ ID NO: 21959 - DNA, 1048 bp, Homo Sapiens; identical to SEQ ID NO: 16309

SEQ ID NO: 21960 - DNA, 444 bp, Homo Sapiens; identical to SEQ ID NO: 16310

SEQ ID NO: 21961 - DNA, 1288 bp, Homo Sapiens; identical to SEQ ID NO: 16311
  misc_feature (352)..(392): n is a, c, g, or t
  misc_feature (1198)..(1198): n is a, c, g, or t

SEQ ID NO: 21962 - DNA, 1176 bp, Homo Sapiens; identical to SEQ ID NO: 16312
  misc_feature (56)..(56): n is a, c, g, or t
  misc_feature (63)..(63): n is a, c, g, or t
  misc_feature (72)..(72): n is a, c, g, or t

SEQ ID NO: 21963 - DNA, 468 bp, Homo Sapiens; identical to SEQ ID NO: 16313

SEQ ID NO: 21964 - DNA, 532 bp, Homo Sapiens; identical to SEQ ID NO: 16314
  misc_feature (496)..(496): n is a, c, g, or t

SEQ ID NO: 21965 - DNA, 993 bp, Homo Sapiens; identical to SEQ ID NO: 16315

SEQ ID NO: 21966 - DNA, 379 bp, Homo Sapiens; identical to SEQ ID NO: 16316
  misc_feature (136)..(136): n is a, c, g, or t

SEQ ID NO: 21967 - DNA, 943 bp, Homo Sapiens; identical to SEQ ID NO: 16317
  misc_feature (497)..(506): n is a, c, g, or t

SEQ ID NO: 21968 - DNA, 284 bp, Homo Sapiens; identical to SEQ ID NO: 16318
  misc_feature (23)..(23): n is a, c, g, or t
  misc_feature (66)..(66): n is a, c, g, or t
  misc_feature (254)..(254): n is a, c, g, or t

SEQ ID NO: 21969 - DNA, 505 bp, Homo Sapiens; identical to SEQ ID NO: 16319

SEQ ID NO: 21970 - DNA, 585 bp, Homo Sapiens; identical to SEQ ID NO: 16320

SEQ ID NO: 21971 - DNA, 376 bp, Homo Sapiens; identical to SEQ ID NO: 16321

SEQ ID NO: 21972 - DNA, 495 bp, Homo Sapiens; identical to SEQ ID NO: 16322

SEQ ID NO: 21973 - DNA, 697 bp, Homo Sapiens; identical to SEQ ID NO: 16323

SEQ ID NO: 21974 - DNA, 478 bp, Homo Sapiens; identical to SEQ ID NO: 16324
  misc_feature (458)..(458): n is a, c, g, or t

SEQ ID NO: 21975 - DNA, 580 bp, Homo Sapiens; identical to SEQ ID NO: 16325
  misc_feature (38)..(38): n is a, c, g, or t

SEQ ID NO: 21976 - DNA, 551 bp, Homo Sapiens; identical to SEQ ID NO: 16326
  misc_feature (441)..(510): n is a, c, g, or t

SEQ ID NO: 21977 - DNA, 526 bp, Homo Sapiens; identical to SEQ ID NO: 16327
  misc_feature (345)..(462): n is a, c, g, or t

SEQ ID NO: 21978 - DNA, 479 bp, Homo Sapiens; identical to SEQ ID NO: 16328

SEQ ID NO: 21979 - DNA, 431 bp, Homo Sapiens; identical to SEQ ID NO: 16329
  misc_feature (373)..(373): n is a, c, g, or t

SEQ ID NO: 21980 - DNA, 528 bp, Homo Sapiens; identical to SEQ ID NO: 16330

SEQ ID NO: 21981 - DNA, 529 bp, Homo Sapiens; identical to SEQ ID NO: 16331

SEQ ID NO: 21982 - DNA, 378 bp, Homo Sapiens; identical to SEQ ID NO: 16332

SEQ ID NO: 21983 - DNA, 503 bp, Homo Sapiens; identical to SEQ ID NO: 16333

SEQ ID NO: 21984 - DNA, 520 bp, Homo Sapiens; identical to SEQ ID NO: 16334

SEQ ID NO: 21985 - DNA, 423 bp, Homo Sapiens; identical to SEQ ID NO: 16335

SEQ ID NO: 21986 - DNA, 404 bp, Homo Sapiens; identical to SEQ ID NO: 16336

SEQ ID NO: 21987 - DNA, 360 bp, Homo Sapiens; identical to SEQ ID NO: 16337

SEQ ID NO: 21988 - DNA, 507 bp, Homo Sapiens; identical to SEQ ID NO: 16338

SEQ ID NO: 21989 - DNA, 779 bp, Homo Sapiens; identical to SEQ ID NO: 16339

SEQ ID NO: 21990 - DNA, 828 bp, Homo Sapiens; identical to SEQ ID NO: 16340

SEQ ID NO: 21991 - DNA, 1089 bp, Homo Sapiens; identical to SEQ ID NO: 16341
  misc_feature (105)..(106): n is a, c, g, or t
  misc_feature (113)..(113): n is a, c, g, or t
  misc_feature (585)..(585): n is a, c, g, or t

SEQ ID NO: 21992 - DNA, 555 bp, Homo Sapiens; identical to SEQ ID NO: 16342
  misc_feature (420)..(436): n is a, c, g, or t

SEQ ID NO: 21993 - DNA, 863 bp, Homo Sapiens; identical to SEQ ID NO: 16343
  misc_feature (311)..(432): n is a, c, g, or t

SEQ ID NO: 21994 - DNA, 588 bp, Homo Sapiens; identical to SEQ ID NO: 16344
  misc_feature (235)..(363): n is a, c, g, or t

SEQ ID NO: 21995 - DNA, 843 bp, Homo Sapiens; identical to SEQ ID NO: 16345

SEQ ID NO: 21996 - DNA, 1042 bp, Homo Sapiens; identical to SEQ ID NO: 16346
  misc_feature (862)..(863): n is a, c, g, or t
  misc_feature (903)..(903): n is a, c, g, or t
  misc_feature (942)..(942): n is a, c, g, or t
  misc_feature (948)..(949): n is a, c, g, or t

SEQ ID NO: 21997 - DNA, 1133 bp, Homo Sapiens; identical to SEQ ID NO: 16347
  misc_feature (1015)..(1024): n is a, c, g, or t

SEQ ID NO: 21998 - DNA, 1082 bp, Homo Sapiens; identical to SEQ ID NO: 16348
  misc_feature (783)..(783): n is a, c, g, or t
  misc_feature (936)..(950): n is a, c, g, or t

SEQ ID NO: 21999 - DNA, 1124 bp, Homo Sapiens; identical to SEQ ID NO: 16349

SEQ ID NO: 22000 - DNA, 796 bp, Homo Sapiens; identical to SEQ ID NO: 16350

SEQ ID NO: 22001 - DNA, 1337 bp, Homo Sapiens
  misc_feature (530)..(724): n is a, c, g, or t
ctggaactcaagctcttctccacagaggaggacagagcagacagcagagaccatggagtctccctcggcccctccccacagatggtgcatcccctggcagaggctcctgctcacagcctcacttctaaccttctggaacccgcccaccactgccaagctcactattgaatccacgccgttcaatgtcgcagaggggaaggaggtgcttctacttgtccacaatctgccccaaataataacgggacctatgcctgtttttgtctctaacttggctactggccgcaataattccatagtcaagagcatcacagtctctgcatctggaacttctcctggtctctcagctggggccactgtcggcatcatgattggagtgctggttggggttgctctgatatagcagccctggtgtagtttcttcatttcaggaagactgacagttgttttgcttcttccttaaagcatttgcaacagctacagtctaaaattgcttctttaccaaggatatttacagaaaagactctgaccannnnnnnnnnnnnnnnnnnnnnnnnnnnnnnnnnnnnnnnnnnnnnnnnnnnnnnnnnnnnnnnnnnnnnnnnnnnnnnnnnnnnnnnnnnnnnnnnnnnnnnnnnnnnnnnnnnnnnnnnnnnnnnnnnnnnnnnnnnnnnnnnnnnnnnnnnnnnnnnnnnnnnnnnnnnnnnnnnnnnnnnnnnnnnnnnnnagactccatctcaaaaagaaaagaaaagaagactctgacctgtactcttgaatacaagtttctgataccactgcactgtctgagaatttccaaaactttaatgaactaactgacagcttcatgaaactgtccaccaagatcaagcagagaaaataattaatttcatgggactaaatgaactaatgaggataatattttcataattttttatttgaaattttgctgattctttaaatgtcttgtttcccagatttcaggaaactttttttcttttaagctatccacagcttacagcaatttgataaaatatacttttgtgaacaaaaattgagacatttacattttctccctatgtggtcgctccagacttgggaaactattcatgaatatttatattgtatggtaatatagttattgcacaagttcaataaaaatctgctctttgtatgacagaatacatttgaaaacattggttatattaccaagactttgactagaatgtcgtatttgaggatataaacccataggtaataaacccacaggtactacaaacaaagtctgaagtcagccttggtttggcttcctagtgtcaattaaacttctaaaagtttag

SEQ ID NO: 22002 - DNA, 965 bp, Homo Sapiens
gcacgaggagagagctgcccttcagcgattatttaaattattgttaaagaatacacaatttggggtattgggatttttctccttttctctgagacattccaccattttaatttttgtaactgcttatttatgtgaaaagggttatttttacttagcttagctatgtcagccaatccgattgccttaggtgaaagaaaccaccgaaatccctcaggtcccttggtcaggagcctctcaagattttttttgtcagaggctccaaatagaaaataagaaaaggttttcttcattcatggctagagctagatttaactcagtttctaggcctcagaccaatcatcaactaccattctattccatgtttgcacctgtgcattttctgtttgcccccattcactttgtcaggaaaccttggcctctgctaaggtgtatttggtccttgagaagtgggagcaccctacagggacactatcactcatgctggtggcattgtttacagctagaaagctgcactggtgctaatgccccttggggaaatggggctgtgaggaggaggattataacttaggcctagcctcttttaacagcctctgaaatttatcttttcttctatggggtctataaatgtatcttataataaaaaggaaggacaggaggaagacaggcaaatgtacttctcacccagtcttctacacagatggaatctctttggggctaagagaaaggttttattctatattgcttacctgatctcatgttaggcctaagaggctttctccaggaggattagcttggagttctctatactcaggtacctctttcagggttttctaaccctgacacggactgtgcatactttccctcatccatgctgtgctgtgttatttaatttttcctggctaagatcatgtctgaattatgtatgaaaattattctatgtttttataataaaaataatatatcag

SEQ ID NO: 22003 - DNA, 1477 bp, Homo Sapiens
gcacgaggcccccacccctcattctcccctctccctcgtagaaactgaacgtcacagaacaagagaagattgacaaactgatgatcgagatggatggaacagaaaataaatctaagtttggtgcgaacgccattctgggggtgtcccttgccgtctgcaaagctggtgccgttgagaagggggtccccctgtaccgccacatcgctgacttggctggcaactctgaagtcatcctgccagtcccggcgttcaatgtcatcaatggcggttctcatgctggcaacaagctggccatgcaggagttcatgatcctcccagtcggtgcagcaaacttcagggaagccatgcgcattggagcagaggtttaccacaacctgaagaatgtcatcaaggagaaatatgggaaagatgccaccaatgtgggggatgaaggcgggtttgctcccaacatcctggagaataaagaaggcctggagctgctgaagactgctattgggaaagctggctacactgataaggtggtcatcggcatggacgtagcggcctccgagttcttcaggtctgggaagtatgacctggacttcaagtctcccgatgaccccagcaggtacatctcgcctgaccagctggctgacctgtacaagtccttcatcaaggactacccagtggtgtctatcgaagatccctttgaccaggatgactggggagcttggcagaagttcacagccagtgcaggaatccaggtagtgggggatgatctcacagtgaccaacccaaagaggatcgccaaggccgtgaacgagaagtcctgcaactgcctcctgctcaaagtcaaccagattggctccgtgaccgagtctcttcaggcgtgcaagctggcccaggccaatggttggggcgtcatggtgtctcatcgttcgggggagactgaagataccttcatcgctgacctggttgtggggctgtgcactgggcagatcaagactggtgccccttgccgatctgagcgcttggccaagtacaaccagctcctcagaattgaagaggagctgggcagcaaggctaagtttgccggcaggaacttcagaaaccccttggccaagtaagctgtgggcaggcaagcccttcggtcacctgttggctacacagacccctcccctcgtgtcagctcaggcagctcgaggcccccgaccaacacttgcaggggtccctgctagttagcgccccaccgccgtggagttcgtaccgcttccttagaacttctacagaagccaagctccctggagccctgttggcagctctagctttgcagtcgtgtaattggcccaagtcattgtttttctcgcctcactttccaccaagtgtctagagtcatgtgagcctcgtgtcatctccggggtggccacaggctagatccccggtggttttgtgctcaaaataaaaagcctcagtgacccatgagaaaaaaacctcgtgc

SEQ ID NO: 22004 - DNA, 1051 bp, Homo Sapiens
cccgggctgcaggaattcggcacgaggggacagtatctgtgggtacccggagcacggagatctcgccggctttacgttcacctcggtgtctgcagcaccctccgcttcctctcctaggcgacgagacccagtggctagaagttcaccatgtctattctcaagatccatgccagggagatctttgactctcgcgggaatcccactgttgaggttgatctcttcacctcaaaaggtctcttcagagctgctgtgcccagtggtgcttcaactggtatctatgaggccctagagctccgggacaatgataagactcgctatatggggaagggtgtctcaaaggctgttgagcacatcaataaaactattgcgcctgccctggttagcaagaaactgaacgtcacagaacaagagaagattgacaaactgatgatcgagatggatggaacagaaaataaatctaagtttggtgcgaacgccattctgggggtgtcccttgccgtctgcaaagctggtgccgttgagaagggggtccccctgtaccgccacatcgctgacttggctggcaactctgaagtcatcctgccagtcccggcgttcaatgtcatcaatggcggttctcatgctggcaacaagctggccatgcaggagttcatgatcctcccagtcggtgcagcaaacttcagggaagccatgcgcattggagcagaggtttaccacaacctgaagaatgtcatcaaggagaaatatgggaaagatgccaccaatgtgggggatgaaggcgggtttgctcccaacatcctggagaataaagaaagcctggagctgctgaagactgctattgggaaagctggctacactgataagtggtcatcggcatggacgtagcggcctccgagttcttcaggtctgggaagtatgacctggacttcaagtctcccgatgaccccagcaggtacatctcgcctgaccagctggctgacctgtacaagtccttcatcaaggactacccagtgtgtctatcgaagatccctttgaccaggatgactgggga

SEQ ID NO: 22005 - DNA, 794 bp, Homo Sapiens
ggagcttccaccgcggtggcggccgctctagactttatttgaaatcccccgggctgcaggaattcggcacgaggctaacacgtgcgcgagtcgggggctcgcacgaaagccgccgtggcgcaatgaaggtgaaggccggcgcgctcgccggccgaggtgggatcccgaggcctctccagtccgccgagggcgcaccaccggcccgtctcgcccgccgcgccggggaggtggagcacgagcgcacgtgttaggacccgaaagatggtgaactatgcctgggcagggcgaagccagaggaaactctggtggaggtccgtagcggtcctgacgtgcaaatcggtcgtccgacctgggtataggggcgaaagactaatcgaaccatctagtagctggttccctccgaagtttccctcaggatagctggcgctctcgcagacccgacgcacccccgccacgcagttttatccggtaaagcgaatgattagaggtcttggggccgaaacgatctcaacctattctcaaactttaaatgggtaagaagcccggctcgctggcgtggagccgggcgtggaatgcgagtgcctagtgggccacttttggtaagcagaactggcgctgcgggatgaaccgaacgccgggttaaggcgcccgatgccgacgctcatcagaccccaaaaaggtgttggttgatatagacagcaggacggtggccatggaagtcggaatccgctaaggagtgtgtaacaactcacctgccgaatcaactagcccctgaaaatggatggcgctggagc

SEQ ID NO: 22006 - DNA, 1495 bp, Homo Sapiens
  misc_feature (693)..(709): n is a, c, g, or t
gcacgagggtcggctgttgggtgtggagtttcccagcgcccctcgggtccgaccctttgagcgttctgctccggcgccagcctacctcgctcctcggcgccatgaccacaaccaccaccttcaagggagtcgaccccaacagcaggaatagctcccgagttttgcggcctccaggtggtggatccaatttttcattaggttttgatgaaccaacagaacaacctgtgaggaagaacaaaatggcctctaatatctttgggacacctgaagaaaatcaagcttcttgggccaagtcagcaggtgccaagtctagtggtggcagggaagacttggagtcatctggactgcagagaaggaactcctctgaagcaagctccggagacttcttagatctgaagggagaaggtgatattcatgaaaatgtggacacagacttgccaggcagcctggggcagagtgaagagaagcccgtgcctgctgcgcctgtgcccagcccggtggccccggccccagtgccatccagaagaaatccccctggcggcaagtccagcctcgtcttgggttagctctgactgtcctgaacgctgtcgttctgtctgtttcctccatgcttgtgaactgcacaacttgagcctgactgtacatctcttggatttgtttcattaaaaagaagcactttatgtactgctgtcnnnnnnnnnnnnnnnnngaagaacaggtttctctctgtccttgactcttgggtctgtgggccatggcatgagtgttttctagtagtagatgggagggaaagctttgtgacacttagtactgtgtttttaagaagaaataattggttccagatgtgttagaggatcttttgtactgaggtttttaacactttacttgggtttaccaagcctcaactggacagaccataaacagtccacaggcaccgttcctgccaggccccaacccacagggagtctctccgcagagccttcttggtgttgccctaacttgccagtggcctttgctcagagcctcctcctgtgacatgtgaacaatgaagaggcctgcgcctcctgccttgccgcctgcaaagcaaagaaactgccttttattttttaaccttaaaaagtagccagatagtaacaagactggctggctgatgagcaaagcctttgctctcacgcagaggaaggcttggatgtacaatgaaactgcctggaactaaaagcagtgaagcaagggaggcaatcacactgaagcgggtcttcctccaggaacggggtcccacaggcgtgttgttttaaataacctgatgctgtgtgcatgatgctggtgcttgaccatgaaaggaaagtctcatccttaaaatgtgttgtacttcacaatcctggactgttgcttcaagtaaacaatatccacattttgaaacactgtgtactgtgtcttctttttgagatggtttcagtgttctccctggttagatgcttttctctttgcctcgtgc

SEQ ID NO: 22007 - DNA, 1503 bp, Homo Sapiens
  misc_feature (144)..(175): n is a, c, g, or t
gcacgaggaccccagagagccctgagcagccccaccgccgccgccggcctagttaccatcacaccccgggaggagccgcagctgccgcagccggccccagtcaccatcaccgcaaccatgagcagcgaggccgagacccagcannnnnnnnnnnnnnnnnnnnnnnnnnnnnnnntcagcgccgccgacaccaagcccggcactacgggcagcggcgcagggagcggtggcccgggcggcctcacatcggcggcgcctgccggcggggacaagaaggtcatcgcaacgaaggttttgggaacagtaaaatggttcaatgtaaggaacggatatggtttcatcaacaggaatgacaccaaggaagatgtatttgtacaccagactgccataaagaagaataaccccaggaagtaccttcgcagtgtaggagatggagagactgtggagtttgatgttgttgaaggagaaaagggtgcggaggcagcaaatgttacaggtcctggtggtgttccagttcaaggcagtaaatatgcagcagaccgtaaccattatagacgctatccacgtcgtaggggtcctccacgcaattaccagcaaaattaccagaatagtgagagtggggaaaagaacgagggatcggagagtgctcccgaaggccaggcccaacaacgccggccctaccgcaggcgaaggttcccaccttactacatgcggagaccctatgggcgtcgaccacagtattccaaccctcctgtgcagggagaagtgatggagggtgctgacaaccagggtgcaggagaacaaggtagaccagtgaggcagaatatgtatcggggatatagaccacgattccgcaggggccctcctcgccaaagacagcctagagaggacggcaatgaagaagataaagaaaatcaaggagatgagacccaaggtcagcagccacctcaacgtcggtaccgccgcaacttcaattaccgacgcagacgcccagaaaaccctaaaccacaagatggcaaagagacaaaagcagccgatccaccagctgagaattcgtccgctcccgaggctgagcagggcggggctgagtaaatgccggcttaccatctctaccatcatccggtttagtcatccaacaagaagaaatatgaaattccagcaataagaaatgaacaaaagattggagctgaagacctaaagtgcttgctttttgcccgttgaccagataaatagaactatctgcattatctatgcagcatggggtttttattatttttacctaaagacgtctctttttggtaataacaaacgtgttttttaaaaaagcctggtttttctcaatacgcctttaaaggtttttaaattgtttcatatctggtcaagttgagatttttaagaacttcatttttaatttgtaataaaagtttacaacttgattttttcaaaaaagtcaacaaactgcaagcacctgttaataaaggtcttaaataattgtctttgtgt

SEQ ID NO: 22008 - DNA, 471 bp, Homo Sapiens
  misc_feature (308)..(325): n is a, c, g, or t
gccgggcccctcccgacgggactcccccgcgggcccaccaccgcccccgacccacgggcggacgggcgatcccccccagggttctttaaacctccgcgccggaacgcgctagggacctgtacggcgggggggcggacgaggaggcgggggaggggaccggcgtccggcccccgaccctcgagacgccctagcgggaaggccggggagagcgagcggggccgtgcccggcggcgcggagcggcgcggcggaggcgacgggaatccggccggccccacgacacgcgcacaccaacgacacgcccttcttnnnnnnnnnnnnnnnnnnccccgtctccctcccgagttctccggctctcgcggccggcggggccgggcggcgaacgaacgagcgagcgaacgaacgggcacgcgggccccgcccgcgcacgcgccgcgtcgcggtgggggggtgggtgtgcggagggaagcgcg

SEQ ID NO: 22009 - DNA, 2274 bp, Homo Sapiens
gcacgagggccattttaaatccagctccatacaacgctccgccgccgctgctgccgcgacccggactgcgcgccagcacccccctgccgacagctccgtcactatggaggatatgaacgagtacagcaatatagaggaattcgcagagggatccaagatcaacgcgagcaagaatcagcaggatgacggtaaaatgtttattggaggcttgagctgggatacaagcaaaaaagatctgacagagtacttgtctcgatttggggaagttgtagactgcacaattaaaacagatccagtcactgggagatcaagaggatttggatttgtgcttttcaaagatgctgctagtgttgataaggttttggaactgaaagaacacaaactggatggcaaattgatagatcccaaaagggccaaagctttaaaagggaaagaacctcccaaaaaggtttttgtgggtggattgagcccggatacttctgaagaacaaattaaagaatattttggagcctttggagagattgaaaatattgaacttcccatggatacaaaaacaaatgaaagaagaggattttgttttatcacatatactgatgaagagccagtaaaaaaattgttagaaagcagataccatcaaattggttctgggaagtgtgaaatcaaagttgcacaacccaaagaggtatataggcagcaacagcaacaacaaaaaggtggaagaggtgctgcagctggtggacgaggtggtacgaggggtcgtggccgaggccaacagagcacttatggcaaggcatctcgagggggtggcaatcaccaaaacaattaccagccatactaaaggagaacattggagaaaacaggtgtgtataagagtacaggaaaacagtagaaatgtctaatttaatttaaagatcaatagacaaatgaaacgtaaaaacaaaatactatgtagcctgtttttactaaattgttgattttttaattgctttatgagcctgttttgcctaaagtgtctatagatctttaactttaaagtcttatctcactttctttagtattgcagaaaaacttaagagtttttctgtttgcttttgtgtaccaggtggtctagaggaataattaaacattttagaactattaacaggtaaagtactgaaatgggtacaacttaaggaaaacaagaatgttgtcttctaactctgacattataccttgtttgtacccgccagcgggaacttcattgcaggccgtgtgtcaccctgaccacgtctatctctgggggtcgcacgttgcgggcagagcgcaaggcatacaccagaaaacgctgtcctgtggtatggtctcttccaacttcatgtaccagcgtaaagattaaagtggaaaacttcagactttggcttcatttttaatctttttggagattaagtgtctaaacttaacttaaatggttttttacaggagttaaagtacataaatgcctttttacagcttaatcattttggtcttctgtttagtgttgtatttcaattgtggagcctcattttaagtgttcattcttttaagatttaatgcttgctttttctttttatagctaatagtgaaatctacaaaccaaaacaagaacttttaaatctgggatataaattaaagatcatatgcacagatcaatttatgttcttgtaataaacttattagaaattggtgtttgtgatagcattttacttgggttactagagatgcttctagtagaccttaatctagcatagttgaacctctgaatatgggaaggttgtattcccagattctttcctgaatagatttgaatttaatgtcatttgggaactccagggtgagtttattgactacccaaactgtattttaccaataaatatgcatatgatctttaattattgaagaaaataaagtgaggacttaaaacaattcatgaaagtggacctttaaaagcttgtcagagttgcacaaatctaactggtattttgtttttgtttttaggaggagatgttaaagtaacccatcttgcaggacgacattgaagattggtcttctgttgatctaagatgattattttgtaaaagactttctagtgtacaagacaccattgtgtccaactgtatatagctgccaattagttttctttgtttttactttgtcctttgctatctgtgttatgactcaatgtggatttgtttatacacattttatttgtatcatttcatgttaaacctcaaataaatgcttccttatgtgattgct

SEQ ID NO: 22010 - DNA, 517 bp, Homo Sapiens
tttttttgtgttgcaaagcctttaattagaatgtttgtattttttacatcatgcataacttcacatttgtgattaattagtaattatttcaatacttgtaagctcatctgcctcagatttaatcataatacatgaattaaattaatcaaattaaggaacagcaatttagaaagaaacacactttaagaaatcaaaattctcaattcaggcagtctgtttctatcatttggtattctactcctttaaaaatttcatattgcccaacaaaaagtggttatttttactgtttttggagatgactgaacagatgaaggcatcagatgccttcatcagctggtattttgcctaagatctatttaagataaccttttcttatattttttacttaatattgggcataatcgtatcattcaagattaagtctgggttatttctttgataagaactgaatgtggccgggcgcagtggctcacgcctgtaatcccagcactttgggagaactagtccggacgcgtgg

SEQ ID NO: 22011 - DNA, 610 bp, Homo Sapiens
  misc_feature (175)..(183): n is a, c, g, or t
accgcccggcgtccagatttggcaattcttcgctgaagtcatcatgagctttttccaactcctgatgaaaaggaaggaactcattcccttggtggtgttcatgactgtggcggcgggtggagcctcatctttcgctgtgtattctctttggaaaaccgatgtgatccttgatcgnnnnnnnnntccagaaccttgggaaactgtggaccctactgtacctcaaaagcttataacaatcaaccaacaatggaaacccattgaagagttgcaaaatgtccaaagggtgaccaaatgacgagccctcgcctctttcttctgaagagtactctataaatctagtggaaacatttctgcacaaactagattctggacaccagtgtgcggaaatgcttctgctacatttttagggtttgtctacattttttgggctctggataaggaattaaaggagtgcagcaataactgcactgtctaaaagtttgtgcttattttcttgtaaatttgaatattgcatattgaaatttttgtttatgatctatgaatgtttttcttaaaatttacaaagctttgtaaattagattttctttaataaaatgccatttgtgcaaga

SEQ ID NO: 22012 - DNA, 1069 bp, Homo Sapiens
gcacgaggcggcgcctttaaagcgaggaggaggcgagagcggccgccgctggtgcttattcttttttagtgcagcggcggcggcgggaagcggagccgggaccgggggcggaaccgcgtctggaggcaccgaagggggcagcgccgagtcggagggggcgaagattgacgccagtaagaacgaggaggatgaaggccattcaaactcctccccacgacactctgaagcagcgacggcacagcgggaagaatggaaaatgtttataggaggccttagctgggacactacaaagaaagatctgaaggactacttttccaaatttggtgaagttgtagactgcactctgaagttagatcctatcacagggcgatcaaggggttttggctttgtgctatttaaagaatcggagagtgtagataaggtcatggatcaaaaagaacataaattgaatgggaaggtgattgatcctaaaagggccaaagccatgaaaacaaaagagccggttaaaaaaatttttgttggtggcctttctccagatacacctgaagagaaaataagggagtactttggtggttttggtgaggtggaatccatagagctccccatggacaacaagaccaataagaggcgtgggttctgctttattacctttaaggaagaagaaccagtgaagaagataatggaaaagaaataccacaatgttggtcttagtaaatgtgaaataaaagtagccatgtcgaaggaacaatatcagcaacagcaacagtggggatctagaggaggatttgcaggaagagctcgtggaagaggtggtgaccagcagagtggttatgggaaggtatccaggcgaggtggtcatcaaaatagctacaaaccatactaaattattccatttgcaacttatccccaacaggtggtgaagcagtattttccaatttgaagattcatttgaagtggctcctgccacctgctaatagcagttcaaactaattttttgtatcaagtccctgaatggaagtatgacgttgggtcctctgaagtttaattctgagttctcattaaagaaatt

SEQ ID NO: 22013 - DNA, 686 bp, Homo Sapiens
gcacgagggagaaactgaaacgacgaggggaaaggaggtctcactgagcaccgtcccagcatccggacaccacagcggcccttcgctccacgcagaaaaccacacttctcaaaccttcactcaacacttccttccccaaagccagaagatgcacaaggaggaacatgaggtggctgtgctgggggcaccccccagcaccatccttccaaggtccaccgtgatcaacatccacagcgagacctccgtgcccgaccatgtcgtctggtccctgttcaacaccctcttcttgaactggtgctgtctgggcttcatagcattcgcctactccgtgaagtctagggacaggaagatggttggcgacgtgaccggggcccaggcctatgcctccaccgccaagtgcctgaacatctgggccctgattctgggcatcctcatgaccattggattcatcctgttactggtattcggctctgtgacagtctaccatattatgttacagataatacaggaaaaacggggttactagtagccgcccatagcctgcaacctttgcactccactgtgcaatgctggccctgcacgctggggctgttgcccctgcccccttggtcctgcccctagatacagcagtttatacccacacacctgtctacagtgtcattcaataaagtgcacgtgcttgtgat

SEQ ID NO: 22014 - DNA, 680 bp, Homo Sapiens
gcacgaggctcactgagaaccatcccggtaacccgatcaccgctggtcaccatgaaccacattgtgcaaaccttctctcctgtcaacagcggccagcctcccaactacgagatgctcaaggaggagcaggaagtggctatgctgggggtgccccacaaccctgctcccccgatgtccaccgtgatccacatccgcagcgagacctccgtgcctgaccatgtggtctggtccctgttcaacaccctcttcatgaacacctgctgcctgggcttcatagcattcgcgtactccgtgaagtctagggacaggaagatggttggcgacgtgaccggggcccaggcctatgcctccaccgccaagtgcctgaacatctgggccctgattttgggcatcttcatgaccattctgctcatcatcatcccagtgttggtcgtccaggcccagcgatagatcaggaggcatcattgaggccaggagctctgcccgtgacctgtatcccacgtactctatcttccattcctcgccctgcccccagaggccaggagctctgcccttgacctgtattccacttactccaccttccattcctcgccctgtccccacagccgagtcctgcatcagccctttatcctcacacgcttttctacaatggcattcaataaagtgtatatgtttctggt

SEQ ID NO: 22015 - DNA, 914 bp, Homo Sapiens
gaattcggcacgaggggaaaacccggtaatgatgtcggggttgagggataggaggagaatgggggataggtgtatgaacatgagggtgttttctcgtgtgaatgagggttttatgttgttaatgtggtgggtgagtgagccccattgtgttgtggtaaatatgtagagggagtatagggctgtgactagtatgttgagtcctgtaagtaggagagtgatatttgatcaggagaacgtggttactagcacagagagttctcccagtaggttaatagtggggggtaaggcgaggttagcgaggcttgctagaagtcatcaaaaagctattagtgggagtagagtttgaagtccttgagagaggattatgatgcgactgtgagtgcgttcgtagtttgagtttgctaggcaaaatagtaatgaggatgtaagcccgtgggcgattatgaaaatgactgcgccggtgaagcttcagggggtttggatgagaatggctgttactacgagggctatgtggctgattgaagagtatgcaatgagcgattttaggtctgtttgtcgtaggcagatggagcttgttataattatgcctcatagggatagtacaaggaaggggtaggctatgtgttttgtcagggggttgagaatgagtgtgaggcgtattataccatagccgcctagttttaagagtactgcggcaagtactattgacccagcgatgggggcttcgacatgggctttagggagtcataagtggagtccgtaaagaggtatctttactataaaagctattgtgtaagctagtcatattaagttgttggctcaggagtttgatagttcttgggcagtgagagtgagtagtagaatgtttagtgagcctagggtgttgtgagtgtaaattattgcgatgagtaggg

SEQ ID NO: 22016 - DNA, 847 bp, Homo Sapiens
  misc_feature (474)..(515): n is a, c, g, or t
gcacgagggtttgcttcattcgaagacgctaaagaagctttaaattcctgtaataaaagggaaattgagggcagagcaatcaggctggagttgcaaggacccaggggatcacctaatgccagaagccagccatccaaaactctgtttgtcaaaggcctgtctgaggataccactgaagagacattaaaggagtcatttgacggctccgttcgggcaaggatagttactgaccgggaaactgggtcctccaaagggtttggttttgtagacttcaacagtgaggaggatgccaaagctgccaaggaggccatggaagacggtgaaattgatggaaataaagttaccttggactgggccaaacctaagggtgaaggtggcttcgggggtcgtggtggaggcagaggcggctttggaggacgaggtggtggtagaggaggccgaggaggatttggtggcagaggccggggaggcttnnnnnnnnnnnnnnnnnnnnnnnnnnnnnnnnnnnnnnnnnntgaccacaagccacaaggaaagaagacgaagtttgaatagcttctgtccctctgctttcccttttccatttgaaagaaaggactctggggtttttactgttacctgatcaatgacagagccttctgaggacattccaagacagtatacagtcctgtggtctccttggaaatccgtctagttaacatttcaagggcaataccgtgttggttttgactggatattcatataaactttttaaagagttgagtgatagagctaacccttatctgtaagttttgaatttatattgtttcatcccatgtacaaaaccattttttcctacaaataaaaa

SEQ ID NO: 22017 - DNA, 966 bp, Homo Sapiens
gcacgaggaaaagtcatggaggccatggggttggcttgaaaccagctttggggggttcgattccttccttttttgtctagattttatgtatacgggttcttcgaatgtgtggtagggtggggggcatccatatagtcactccaggtttatggagggttcttctactattaggacttttcgcttcgaagcgaaggcttctcaaatcatgaaaattattaatattactgctgttagagaaatgaatgagcctacagatgataggatgtttcatgtggtgtatgcatcggggtagtccgagtaacgtcggggcattccggataggccgagaaagtgttgtgggaagaaagttagatttacgccgatgaatatgatagtgaaatggattttggcgtaggtttggtctagggtgtagcctgagaataggggaaatcagtgaatgaagcctcctatgatggcaaatacagctcctattgataggacatagtggaagtgggctacaacgtagtacgtgtcgtgtagtacgatgtctagtgatgagtttgctaatacaatgccagtcaggccacctacggtgaaaagaaagatgaatcctagggctcagagcactgcagcagatcatttcatattgcttccgtggagtgtggcgagtcagctaaatactttgacgccggtggggatagcgatgattatggtagcggaggtgaaatatgctcgtgtgtctacgtctattcctactgtaaatatatggtgtgctcacacgataaaccctaggaagccaattgatatcatagctcagaccatacctatgtatccaaatggttctttttttccggagtagtaagttacaatatgggagattattccgaagcctggtaggataagaatataaacttcagggtgaccgaaaaatcagaataggtgttggtatagaatggggtctcctcctccggcggggtcgaagaaggt

SEQ ID NO: 22018 - DNA, 696 bp, Homo Sapiens
gcacgaggaccactcccaccacaggcataagctatcacctagcagcctcaaaacgggtcagtattaaggttttcaaccggaaggaggccaaccagcccgacagtgccatccccaccttcacctcggagggatggagaaagaagtggagacagtcctttcccaccattcctgcctttaagccaaagaaacaagctgtgcaggcatggtcccttaaggcacagtgggagctgagctggaaggggccacgtggatgggcaaagcttgtcaaagatgccccctccaggagagagccaggatgcccagatgaactgactgaaggaaaagcaagaaacagtttcttgcttggaagccaggtacaggagaggcagcatgcttgggctgacccagcatctcccagcaagacctcatctgtggagctgccacagagaagtttgtagccaggtactgcattctctcccatcctggggcagcactccccagagctgtgccagcaggggggctgtgccaacctgttcttagagtgtagctgtaagggcagtgcccatgtgtacattctgcctagagtgtagcctaaagggcagggcccacgtgtatagtatctgtatataagttgctgtgtgtctgtcctgatttctacaactggagtttttttatacaatgttctttgtctcaaaataaagcaatgtgttttttcgg

SEQ ID NO: 22019 - DNA, 848 bp, Homo Sapiens
gcacgaggccgggctctgccatcttaacaaaccctgttcttgggtgggtgtgggtataatactaagttgagatgatatcatttacgggggaaggcgctttgtgaagtaggccttatttctcttgtcctttcgtacagggaggaatttgaagtaaatagaaaccgacctggattactccggtctgaactcagatcacgtaggactttaatcgttgaacaaacgaacctttaatagcggctgcaccatcgggatgtcctgatccaacatcgaggtcgtaaaccctattgttgatatggactctagaataggattgcgctgttatccctagggtaacttgttccgttggtcaagttattggatcaattgagtatagtagttcgctttgactggtgaagtcttagcatgtactgctcggaggttgggttctgctccgaggtcgccccaaccgaaatttttaatgcaggtttggtagtttaggacctgtgggtttgttaggtactgtttgcattaataaattaaagctccatagggtcttctcgtcttgctgtgtcatgcccgcctcttcacgggcaggtcaatttcactggttaaaagtaagagacagctgaaccctcgtggagccattcatacaggtccctatttaaggaacaagtgattatgctacctttgcacggttagggtaccgcggccgttaaacatgtgtcactgggcaggcggtgcctctaatactggtgatgctagaggtgatgtttttgggaaacaggcggggtaagatttgcccaattccttttactttttttaaccctttccttatgaccatgcctgtggtggggttgacaggtgagggg

SEQ ID NO: 22020 - DNA, 1048 bp, Homo Sapiens
  misc_feature (552)..(624): n is a, c, g, or t
cgggctgcaggaattcggcacgaggatgatatcatttacgggggaaggcgctttgtgaagtaggccttatttctcttgtcctttcgtacagggaggaatttgaagtagatagaaaccgacctggattactccggtctgaactcagatcacgtaggactttaatcgttgaacaaacgaacctttaatagcggctgcaccatcgggatgtcctgatccaacatcgaggtcgtaaaccctattgttgatatggactctagaataggattgcgctgttatccctagggtaacttgttccgttggtcaagttattggatcaattgagtatagtagttcgctttgactggtgaagtcttaacatgtactgctcggaggttgggttctgctccgaggtccccccaaccgaaatttttaatgcaggtttggtaatttaagacctgtgggttagggtcttctcgtcttgctgtgttatgcccgcctcttcccggccaggtctatttcactggttaaaagtaagagacagttgatccttcgtggaggggggggccgtaaccnnnnnnnnnnnnnnnnnnnnnnnnnnnnnnnnnnnnnnnnnnnnnnnnnnnnnnnnnnnnnnnnnnnnnnnnngttaacaacttatcgctttgcaagcatactcctttcgcagctgggaataagaagaggcccgcacgatctctttctaaagtgcgcatctgaaagcgatggacgcgcctggtacgccgcataaccgcgcggtgtggggttagcggcaggtgaccgctaatttgccagctcctaagccgtttcctttggttccttctttctttccgccgttggcgggtttcccggtgagtcaaatgcggggctccttataggttcgaataggccttacgcccctcgatcaaaaaatttgattaagggttatggtacgtaggggccatgggcttgataaagcggtttttccccttggacggtggagttgcattctttaaaaggggaccctgtttcaaaatgaaaacacatctcacccctaactttgtgggaaaattcc

SEQ ID NO: 22021 - DNA, 1153 bp, Homo Sapiens
  misc_feature (754)..(762): n is a, c, g, or t
gcacgagggctgaatgacacagccccacgagccatggctgtgctggagtcactacgggtcatcatcaccaactttcctgctgccaagtccttggacatccaggtgcccaacttcccagctgatgagaccaaaggcttccatcaggttccctttgcacccattgtcttcattgagaggactgacttcaaggaggagccagagccaggatttaagcgcctggcttggggccagcctgtgggcctgaggcatacaggctacgtcattgagctgcagcatgttgtcaagggccccagtggttgtgtagagagtctggaggtgacctgcagacgggcagatgctggagagaagccaaaggcctttattcactgggtgtcacagcctttgatgtgtgaggttcgcctctatgagcgactattccagcacaagaaccctgaagatcctactgaggtgcctggtggatttttaagtgacctgaacctggcatcactacacgtggtggatgcagcattagtggactgctctgtggccctggcaaaacccttcgacaagttccagtttgagcgtcttggatatttctccgtggatccagacagccatcagggaaagcttgtctttaaccgaactgtcacactgaaggaagacccaggaaaggtgtgagctggaagcactgaacctacctcatcctcctggagggtgtggctaccctcgccaccccaaattccatgtcaataaagaacagctaaattctcctagnnnnnnnnncctgggggcctctctcaaggatgaggttttgaagattatgccagtgcagaagcagacccgtgccggccagcgcaccaggttcaaggcatttgttgctatcggggactacaatggccacgtcggtctgggtgttaagtgctccaaggaggtggccaccgccatccgtggggccatcatcctggccaagctctccatcgtccccgtgcgcagaggctactgggggaacaagatcggcaagccccacactgtcccttgcaggtgacaggccgctgcggctctgtgctggtacgcctcatccctgcacccaggggcactggcatcgtctccgcacctgtgcctagaagctgctcatgatggctggtatcgatgactgctacacctcagcccgggg

SEQ ID NO: 22022 - DNA, 958 bp, Homo Sapiens
cccacgcgtccgcaaaacaccaaatggcggatgacgccggtgcagcgggggggcccgggggccctggtggccctgggatggggaaccgcggtggcttccgcggaggtttcggcagtggcatccggggccggggtcgcggccgtggacggggccggggccgaggccgcggagctcgcggaggcaaggccgaggataaggagtggatgcccgtcaccaagttgggccgcttggtcaaggacatgaagatcaagtccctggaggagatctatctcttctccctgcccattaaggaatcagagatcattgatttcttcctgggggcctctctcaaggatgaggttttgaagattatgccagtgcagaagcagacccgtgccggccagcgcaccaggttcaaggcatttgttgctatcggggactacaatggccacgtcggtctgggtgttaagtgctccaaggaggtggccaccgccatccgtggggccatcatcctggccaagctctccatcgtccccgtgcgcagaggctactgggggaacaagatcggcaagccccacactgtcccttgcaaggtgacaggccgctgcggctctgtgctggtacgcctcatccctgcacccaggggcactggcatcgtctccgcacctgtgcctaagaagctgctcatgatggctggtatcgatgactgctacacctcagcccggggctgcactgccaccctgggcaacttcgccaaggccacctttgatgccatttctaagacctacagctacctgacccccgacctctggaaggagactgtattcaccaagtctccctatcaggagttcactgaccacctcgtcaagacccacaccagagtctccgtgcagcggactcaggctccagctgtggctacaacatagggtttttatacaagaaaaataaagtgaattaagcgtgaaaaaaaacctcgtgc

SEQ ID NO: 22023 - DNA, 488 bp, Homo Sapiens
gcacgaggatcacccgtggcgacccgctgaatttaagcatattagtcagcggaggagaagaaactaaccaggattccctcagtaacggcgagtgaacagggaagagcccagcgccgaatccccgccccgcggcggggcgcgggacatgtggcgtacggaagacccgctccccggcgccgctcgtggggggcccaagtccttctgatcgaggcccagcccgtggacggtgtgaggccggtagcggcccccggcgcgccgggcccgggtcttcccggagtcgggttgcttgggaatgcagcccaaagcgggtggtaaactccatctaaggctaaataccggcacgacgatgaggtgaccgtcacggacgataatatctatgccctcattaaagcagccggtgtaaatgttgagcctttttggcctggcttgtttgcaaaggccctggccaacgtcaacattgggagcctcatctggaatgtatgggccgg

SEQ ID NO: 22024 - DNA, 598 bp, Homo Sapiens
ccgcggtggcggccgctctagaacccaaaaaaaatcccccgggctgcaggaattcggcacgaggcacgccgccaaggtgctcgggtccttccgaggaagctaaggctgcgttggggtgaggccctcacttcatccggcgactagcaccgcgtccggcagcgccagccctacactcgcccgcgccatggcctctgtctccgagctcgcctgcatctactcggccctcattctgcacgacgatgaggtgacagtcacggaggataagatcaatgccctcattaaagcagccggtgtaaatgttgagcctttttggcctggcttgtttgcaaaggccctggccaacgtcaacattgggagcctcatctgcaatgtaggggccggtggacctgctccagcagctggtgctgcaccagcaggaggtcctgccccctccactgctgctgctccagctgaggagaagaaagtggaagcaaagaaagaagaatccgaggagtctgatgatgacatgggctttggtctttttgactaaacctcttttataacatgttcaataaaaagctgaactttaaacctcgtgccgaattcctgcagcccgggg

SEQ ID NO: 22025 - DNA, 1174 bp, Homo Sapiens
gcacgaggcctctctgaagagtgagatgagggaagtggaaggagagctggaaaggaaggagctggagtttgacacgaatatggatgcagtacagatggtgattacagaagcccagaaggttgatacgagagccaagaacgctggggttacaatccaagacacactcaacacattagacggcctcttgcatctgatggaccagcctctcagtgtagatgaagaggggctggtcttattggagcagaagctttctcgagctaagacttagatcaatagccaactgcggcccatgatgtcagagctggaagagagggcacgtcagcagaggggccacctccatttgctggagacaagcatagatgggattttggttgatgtgaagaacttggagaacattagggacaacctgcccctaggctgctacaatacctaggctcttgagcaacagtgaagctgccataaagatttctcaactgaggttcttgggatacagatctcagggctcgggagccatgtcatgtgagtgggtgggatggggacatttgaacatgtttaatgggtatgctcaggtcaactgacctgaccccattcctgatcccatggccaggtggttgtcttattgcaccatactccttgcttcctgatgctgggcaatgaggcagatagcactgggtgtgagaatgatcaaggatctggaccccaaagaatagactggatggaaagacaaactgcacaggcagatgtttgcctcataatagtcgtaagtggagtcctggaatttggacaagtgctgttgggatatagtcaacttattctttgagtaatgtgactaaaggaaaaaactttgactttgcccaggcatgaaattcttcctaatgtcagaacagagtgcaacccagtcacactgtggccagtaaaatactattgcctcatattgtcctctgcaagcttcttgctgatcagagttcctcctacttacaacccagggtgtgaacatgttctccattttcaagctggaagaagtgagcagtgttggagtgaggacctgtaaggcaggcccattcagagctatggtgcttgctggtgcctgccaccttcaagttctggacctgggcatgacatcctttcttttaatgatgccatggcaacttagagattgcatttttattaaagc

SEQ ID NO: 22026 - DNA, 1524 bp, Homo Sapiens
gcacgaggcctggattcagtgtctcggcttcagggagtcagtgatcagtcctttcaggtggaagaagcaaagaggatcaaacaaaaagcggattcactctcaagcctggtaaccaggcatatggatgagttcaagcgtacacagaagaatctgggaaactggaaagaagaagcacagcagctcttacagaatggaaaaagtgggagagagaaatcagatcagctgctttcccgtgccaatcttgctaaaagcagagcacaagaagcactgagtatgggcaatgccactttttatgaagttgatagcatccttaaaaacctcagagagtttgacctgcaggtggacaacagaaaagcagaagctgaagaagccatgaagagactctcctacatcagccagaaggtttcagatgccagtgacaagacccagcaagcagaaagagccctggggagcgctgctgctgatgcacagagggcaaagaatggggccggggaggccctggaaatctccagtgagattgaacaggagattgggagtctgaacttggaagccaatgtgacagcagatggagccttggccatggaaaagggactggcctctctgaagagtgagatgagggaagtggaaggagagctggaaaggaaggagctggagtttgacacgaatatggatgcagtacagatggtgattacagaagcccagaaggttgataccagagccaagaacgctggggttacaatccaagacacactcaacacattagacggcctcctgcatctgatggaccagcctctcagtgtagatgaagaggggctggtcttactggagcagaagctttcccgagccaagacccagatcaacagccaactgcggcccatgatgtcagagctgggcaatgaggcagatagcactgggtgtgagaatgatcaaggatctggaccccaaagaatagactggatggaaagacaaactgcacaggcagatgtttgcctcataatagtcgtaagtggagtcctggaatttggacaagtgctgttgggatatagtcaacttattctttgagtaatgtgactaaaggaaaaaactttgactttgcccaggcatgaaattcttcctaatgtcagaacagagtgcaacccagtcacactgtggccagtaaaatactattgcctcatattgtcctctgcaagcttcttgctgatcagagttcctcctacttacaacccagggtgtgaacatgttctccattttcaagctggaagaagtgagcagtgttggagtgaggacctgtaaagcaggcccattcagagctatggtgcttgctggtgcctgccaccttcagttctggacctgggcatgacatcctttcttttaatgatgccatggcacttagagattgcatttttattaaagcatttcctaccagcaaagcaaatgttggggaagtatttacttttttcggtttcaaaatgatagaaagtgtggcttggggcattggaaaaaggtaaattctctaaatttata

SEQ ID NO: 22027 - DNA, 717 bp, Homo Sapiens
gttttccaaccacacacgggagggatatgggtagggggaggggtctgtccatccagccctggcccccagcccatgtggttttggcagcaataaggggtatggggtaatggcccaaaaaataaaatggtttgtgtgtgtatggggaggaaaggggtgcaaagctgtggggagcggtgaaggggaagggacagacgaggtcagtactgggaacgccgaaggggggaggccatttcataacatttcttgttgatcaaaccaccgtggacaccttctttgcccatcagcaggactagcgctggaggaggaggaaagaaaaaggaggctaggatccaggtgtcacaattccaccccctgccagctgttcagcagctgtccagccctgggggctgtaacccaacctcatctctcccaacccgcccccccaccacacacaggcaggctgtcagtcaccctgaaacaataaggcttttcaaaagaggaaaatcaagcttaaacgctggagaggaacagactaaaaacttaggggtcaaaggctcataaactgttgattcatgtgttcaggctagaaagggctgtggatgtgcatgccacctccaggttctaacaaaagaactcaaacgatgaactcgatgattcaggacccccacaatctacctatactcctagaaaacagtttctaatcccgagctccagggcagtaagtaatttaagaagtaa

SEQ ID NO: 22028 - DNA, 762 bp, Homo Sapiens
gcacgaggagcgagcggagccgcggtccggacggcagcgcgtgccccgagctctccgcctccccccgcccgccagccgaggcagctcgagcccagtccgcggccccagcagcagcgccgagagcagccccagtagcagcgccatggccgggtggaacgcctacatcgacaacctcatggcggacgggacctgtcaggacgcggccatcgtgggctacaaggactcgccctccgtctgggccgccgtccccgggaaaacgttcgtcaacatcacgccagctgaggtgggtgtcctggttggcaaagaccggtcaagtttttacgtgaatgggctgacacttgggggccagaaatgttcggtgatccgggactcactgctgcaggatggggaatttagcatggatcttcgtaccaagagcaccggtggggcccccaccttcaatgtcactgtcaccaagactgacaagacgctagtcctgctgatgggcaaagaaggtgtccacggtggtttgatcaacaagaaatgttatgaaatggcctcccaccttcggcgttcccagtactgacctcgtctgtcccttccccttcaccgctccccacagctttgcacccctttcctccccatacacacacaaaccattttattttttgggccattaccccataccccttattgctgccaaaaccacatgggctgggggccagggctggatggacagacacctccccctacccatatccctcccgtgtgtggttggaaaac

SEQ ID NO: 22029 - DNA, 1171 bp, Homo Sapiens
gcacgaggcccccactggggccaggggaccctggtcaccgtctcctccgtctcctcagcctccaccaagggcccatcggtcttccccctggcgccctgctccaggagcacctccgagagcacagcggccctgggctgcctggtcaaggactacttccccgaaccggtgacggtgtcgtggaactcaggcgctctgaccagcggcgtgcacaccttcccggctgtcctacagtcctcaggactctactccctcagcagcgtggtgaccgtgacctccagcaacttcggcacccagacctacacctgcaacgtagatcacaagcccagcaacaccaaggtggacaagacagttgagcgcaaatgttgtgtcgagtgcccaccgtgcccagcaccacctgtggcaggaccgtcagtcttcctcttccccccaaaacccaaggacaccctcatgatctcccggacccctgaggtcacgtgcgtggtggtggacgtgagccacgaagaccccgaggtccagttcaactggtacgtggacggcatggaggtgcataatgccaagacaaagccacgggaggagcagttcaacagcacgttccgtgtggtcagcgtcctcaccgtcgtgcaccaggactggctgaacggcaaggagtacaagtgcaaggtctccaacaaaggcctcccagcccccatcgagaaaaccatctccaaaaccaaagggcagccccgagaaccacaggtgtacaccctgcccccatcccgggaggagatgaccaagaaccaggtcagcctgacctgcctggtcaaaggcttctaccccagcgacatcgccgtggagtgggagagcaatgggcagccggagaacaactacaagaccacacctcccatgctggactccgacggctccttcttcctctacagcaagctcaccgtggacaagagcaggtggcagcaggggaacgtcttctcatgctccgtgatgcatgaggctctgcacaaccactacacacagaagagcctctccctgtctccgggtaaatgagtgccacggccggcaagcccccgctccccaggctctcggggtcgcgcgaggatgcttggcacgtaccccgtgtacatacttcccaggcacccagcatggaaataaagcacccagcgctgccctgggcccctgc

SEQ ID NO: 22030 - DNA, 1390 bp, Homo Sapiens
catggataaaatgtgcatatttatttcagggcaacaagcgtatacacagcaaagcagtgtggggtaaagcccacctcgtggcctgcaagccagccagcccctgccggtcgagaaggaagcctgtgtgaaagcacacaactggaggccgggcggggaaaaaaaacacgtgccaacaggccacgcaggccaggaccccaaacccggaggctgcgcccctttgagttcctctctctggtctccgatgttcttctgttgggatcatttcaccttgaacaaggtgacggtggtactgtaaaaaaggctcaggaggaaaaggacgatgaaggtggaggcggtggcccacaggttctcaaagccctcctcgtcggcgctcacctccccctcggtggacttgtccacggtcctctcggtgaccctgttgggcagggcctcatgggccaccacgcaggtgtaggtctcccccgtgttccattcctcttcggacacggtcaggatgctgtgggcgaagtaccggcctggggcctggggctcaggcattggggcgctggtcacatacttctccggggacaagggctgccccctctgcatccactgcacgaagacgtccgcgggagagaagcccgtcaccaggcacgtgatggtggccgactcccgcaggttcagctgctcccgggctggtggcagcaagtagacatcgggcctgtgcagggccacccccttgggccgggagatggtctgcttcagtggcgagggcaggtctgtgtgggtcacggtgcacgtgaacctctccccggaattccaggagaaagtgatggagtcgggaaggaagtcctgtgcgaggcagccaacggccacgctgctcgtatccgacggggaattctcacaggagacgagggggaaaagggttggggcggatgcactccctgaagagacggtgaccattgtcccttggccccagagatcaaaagtatcagtcccaggcaaggactctctcgcacagaaataaacagccgtgtcctcggctctcaggctgttcatttgcagatacagtgagttcttggcgttgtctctggagatggtgaatcggcccttcacagagtctgcgtagaatatgggactaccactaccaacaatgtatgaaacccactccagtcccttccctggagcctggcggacccagtgcatttcataagtactgaaggtgaatccagaggccgcacaggagagtctcagggaccctccaggctgtaccaagcctcccccagactccaccagctgcacctcacactggacaccttctaaaatagcaacaaggaaaacccagcacagccccaactccatgctgagtcctctgtgttcagtgctgatcaccaaaaggaaatcctcgtgc

SEQ ID NO: 22031 - DNA, 1530 bp, Homo Sapiens
ccacgcgtccgggagactctggggccaagggacaatggtcaccgtctcctcagggagtgcatccgccccaacccttttccccctcgtctcctgtgagaattccccgtcggatacgagcagcgtggccgttggctgcctcgcacaggacttccttcccgactccatcactttctcctggaaatacaagaacaactctgacatcagcagcacccggggcttcccatcagtcctgagagggggcaagtacgcagccacctcacaggtgctgctgccttccaaggacgtcatgcagggcacagacgaacacgtggtgtgcaaagtccagcaccccaacggcaacaaagaaaagaacgtgcctcttccagtgattgctgagctgcctcccaaagtgagcgtcttcgtcccaccccgcgacggcttcttcggcaacccccgcaagtccaagctcatctgccaggccacgggtttcagtccccggcagattcaggtgtcctggctgcgcgaggggaagcaggtggggtctggcgtcaccacggaccaggtgcaggctgaggccaaagagtctgggcccacgacctacaaggtgaccagcacactgaccatcaaagagagcgactggctcagccagagcatgttcacctgccgcgtggatcacaggggcctgaccttccagcagaatgcgtcctccatgtgtgtccccgatcaagacacagccatccgggtcttcgccatccccccatcctttgccagcatcttcctcaccaagtccaccaagttgacctgcctggtcacagacctgaccacctatgacagcgtgaccatctcctggacccgccagaatggcgaagctgtgaaaacccacaccaacatctccgagagccaccccaatgccactttcagcgccgtgggtgaggccagcatctgcgaggatgactggaattccggggagaggttcacgtgcaccgtgacccacacagacctgccctcgccactgaagcagaccatctcccggcccaagggggtggccctgcacaggcccgatgtctacttgctgccaccagcccgggagcagctgaacctgcgggagtcggccaccatcacgtgcctggtgacgggcttctctcccgcggacgtcttcgtgcagtggatgcagagggggcagcccttgtccccggagaagtatgtgaccagcgccccaatgcctgagccccaggccccaggccggtacttcgcccacagcatcctgaccgtgtccgaagaggaatggaacacgggggagacctacacctgcgtggtggcccatgaggccctgcccaacagggtcaccgagaggaccgtggacaagtccaccggtaaacccaccctgtacaacgtgtccctggtcatgtccgacacagctggcacctgctactgaccctgctggcctgcccacaggctcggggcggctggccgctctgtgtgtgcatgcaaactaaccgtgtcaacggggtgagatgttgcatcttataaaattagaaataaaaaagatcc

SEQ ID NO: 22032 - DNA, 987 bp, Homo Sapiens
  misc_feature (330)..(347): n is a, c, g, or t
  misc_feature (394)..(420): n is a, c, g, or t
  misc_feature (587)..(772): n is a, c, g, or t
  misc_feature (783)..(791): n is a, c, g, or t
  misc_feature (893)..(903): n is a, c, g, or t
gcacgaggggagtggcaggtattatgacagtcgacctggagggtatggatatggatatggacgttccagagactataatggcagaaaccagggtggttatgaccgctactcaggaggaaattacagagacaattatgacaactgaaatgagacatgcacataatatagatacacaaggaataatttctgatccaggatcgtccttccaaatggctgtatttataaaggtttttggagctgcactgaagcatcttattttatagtatatcaaccttttgtttttaaattgacctgccaaggtagctgaagaccttttagacagttccatcnnnnnnnnnnnnnnnnnnctgcctatttaaagacaaattatgggacgtttgtagaacctgagtannnnnnnnnnnnnnnnnnnnnnnnnnngagctcttaggtttattggagctagcaataattggttctggcaagtttggccagactgacttcaaaaaattaatgtgtatccagggacattttaaaaacctgtacacagtgtttattgtggttaggaagcaatttcccaatgtacctataagaaatgtgcatcaagnnnnnnnnnnnnnnnnnnnnnnnnnnnnnnnnnnnnnnnnnnnnnnnnnnnnnnnnnnnnnnnnnnnnnnnnnnnnnnnnnnnnnnnnnnnnnnnnnnnnnnnnnnnnnnnnnnnnnnnnnnnnnnnnnnnnnnnnnnnnnnnnnnnnnnnnnnnnnnnnnnnnnnnnnnnnnnnnnnnnnnnnnnactccatctcnnnnnnnnnggaaatgtgtatcaagaacatgattatccaggggtattttctaattcagatcatcaaactgattatatagaagagttggctttaaaatgtttgcaaatgtcnnnnnnnnnnnaatactggaagaaaaaatattctgttgtgtctcatacagtgcttaggatgtctttcacagagcttattaaaaagatgaaacctg

SEQ ID NO: 22033 - DNA, 1378 bp, Homo Sapiens
  misc_feature (720)..(737): n is a, c, g, or t
  misc_feature (785)..(811): n is a, c, g, or t
  misc_feature (978)..(1163): n is a, c, g, or t
  misc_feature (1174)..(1182): n is a, c, g, or t
  misc_feature (1284)..(1294): n is a, c, g, or t
gcacgagggctcgctgttcgtccgggttttttacgttttaatttccaggacttgaactgccatgtcctctgaagaaggaaagctcttcgtgggagggctcaactttaacaccgacgagcaggcactggaagaccacttcagcagtttcggacctatctctgaggtggtcgttgtcaaggaccgggagactcagcggtccaggggttttggtttcatcaccttcaccaacccagagcatgcttcagttgccatgagagccatgaacggagagtctctggatggtcgtcagatccgtgtggatcatgcaggcaagtctgctcggggaaccagaggaggtggctttggggcccatgggcgtggtcgcagctactctagaggtggtggggaccagggctatgggagtggcaggtattatgacagtcgacctggagggtatggatatggatatggacgttccagagactataatggcagaaaccagggtggttatgaccgctactcaggaggaaattacagagacaattatgacaactgaaatgagacatgcacataatatagatacacaaggaataatttctgatccaggatcgtccttccaaatggctgtatttataaaggtttttggagctgcactgaagcatcttattttatagtatatcaaccttttgtttttaaattgacctgccaaggtagctgaagaccttttagacagttccatcnnnnnnnnnnnnnnnnnnctgcctatttaaagacaaattatgggacgtttgtagaaacctgagtannnnnnnnnnnnnnnnnnnnnnnnnnngagctcttaggtttattggagctagcaataattggttctggcaagtttggccagactgacttcaaaaaattaatgtgtatccagggacattttaaaaacctgtacacagtgtttattgtggttaggaagcaatttcccaatgtacctataagaaatgtgcatcaagnnnnnnnnnnnnnnnnnnnnnnnnnnnnnnnnnnnnnnnnnnnnnnnnnnnnnnnnnnnnnnnnnnnnnnnnnnnnnnnnnnnnnnnnnnnnnnnnnnnnnnnnnnnnnnnnnnnnnnnnnnnnnnnnnnnnnnnnnnnnnnnnnnnnnnnnnnnnnnnnnnnnnnnnnnnnnnnnnnnnnnnnnnactccatctcnnnnnnnnnggaaatgtgtatcaagaacatgattatccaggggtattttctaattcagatcatcaaactgattatatagaagagttggctttaaaatgtttgcaaatgtcnnnnnnnnnnnaatactggaagaaaaaatattctgttgtgtctcatacagtgcttaggatgtctttcacagagcttattaaaaagatgaaacctg

SEQ ID NO: 22034 - DNA, 1297 bp, Homo Sapiens
  misc_feature (569)..(638): n is a, c, g, or t
gcacgaggcgtgcgcggttgttctctggagcagcgttcttttatctccgtccgccttctctcctacctaagtgcgtgccgccacccgatggaagattcgatggacatggacatgagccccctgaggccccagaactatcttttcggttgtgaactaaaggccgacaaagattatcactttaaggtggataatgatgaaaatgagcaccagttatctttaagaacggtcagtttaggggctggtgcaaaggatgagttgcacattgttgaagcagaggcaatgaattacgaaggcagtccaattaaagtaacactggcaactttgaaaatgtctgtacagccaacggtttcccttgggggctttgaaataacaccaccagtggtcttaaggttgaagtgtggttcagggccagtgcatattagtggacagcacttagtagctgtggaggaagatgcagagtcagaagatgaagaggaggaggatgtgaaactcttaagtatatctggaaagcggtctgcccctggaggtggtagcaaggttccacagaaaaaagtaaaacttgctgctgnnnnnnnnnnnnnnnnnnnnnnnnnnnnnnnnnnnnnnnnnnnnnnnnnnnnnnnnnnnnnnnnnnnnnnggaagctgaagaaaaagcgccagtgaagaaatctatacgagatactccagccaaaaatgcacaaaagtcaaatcagaatggaaaagactcaaaaccatcatcaacaccaagatcaaaaggacaagaatccttcaagaaacaggaaaaaactcctaaaacaccaaaaggacctagttctgtagaagacattaaagcaaaaatgcaagcaagtatagaaaaaggtggttctcttcccaaagtggaagccaaattcatcaattatgtgaagaattgcttccggatgactgaccaagaggctattcaagatctctggcagtggaggaagtctctttaagaaaatagtttaaacaatttgttaaaaaattttccgtcttatttcatttctgtaacagttgatatctggctgtcctttttataatgcagagtgagaactttccctaccgtgtttgataaatgttgtccaggttctattgccaagaatgtgttgtccaaaatgcctgtttagtttttaaagatggaactccaccctttgcttggttttaagtatgtatggaatgttatgataggacatagtagtagcggtggtcagacatggaaatggtggggagacaaaaatatacatgtgaaataaaactcagtattttaataaagcctcgtgc

SEQ ID NO: 22035 - DNA, 798 bp, Homo Sapiens
  misc_feature (373)..(384): n is a, c, g, or t
gcacgaggttttttttattaaaatactgagttttatttcacatgtatatttttgtctccccaccatttccatgtctgaccaccgctactactatgtcctatcataacattccatacatacttaaaaccaagcaaagggtggagttccatctttaaaaactaaacaggcattttggacaacacattcttggcaatagaacctggacaacatttatcaaacacggtagggaaagttctcactctgcattataaaaaggacagccagatatcaactgttacagaaatgaaataagacggaaaattttttaacaaattgtttaaactattttcttaaagagacttcctccactgccagagatcttgaatagcctggnnnnnnnnnnnngaaatgtggttaaggaaccacaacacttcatagacatcaataaattaaatgtctctttgcatagttcaacatctatttttcattctaccaccagagagttaactctagataaagatatgactccaagaaaatttatactcagatgtaatttaattccaaacactttaatcagtcataaaaatgtgaacaatatactaataattatttaatagtttagcattatttacttaaggaaatcaacagaaagaacagagacccctatggccaatgttacttccaacttcatctcccgagatcagctttagagttggccagatttggcaaataaagttacataaacaccagaaacttattctgaattgcctgtgcatgtgtgcctgggcatgtgtacatttagaaaaaactatatgctga

SEQ ID NO: 22036 - DNA, 920 bp, Homo Sapiens
cgcacgagggggtactgggacatccgcgggctggcccacgccatccgcctgctcctggaatacacagactcaagctacgaggaaaagaagtatacgatgggggacgctcctgactatgacagaagccagtggctgaatgaaaaattcaagctgggcctggactttcccaatctgccctacttgattgatggggctcacaagatcacccagagcaacgccatcctgtgctacattgcccgcaagcacaacctgtgtggggagacagaagaggagaagattcgtgtggacattttggagaaccaggctatggacgtctccaatcagctggccagagtctgctacagccctgactttgagaaactgaagccagaatacttggaggaacttcctacaatgatgcagcacttctcacagttcctggggaagaggccatggtttgttggagacaagatcacctttgtagatttcctcgcctatgatgtccttgacctccaccgtatatttgagcccaactgcttggacgccttcccaaatctgaaggacttcatctcccgctttgagggcttggagaagatctctgcctacatgaagtccagccgcttcctcccaaaacctctgtacacaagggtggctgtctggggcaacaagtaatgccttgaaggccaggaggtgggagtgaggagcccatactcagcctgctgcccaggctgtgcagcgcagctggactctgcatcccagcacctgcctcctcgttcctttctcctgtttattcccatctttacccccaagactttattgggcctcttcacttcccctaaacccctgtcccatgcagggccctttgaagcctcagctacccactttccttcatgaacatccccctcccaacactacccttccctgcacaaaagccagcctga

SEQ ID NO: 22037 - DNA, 666 bp, Homo Sapiens
gcacgaggctttatgagatgaagtccaagtaggaatgagcttgtaaattatctctgtcctcaggtcctgtgttaatttatccctgtcagtgttttgtgatcattatgtcatggaggatttcccctgccacaccatgctgtagggagttaacttttcatttgtgcattttctgtttggaaacagcttactgcagagtgggtctgggcatctgctacgacatgcggtttgcagagcttgcacaaatctacgcacagagaggctgccagctgttggtatatccaggagcttttaatctgaccactggaccagcccattgggagttacttcagcgaagccgggctgttgataatcaggtgtatgtggccacagcctctcctgcccgggatgacaaagcctcctatgttgcctggggacacagcaccgtggtgaacccttggggggaggttctagccaaagctggcacagaagaagcaatcgtgtattcagacatagacctgaagaagctggctgaaatacgccagcaaatccccgtttttagacagaagcgatcagacctctatgctgtggagatgaaaaagccctaaagtttatgtttctaatgtgtcacagaataggacgatatgattctacaacataatcaactccctattaaattctttaatgaag

SEQ ID NO: 22038 - DNA, 930 bp, Homo Sapiens
gcacgaggggttagcgtcggcggcttttggcatggcgactttttctggcccggctgggccaatcctgtcgcttaatccgcaggaagatgtcgagtttcaaaaggaggtggcgcaggttcgcaagcgcataacccaggtgagcaggcaccctggcccaggctgcgagcgggggcgatggaccgggtctagagggtatctggggttgcacggtttccggcccgggcgccccttgccttcgtgctcgccttcattacctccagggtctcccaagtggattcgaccgaatcagggaccgacctcttaagcttgcaggccacggtttccgagacgaaagggtttacgctgttcggtaaatgatggaggggtttggccgctgaggccctggagccttcatgtggagggtaacggggaagtattggggtgacagaagcagtagaaagaaccagctggagggaataggctcctataccacaggttatctccgggttagagctgtcacgcttccgcgtttcccccaaaaatgggagccccagacttaacacattcgggaagtttgtatgccgggttggtgatctgggagttattaaaatagagtatttgccaggttccacttgctgactagggcccctgacatcgcttatactttctgtggtttttagcataaaatacacaggaaaacttagaagttcctgttacagaggtaaggctatgatgactgagacgttgaaaggctaatctgtaccgtgagagttaacaagcgtatcgaaaatttttcgatgaagtgcgagtaaacagtaatatgcataccaaattgaagcctacgtttatgtagagttctctgggcagagatctaaaatggcttgttcaaagatgtccttgcttatccgttgattgacatagtattgagctctaatatatactgggtgctgg

SEQ ID NO: 22039 - DNA, 1616 bp, Homo Sapiens
gcacgagggcggcttttggcatggcgactttttctggcccggctgggccaatcctgtcgcttaatccgcaggaagatgtcgagtttcaaaaggaggtggcgcaggttcgcaagcgcataacccagcgaaaaaaacaagaacaacttactcctggagtagtctatgtgcgccacctacctaacctacttgacgaaacccagatcttttcatatttctcccagtttggcactgtgacacggttcaggctgtccagaagtaaaaggactggaaatagcaaaggctatgcatttgtggagtttgagtctgaggatgttgccaaaatagttgctgaaacaatgaacaactacctgtttggtgaaagactcttggagtgtcattttatgccacctgaaaaagtacataaagaactctttaaagactggaatattccatttaagcagccatcatatccatcagtgaaacggtataatcggaatcggacactaacacaaaagctacggatggaggagcgatttaaaaagaaagaaagattactcaggaagaaattagctaaaaaaggaattgactatgattttccttctttgattttacagaaaacggaaagtatttcaaaaactaatcgtcagacgtctacaaaaggccaggttttacgtaagaagaagaaaaaagtttcaggtactcttgacactcctgagaagactgtggatagccagggccccacaccagtttgtacaccaacatttttggagaggcgaaaatctcaagtggctgaactgaatgatgatgataaagatgatgaaatagttttcaaacagcccatatcctgtgtaaaagaagaaatacaagagactcaaacacctacacattcacggaaaaaaagacgaagaagcagcaatcagtgattttcaatgtattatatttcttttgaaaaatataatatttttatgagagtggactttgtatttcactaggtacaatggaatacaacctttgacaagattttcagaggaaaaatacactgtttggtcaagttaaggaaagcagtgtgtaattttggattgcctgcccttggctgaaatacaggggtgcataccatcttgcagtggcttggctgacattgcctctttgtcctggcctctagttttcttttgatatttcatagctctccttagtttactctgcctggatagaaagttgaccactaactgcaggtttaagtactaaactgcagccttttctgtcgccagcaattaaagaccaccaatcttgtttgtccatctacatggtttgtcggggacatttaactcatggaggtgctttagatttcaacatcagatggttgaagctggaagtttaattatatgtagagtgagaaggcagttccagttttagcacagatttgtttatgtgttcagattttaatagagattcaaaaatgactcatttttaccaataatgttaaattagttttggttgtgctagcatgaattaataaccaccattttataccagtatcatcagtgaagaattgtatttcaagattcaaacaataaccagcaattaaacttttttctacaatgtatttgtttgcgagtaggacttgggagtcattgggg

SEQ ID NO: 22040 - DNA, 1158 bp, Homo Sapiens
  misc_feature (50)..(65): n is a, c, g, or t
  misc_feature (775)..(784): n is a, c, g, or t
gcacgaggatttaattctgagttttgggggccagcctagagggaattccnnnnnnnnnnnnnnnnaaccccccaggggggtagttgggagtgagactataggccataaagaatgggactgcattggaccaaaataaatgggaaaatcgtggtttgaaaagaagcttttgggaagtgatgagtcattttgcaccaggtaataggggaaaattgtgtgacctccagcaaacacatgaatggttatttcctggagccggaagcacttgggggtcgtggtaattcccagtgttttctgtgtcctagttttaccctttctaaacactgtcctttttgaaagttttgaatatatccacattctattgaaaccttgaaactaaaaatttagactcttatcgtcatcttaagttcttcatgctactcttaacctcccaaaaagcagtatctaagtcacatacatgatgtcttgggcattttctgagccatggagaactctgaaaggaagaatcgctgcttttctcaagcaaatcggtttcttgatgtcttttggttctccttgcctgctcctgatgcttggaccccttttattgatcagagtgctctagaataatggatggtcttggatgatggataaatagggacagggacagttaaattgggagcctttcttacaaccttgatgggatttttccccccaagtttccttctccactgaaatgccacactaatgcttgttggattcatgaggtggccagaccaatgtgttgttttgttgttgnnnnnnnnnnaagcttcccttgagagaataaatggtaatggagagaactatttaacaaggtcctggtttctcttgcaacacagtagctaaacttgcctgcttttatatgcatttttgtagggatcagcttggtagacagtattagcggagaaacaccttgatcttggtttgcaagcccttctcccatcagtcctagattaggccctgttcagccatgcaggggtgttggtttatgcgtgctgcagcagtgggcataatgaatataatttacccagtggacaaaggtgtgtaccaagtgaatttaaataattggtgtggattggccagtagctaagtgggcttttaaagagtattgaagattgaaagggtttttctttctttttt

SEQ ID NO: 22041 - DNA, 823 bp, Homo Sapiens
  misc_feature (124)..(133): n is a, c, g, or t
gcacgaggctttcttacaaccttgatgggatttttccccccaagtttccttctccactgaaatgccacactaatgcttgttggattcatgaggtggccagaccaatgtgttgttttgttgttgnnnnnnnnnnaagcttcccttgagagaataaatggtaatggagagaactatttaacaaggtcctggtttctcttgcaacacagtagctaaacttgcctgcttttatatgcatttttgtagggatcagcttggtagacagtattagcggagaaacaccttgatcttggtttgcaagcccttctcccatcagtcctagattaggccctgttcagccatgcaggggtgttggtttatgcgtgctgcagcagtgggcataatgaatataatttacccagtggacaaaggtgtgtaccaagtgaatttaaataattggtgtggattggccagtagctaagtgggcttttaaagagtattgaagattgaaagggtttttctttcttttttaaaaaagaaaaacaaactattgattgtagataatgaaaagctagggtttgccctcttcatgtctactctccttccaaatagttatatccaaaactgtttttccctctcccctaccttgtcccccctattaaaatagaaacagggattgattaatgtcccgctcctgaatacatgtaaaatttgtacaaaaatatcttctatgaaaatgatttgtaatctgtagacttattacctgggagatgtcttgatgtaaaatcccatcctttgggttgtgggttttttgttttctccaaataaatctgatctttaaagttcc

SEQ ID NO: 22042 - DNA, 1091 bp, Homo Sapiens
gcacgaggatggaatctttgaggtcaagtctacagctggagacacccacttgggtggagaagattttgacaaccgaatggtcaaccattttattgctgagtttaagcgcaagcataagaaggacatcagtgagaacaagagagctgtaagacgcctccgtactgcttgtgaacgtgctaagcgtaccctctcttccagcacccaggccagtattgagatcgattctctctatgaaggaatcgacttctatacctccattacccgtgcccgatttgaagaactgaatgctgacctgttccgtggcaccctggacccagtagagaaagcccttcgagatgccaaactagacaagtcacagattcatgatattgtcctggttggtggttctactcgtatccccaagattcagaagcttctccaagacttcttcaatggaaaagaactgaataagagcatcaaccctgatgaagctgttgcttatggtgcagctgtccaggcagccatcttgtctggagacaagtctgagaatgttcaagatttgctgctcttggatgtcactcctctttcccttggtattgaaactgctggtggagtcatgactgtcctcatcaagcgtaataccaccattcctaccaagcagacacagaccttcactacctattctgacaaccagcctggtgtgcttattcaggtttatgaaggcgagcgtgccatgacaaaggataacaacctgcttggcaagtttgaactcacaggcatgccaggaggaatgcctgggggatttcctggtggtggagctcctccctctggtggtgcttcctcagggcccaccattgaagaggttgattaagccaaccaagtgtagatgtagcattgttccacacatttaaaacatttgaaggacctaaattcgtagcaaattctgtggcagttttaaaaagttaagctgctatagtaagttactgggcattctcaatacttgaatatggaacatatgcacaggggaaggaaataacattgcactttataaacactgtattgtaagtggaaaatgcaatgtcttaaataaaactatttaaaattggcaccat

SEQ ID NO: 22043 - DNA, 2246 bp, Homo Sapiens
gcacgaggcatgaggtttttgtggcttccttcgttattggagccaggcctacaccccagcaaccatgtccaagggacctgcagttggtattgatcttggcaccacctactcttgtgtgggtgttttccagcacggaaaagtcgagataattgccaatgatcagggaaaccgaaccactccaagctatgtcgcctttacggacactgaacggttgatcggtgatgccgcaaagaatcaagttgcaatgaaccccaccaacacagtttttgatgccaaacgtctgattggacgcagatttgatgatgctgttgtccagtctgatatgaaacattggccctttatggtggtgaatgatgctggcaggcccaaggtccaagtagaatacaagggagagaccaaaagcttctatccagaggaggtgtcttctatggttctgacaaagatgaaggaaattgcagaagcctaccttgggaagactgttaccaatgctgtggtcacagtgccagcttactttaatgactctcagcgtcaggctaccaaagatgctggaactattgctggtctcaatgtacttagaattattaatgagccaactgctgctgctattgcttacggcttagacaaaaaggttggagcagaaagaaacgtgctcatctttgacctgggaggtggcacttttgatgtgtcaatcctcactattgaggatggaatctttgaggtcaagtctacagctggagacacccacttgggtggagaagattttgacaaccgaatggtcaaccattttattgctgagtttaagcgcaagcataagaaggacatcagtgagaacaagagagctgtaagacgcctccgtactgcttgtgaacgtgctaagcgtaccctctcttccagcacccaggccagtattgagatcgattctctctatgaaggaatcgacttctatacctccattacccgtgcccgatttgaagaactgaatgctgacctgttccgtggcaccctggacccagtagagaaagcccttcgagatgccaaactagacaagtcacagattcatgatattgtcctggttggtggttctactcgtatccccaagattcagaagcttctccaagacttcttcaatggaaaagaactgaataagagcatcaaccctgatgaagctgttgcttatggtgcagctgtccaggcagccatcttgtctggagacaagtctgagaatgttcaagatttgctgctcttggatgtcactcctctttcccttggtattgaaactgctggtggagtcatgactgtcctcatcaagcgtaataccaccattcctaccaagcagacacagaccttcactacctattctgacaaccagcctggtgtgcttattcaggtttatgaaggcgagcgtgccatgacaaaggataacaacctgcttggcaagtttgaactcacaggcatacctcctgcaccccgaggtgttcctcagattgaagtcacttttgacattgatgccaatggtatactcaatgtctctgctgtggacaagagtacgggaaaagagaacaagattactatcactaatgacaagggccgtttgagcaaggaagacattgaacgtatggtccaggaagctgagaagtacaaagctgaagatgagaagcagagggacaaggtgtcatccaagaattcacttgagtcctatgccttcaacatgaaagcaactgttgaagatgagaaacttcaaggcaagattaacgatgaggacaaacagaagattctggacaagtgtaatgaaattatcaactggcttgataagaatcagactgctgagaaggaagaatttgaacatcaacagaaagagctggagaaagtttgcaaccccatcatcaccaagctgtaccagagtgcaggaggcatgccaggaggaatgcctgggggatttcctggtggtggagctcctccctctggtggtgcttcctcagggcccaccattgaagaggttgattaagccaaccaagtgtagatgtagcattgttccacacatttaaaacatttgaaggacctaaattcgtagcaaattctgtggcagttttaaaaagttaagctgctatagtaagttactgggcattctcaatacttgaatatggaacatatgcacaggggaaggaaataacattgcactttataaacactgtattgtaagtggaaaatgcaatgtcttaaataaaactatttaaaattggcaccat

SEQ ID NO: 22044 - DNA, 1451 bp, Homo Sapiens
  misc_feature (1406)..(1422): n is a, c, g, or t
cgcacgaggatcaccatggcggctgggaccctgtacacgtatcctgaaaactggagggccttcaaggctctcatcgctgctcagtacagcggggctcaggtccgcgtgctctccgcaccaccccacttccattttggccaaaccaaccgcacccctgaatttctccgcaaatttcctgccggcaaggtcccagcatttgagggtgatgatggattctgtgtgtttgagagcaacgccattgcctactatgtgagcaatgaggagctgcggggaagtactccagaggcagcagcccaggtggtgcagtgggtgagctttgctgattccgatatagtgcccccagccagtacctgggtgttccccaccttgggcatcatgcaccacaacaaacaggccactgagaatgcaaaggaggaagtgaggcgaattctggggctgctggatgcttacttgaagacgaggacttttctggtgggcgaacgagtgacattggctgacatcacagttgtctgcaccctgttgtggctctataagcaggttctagagccttctttccgccaggcctttcccaataccaaccgctggttcctcacctgcattaaccagccccagttccgggctgtcttgggcgaagtgaaactgtgtgagaagatggcccagtttgatgctaaaaagtttgcagagacccaacctaaaaaggacacaccacggaaagagaagggttcacgggaagagaagcagaagccccaggctgagcggaaggaggagaaaaaggcggctgcccctgctcctgaggaggagatggatgaatgtgagcaggcgctggctgctgagcccaaggccaaggaccccttcgctcacctgcccaagagtacctttgtgttggatgaatttaagcgcaagtactccaatgaggacacactctctgtggcactgccatatttctgggagcactttgataaggacggctggtccctgtggtactcagagtatcgcttccctgaagaactcactcagaccttcatgagctgcaatctcatcactggaatgttccagcgactggacaagctgaggaagaatgccttcgccagtgtcatcctttttggaaccaacaatagcagctccatttctggagtctgggtcttccgaggccaggagcttgcctttccgctgagtccagattggcaggtggactacgagtcatacacatggcggaaactggatcctggcagcgaggagacccagacgctggttcgagagtacttttcctgggagggggccttccagcatgtgggcaaagccttcaatcagggcaagatcttcaagtgaacatctcttgccatcacctagctgcctgcacctgcccttcagggagatgggggtcattaaaggaaactgaacattgnnnnnnnnnnnnnnnnnccctcgtgccgaattcctgcagcccgggg

SEQ ID NO: 22045 - DNA, 1159 bp, Homo Sapiens
gcacgaggaccctgtacacgtatcctgaaaactggagggccttcaaggctctcatcgctgctcagtacagcggggctcaggtccgcgtgctctccgcaccaccccacttccattttggccaaaccaaccgcacccctgaatttctccgcaaatttcctgccggcaaggtcccagcatttgagggtgatgatggattctgtgtgtttgagagcaacgccattgcctactatgtgagcaatgaggagctgcggggaagtactccagaggcagcagcccaggtggtgcagtgggtgagctttgctgattccgatatagtgcccccagccagtacctgggtgttccccaccttgggcatcatgcaccacaacaaacaggccactgagaatgcaaaggaggaagtgaggcgaattctggggctgctggatgcttacttgaagacgaggacttttctggtgggcgaacgagtgacattggctgacatcacagttgtctgcaccctgttgtggctctataagcaggttctagagccttctttccgccaggcctttcccaataccaaccgctggttcctcacctgcattaaccagccccagttccgggctgtcttgggggaagtgaaactgtgtgagaagatggcccagtttgatgctaaaaagtttgcagagacccaacctaaaaaggacacaccacggaaagagaagggttcacgggaagagaagcagaagccccaggctgagcggaaggaggagaaaaaggcggctgcccctgctcctgaggaggagatggatgaatgtgagcaggcgctggctgctgagcccaaggccaaggaccccttcgctcacctgcccaagagtacctttgtgttggatgaatttaagcgcaagtactccaatgaggacacactctctgtggcactgccatatttctgggagcactttgataaggacggctggtccctgtggtactcagagtatcgcttccctgaagaactcactcagaccttcatgagctgcaatctcatcactggaatgttccagcgactggacaagctgaggaagaatgccttcgccagtgtcatcctttttggaaccaacaatagcagctccatttctggagtctgggtctcctcgctgccaggatccagtttccgccctcgtgc

SEQ ID NO: 22046 - DNA, 2088 bp, Homo Sapiens
  misc_feature (797)..(805): n is a, c, g, or t
gcacgaggcacgctttcaactcctttattaaattggttgcaaaaaagatatacattcttatattgacaattcttgtcatgaataaaagcatcaaaaataaggcaacagcaagatgtgcttcacatataaacaatcatgttgtaagaataagaaacctgaatccctgtacaacaaaaagattaggaagcaaaatgtgaataagcttgtattcagaatatacctatatgtgtgtgcaaagacaatacactcatcatatacctcacttaggttcctttatgatgcataattccttaatcattcatttgtgaaacaagaatgaatattaagaaacatgaaatccaaattgcacttattttcacaatatcaatgctaaactcaaaatagcaacttcattgactctcaatggtaaatttcaaacatggaaagcaatcttaatttttttaaccctttgactagggtctgtaaaaaacggtggattattttactgtacttacaaagaggctgggtctcagcctgcacttaaacagcatgagcaacaaaggacaggaaacaaatatcactaagagtaatgcccatacatataaagatatctagttgagccacgttctacttacatagcaagcctattaaaccactagcataacagatcatatctcatgaaacagaattactaaattaactacacatctctcagaaatttccaaatccctgctcccaacacaattttagtacacctattaagtaccacgggtcatttagaaaaacagaaaaaaatatacacctagtctttgcaattnnnnnnnnntcataacataaacaatgttagatataaattttgaactcaatatgttttttcctacatatttatgtaatcaaggctctttaagcaaagacaggtggtaggtatatgatctgtacaaacttacagtagtgtatattccaaataaaggtttttcttcctactatggtatgacaatataactgttttctgaatgaagatacatgttaaggcttaaggtgtaaacactttggaaggcaaacagcttagtgaaaaaaattatggttcatttaaaaatgtgtatcatttcataatagacccctgaactttcaaatttacatgtgagaatacatttacatcttaactttctaggaaaggcacaggctttatgtaaaaaagcagcaaagttttaaacccaccaatatattgacaaagccattacttttattagaaacaaataatgcttctcaaggtgttggcaacatgtcatagtatcaacatatacttcatacagtgtatttctccctttaattatattccggtaggaggtggaatacctccttggctatgaggggcagatgtatttgatggactgtgtaggctggtctccttgtacacaaaccaagcatttcctccccagagtatcatatttagaaagccaaatatcacagatacatttagggatcccatactggtcacagagccaaagtaacacagtactgctttcttcttacaaggcggaagttcatcaataatattgtgaccagtagctattttaatatctgtcagagctttagcccaggctgaagtgctcaccaaccacaaaaaagtggcaacaagtgtaacaacaaagtctatcataggaagtttacgactatccagatacagactcgtgtagccaacataaagcagaagggcagcaatgcagtacaggaacacaaagactgcaaaggtaacatagaattgtgcagaagaagagtaatcgcctatgaggacgtaatctttccaatttacatcacatatgtttacacctggaggtggctgaaatgatgcctcattcaacctgaatggataaccaaaagtagctgtaacagttttattctcagtaactgcaggaggacaattcacttgaatttctgtttggcccttaaaacctccacaggtggcaaaagcaaagatagaagcaatccactcgaggaccttgatgaagccgagtggctccttgagcgggttgaggttgatctggaagccggacatcctctgaggaaaggagggagagagagtcaggacgacggggcggagcctcgtgc

SEQ ID NO: 22047 - DNA, 1213 bp, Homo Sapiens
  misc_feature (784)..(785): n is a, c, g, or t
gcacgaggctttattaaattggttgcaaaaaaagatatacattcttatattgacaattcttgtcatgaataaaagcatcaaaaataaggcaacagcaagatgtgcttcacatataaacaatcatgttgtaagaataagaaacctgaatccctgtacaacaaaaagattaggaagcaaaatgtgaataagcttgtattcagaatatacctatatgtgtgtgcaaagacaatacactcatcatatacctcacttaggttcctttatgatgcataattccttaatcattcatttgtgaaacaagaatgaatattaagaaacatgaaatccaaattgcacttattttcacaatatcaatgctaaactcaaaatagcaacttcattgactctcaatggtaaatttcaaacatggaaagcaatcttaatttttttaaccctttgactagggtctgtaaaaaacggtggattattttactgtacttacaaagaggctgggtctcagcctgcacttaaacagcatgagcaacaaaggacaggaaacaaatatcactaagagtaatgcccatacatataaagatatctagttgagccacgttctacttacatagcaagcctattaaaccactagcataacagatcatatctcatgaaacagaattactaaattaactacacatctctcagaaatttccaaatccctgctcccaacacaattttagtacacctattaagtaccacgggtcatttagaaaaacagaaaaaaatatacacctagtctttgcaattnnaaaaaaatcataacataaacaatgttagatataaattttgaactcaatatgttttttcctacatatttatgtaatcaaggctctttaagcaaagacaggtggtaggtatatgatctgtacaaacttacagtagtgtatattccaaataaaggtttttcttcctactatggtatgacaatataactgttttctgaatgaagatacatgttaaggcttaaggtgtaaacactttggaaggcaaacagcttagtgaaaaaaattatggttcatttaaaaatgtgtatcatttcataatagacccctgaactttcaaatttacatgtgagaatacatttacatcttaactttctaggaaaggcacaggctttatgtaaaaaagcagcaaagttttaaacccaccaatatattgacaaagccattcctcgtgc

SEQ ID NO: 22048 - DNA, 1833 bp, Homo Sapiens
gcacgaggaatttattcaattggctccaatgtaatcctattgtcaccagatcattgacaccaaattgttatttttccctttgctagtaaaggtataagcagaaacaattgcaaaagaacacataacatctagtagggataatgatgaaagccaaaaatggattatttgaaaataattttggaagtaaaaaaaccataggtgtgaggaaaaaagagagaaactacaaataaactgcattgtgataaaacaataaagcacatagctaaaagcctattaaggattttttaaaaattatattttgagaaacacttggtgctaataattttctcaaaagtacaaatatccaaaagtcatacagaaaataaaacaacctactttccatcaaaagtttctaattttattctgagaaaagataacaccaagaaaacaattttaactacagaaacaatggttagcgtaaaaaattaataatcaaaaagataaaccatgttataagtacttaacaaacttataaactatttcttccataacattctccatattttaagttcatacatgttgatatgatcagatttacaatttttcagaaaagacgggggaaaaggtgtgattatcgtcagctagatgtgctcactgcatgctccattatttatctgcaaggcctgggtgactggaagtgcagttgacaggcattttaataaactggacagccatttgttcttcaggacaaggcgtgttttccccaggagcaatcagaagaaaacaggaagcagctcagcactctgcactgcaacaggccaccttaatagctaaccagcatcactcaactgctacgcagccgggcctggtgcacaaaaacacaaaagagattagacctgtgtttgctaaaaccccagtcctttcacatgaaaaatctttatacaaattgggtcacactaccttttagacctggaggtaaataaaattatccatattaatttacaccaccttttgtaggtttttaaggaatgaaggcaatgttgaagcaatgtcttgacagcgttaggctgtgtgtaatggctgcacacgtttccttaaaagtcaggaggccacaaattaggttaccaatctgttcatttcaaaccaaaacagtcatcactatagaaataaaaataaatttttgcctcaaatatccaaacccaataacgtaatcttaggtcgttcacctcctaagttacaataaaatgtgaataacaacaaaacggcacatagaatgaattttgccacctgatgcaaagcttcaaactggcaaaaaggtagaaaagtgtgacacaaccttttcaataggcagcctcttcttccagggacgttgcttccatagactgagtatgtgatccttttcccccaagtcctccatcacgttgcttcctgatgcatcattttcttaagaggacatctgtccttcctcttcaggagacttggggggcctcttggatcgcgaccttgacttggatttcctcttggatacccggggaggactcctggtcatagatgaagacctggaccgcgagcgagacctggagaccgaggaggacttggatcgtcgcgcagagctcgatttggaggttgatgcagagcgagagctagtggaggacccagacttcgagtgagaccggctgctgtgatatcggctgtagcgagagttactgtaaccagatgagctgtagtgagatccgccgtagcgagattccctgtagcgagatctgctgtagggagagcggctgtagcgcgaccggctgtaaggagatcggctgtagggagaccggctatagcgagaacccctatacctcgtgc

SEQ ID NO: 22049 - DNA, 1862 bp, Homo Sapiens
gcacgagggcccgtccgtgctgttctgcggcaaggcctttcccagtgtccccacgcggaaggcaactgcctgagaggcgcggcgtcgcaccgcccagagctgaggaagccggcgccagttcgcggggctccgggccgccactcagagctatgagctacggccgcccccctcccgatgtggagggtatgacctccctcaaggtggacaacctgacctaccgcacctcgcccgacacgctgaggcgcgtcttcgagaagtacgggcgcgtcggcgacgtgtacatcccgcgggatcgctacaccaaggagtcccgcggcttcgccttcgttcgctttcacgacaagcgcgacgctgaggacgctatggatgccatggacggggccgtgctggacggccgcgagctgcgggtgcaaatggcgcgctacggccgccccccggactcacaccacagccgccgggggccgccaccccgcaggtacgggggcggtggctacggacgccggagccgcagccctaggcggcgtcgccgcagccgatcccggagtcggagccgttccaggtctcgcagccgatctcgctacagccgctcgaagtctcggtcccgcactcgttctcgatctcggtcgacctccaagtccagatccgcacgaaggtccaagtccaagtcctcgtcggtctccagatctcgttcgcggtccaggtcccggtctcggtccaggagtcctcccccagtgtccaagagggaatccaaatccaggtcgcgatcgaagagtccccccaagtctcctgaagaggaaggagcggtgtcctcttaagaaaatgatgtatcggcaagcagtgtaaacggaggacttggggaaaaaggaccacatagtccatcgaagaagagtccttggaacaagcaactggctattgaaaaggttattttgtaacatttgtctaactttttacttgtttaagctttgcctcagttggcaaacttcattttatgtgccattttgttgctgttattcaaatttcttgtaatttagtgaggtgaacgacttcagatttcattattggatttggatatttgaggtaaaatttcattttgttatatagtgctgactttttttgtttgaaattaaacagattggtaacctaatttgtggcctcctgacttttaaggaaaacgtgtgcagccattacacacagcctaaagctgtcaagagattgactcggcattgccttcattccttaaaattaaaaacctacaaaagttggtgtaaatttgtatatgttatttaccttcagatctaaatggtaatctgaacccaaatttgtataaagacttttcaggtgaaaagacttgattttttgaaaggattgtttatcaaacacaattctaatctcttctcttatgtatttttgtgcactaggcgcagttgtgtagcagttgagtaatgctggttagctgttaaggtggcgtgttgcagtgcagagtgcttggctgtttcctgttttctcccgattgctcctgtgtaaagatgccttgtcgtgcagaaacaaatggctgtccagtttattaaaatgcctgacaactgcacttccagtcacccgggccttgcatataaataacggagcatacagtgagcacatctagctgatgataaatacacctttttttccctcttccccctaaaaatggtaaatctgatcatatctacatgtatgaacttaacatggaaaatgttaaggaagcaaatggttgtaactttgtaagtacttataacatggtgtatctttttgcttatgaatattctgtattataaccattgtttctgtagtttaattaaaacattttcttggtgttagcttttctc

SEQ ID NO: 22050 - DNA, 1270 bp, Homo Sapiens
gcacgagggggacccgccccctatgccaacaccaagagactacaggaagaaaacctggtcatcaccccccggctctttgagtgttccaacaagactgggcgcttcctggccacagagatccctgacttcaatcaggatgacttggaagaggatgatgtgttcctactagatgtctgggaccaggtcttcttctggattgggaaacatgccaacgaggaggagaagaagggcagcaaccactgcacaggaatacctcaagacccatcccagcgggcgtgaccctgagacccccatcattgtggtgaagcagggacacgagccccccaccttcacaggctggttcctggcttgggatcccttcaagtggagtaacaccaaatcctatgaggacctgaaggcggagcttggcaactctagggactggagccagatcactgctgaggtcacaagccccaaagtggacgtgttcaatgctaacagcaacctcagttctgggcctctgcccatcttccccctggagcagctagtgaacaagcctgtagaggagctccccgagggtgtggaccccagcaggaaggaggaacacctgtccattgaagatttcactcaggcctttgggatgactccagctgccttctctgctctgcctcgatggaagcaacaaaacctcaagaaagaaaaaggactattttgagaagagtagctgtggttgtaaagcagtaccctaccctgattgtagggtctcattttctcaccgatattagtcctacaccaattgaagtgaaattttgcagatgtgcctatgagcacaaacttctgtggcaaatgccagttttgtttaataatgtacctattccttcgaaagatgataccccaaaaggagcctatggtcctcatttcaacttctaaggtcgctagattgtttctatcctgaggtattgcatcaattttaatactcctatagttttctcttcttagaagagcacaaacactccatggaacattagagttctgaggcactaccctagcttgtcctctatcatgactcatttttatctatggcaggtaggctgaagcactttgcaggtttacatcttccccagagtaacagcttttccttttcacatatactttccttactgccttactcagtgggtaagttaaagggctgaaggagagttgaatgggtccacaagactactctcttaagaggtttcacaaattccaaacagtaccagtgagagcagcactttccactggggctaggctt

SEQ ID NO: 22051 - DNA, 915 bp, Homo Sapiens
gcacgaggcacaattccctgagatctcccaggtggcagctgcctccccaagacaggctcactcaccatgaccaagctgagcgcccaagtcaaaggctctctcaacatcaccaccccggggctgcagatatggaggatcgaggccatgcagatggtgcctgttccttccagcacctttggaagcttcttcgatggaagcaacaaaacctcaagaaagaaaaaggactattttgagaagagtagctgtggttgtaaagcagtaccctaccctgattgtagggtctcattttctcaccgatattagtcctacaccaattgaagtgaaattttgcagatgtgcctatgagcacaaacttctgtggcaaatgccagttttgtttaataatgtacctattccttcagaaagatgataccccaaaaggagcctatggtcctcatttcaacttctaaggtcgctagattgtttctatcctgaggtattgcatcaattttaatactcctatagttttctcttcttagaagagcacaaacactccatggaacattagagttctgaggcactaccctagcttgtcctctatcatgactcatttttatctatggcaggtaggctgaagcactttgcaggtttacatcttccccagagtaacagcttttccttttcacatatactttccttactgccttactcagtgggtaagttaaagggctgaaggagagttgaatggtccacaagactaccctcttaagaggtttcacaaattccaaacagtaccagtgagagcagcacttccactggggctaggcttgagacctaaaggcagtatgaaatgcatatgctacttcactccctctcccaacccttaataatgaggcaaagcaagagcctagtgaaaggccaatgctaggttacaaa

SEQ ID NO: 22052 - DNA, 1154 bp, Homo Sapiens
  misc_feature (110)..(122): n is a, c, g, or t
gcacgaggccccagcacaaaggaaagactaattcttgtcaggcatttttgaaaaggctgattatgtgtatcaaggtacagcatcgtagggttcccctaaacttgccctgnnnnnnnnnnnnnagtttgttatccccttactgagcggcctctactaggtggctgtgattaaatgtcccaagcaaggatagggaaggggaatggttgagcctctggagatcattgtaaccaatcctgccagacctgtttggggcagtggggggcaaacctagataaggacctgtttggggcagcagggagcaaaatctcctttaacaaccaagcagttcctcattcacatcaacagagcgaggctgtgataacttaggaggcagcaatcctaatagtccttcagtgcattttagtctgtctccaactggacaccagtaggtagtgtcaagccagagattcggggcagtagataaatgttcattttactgatgcactttagtttttggtctgttacctgttttccagaaatttgtggccttttaggcgggagttaggcgaccaaaccagtgagagccccaatccctgcagttttgtggcttcaagtgtgggtggacagtcctaatggggatctccagctccttcctgtgggctgccacagacagctacccccagaagggtcaatgttgggagtggttgtggctctgagctgctctacagagcttcagtgtgagaggatcgagccattgaaagctcattaccagtaggacataatttttggctctccctattcacaaccagtgcacagtttgacacagtggcctcaggttcacagtgcaccatgtcactgtgctatcctacgaaatcatttgtttctaagttgtgtttattcctggagtgacatgccaccccgaatggctcactttcactgaggatgctgtcctctgatttagctgctgcctccagcctctggcttgagaacttactaaaggcacttccttcctgttaaacccctgttaactctccataaatttggtgattctctgctaggcctaagattttgagttaacatctcttgaagccaaactccaccttctgtgctttttgcttgggataatggagtttttctttagaaacagtgccaagaatgacaagatatcctcgtgc

SEQ ID NO: 22053 - DNA, 1582 bp, Homo Sapiens
  misc_feature (1435)..(1447): n is a, c, g, or t
gcacgaggcaccttcagcagcacctgaagaaggtctatgcaagttttgccctttgtatgtttgtggcggctgcaggggcctatgtccatatggtcactcatttcattcaggctggcctgctgtctgccttgggctccctgatattgatgatttggctgatggcaacacctcatagccatgaaactgaacagaaaagactgggacttcttgctggatttgcattccttacaggagttggcctgggccctgccctggagttttgtattgctgtcaaccccagcatccttcccactgctttcatgggcacggcaatgatctttacctgcttcaccctcagtgcactctatgccaggcgccgtagctacctctttctgggaggtatcttgatgtcagccctgagcttgttgcttttgtcttccctggggaatgttttctttggatccatttggcttttccaggcaaacctgtatgtgggactggtggtcatgtgtggcttcgtcctttttgatactcaactcattattgaaaaggccgaacatggagatcaagattatatctggcactgcattgatctcttcttagatttcattactgtcttcagaaaactcatgatgatcctggccatgaatgaaaaggataagaagaaagagaagaaatgaagtgaccatccagcctttcccaattagacttcctctccttccacccctcatttcctttttgcacacattacaggtggtgtgttctgtgataatgaaaagcatcagaaaagcttttgtacttagtgatttcctctatcttgaattttttgatcaaaaaactgattaacagaatatactttggagtttggcttcatcttcgtggggttccactcactctcttttttgtcaactccatctgtagcctctgcctctactcaggcagtcgacccgccacgatgataagtgggactagcacagggcgccacttcaggagtccgcttacccacccgcttcattcacccagtggacctgaactgtttggtagagccacccggccccttcttcctcattgttgtttggtatgcgcacagttcctgtgggactggggcgtgagttttccattggaaagaagttcagtggtcccattgttaactcagcctcaaatcttaactgtcagggcctacaaagaaaatggagagcctcttctggtggatgctttgctccctctgagctggcctgctggtctgggaaacacacctttctggtttgccttcacaaaagtaatgtgttcctttcccaccccttgcctgacccctcagggagtcaggcctgcttcatggatgggtgggaagacttcagcacaaaggaaagactaattcttgtcagggcatttttgaaaaggctgattatgtgtatcaaggtacagcatcgtagggttcccctaaacttggccctgnnnnnnnnnnnnnagtttgttatccccttactgagcggcctctactaggtggctgtgattaaatgtcccaaactccaccttctgtggctttttgcttgggataatggagtttttctttagaaacagtgccaagaatggacaagatatt

SEQ ID NO: 22054 - DNA, 879 bp, Homo Sapiens
gcacgaggtttttttactttccctacaaaataatttattggaacacacagctacagcactctatgtacaagcacattgacgctcctgactatcctcaactaggggacccttttcttcccccttgccttgcggacctcttctatcaaatctttcaggtactggatctccttggccagggaatccgccctctcttttagagcctcgttcttcttttccagctctttgcactcaccagtaagagcctcctgctccgccctcttcttctggcggtacctagtggctgctgtcttgttttgctccatttttttcagcttcttatccagtttctcaccctttacttttgctgctaccatcttctctccaggaggatcgtaaggtttgggacgggcagacccacagagaacacctggagatgggaggctcctatttggagagcccctggtagaggggctgtgctgaggagaccccagataggactctgggctcatacagatgccactatcattatctgaaggggtgtcttcctcctttatgcactgagggatcatggcaacgtaagcagtgtagtctggcttcctatctccttcagtgatatccacttcactgcccagctctaaactaaaggaatgatctggagtggaggacaggacccctggggaaaggggaagaggttgtaagaaggtgtctttgtcggttacagcaacgctgctgctgaatgccgtgagaagcgccatggcttaagccgctgggggttgccgctgcagagcctggtgctgctgccgccgctgcaaagggcaatgctgccgcaggcactgctgcccctaatacgccatggtggccgtggaccctgagggcggggaggagggaaaacgcacacgc

SEQ ID NO: 22055 - DNA, 1407 bp, Homo Sapiens
ccacgcgtccgcggacgcgtggggtagttttctctgcgcgtgtgcgttttccctcctccccgccctcagggtccacggccaccatggcgtattaggggcagcagtgcctgcggcagcattggcctttgcagcggcggcagcagcaccaggctctgcagcggcaacccccagcggcttaagccatggcgcttctcacggcattcagcagcagcgttgctgtaaccgacaaagacaccttcgaattaagcacattcctcgattccagcaaagcaccgcaacatgaccgaaatgagcttcctgagcagcgaggtgttggtgggggacttgatgtcccccttcgaccagtcgggtttgggggctgaagaaagcctaggtctcttagatgattacctggaggtggccaagcacttcaaacctcatgggttctccagcgacaaggctaaggcgggctcctccgaatggctggctgtggatgggttggtcagtccctccaacaacagcaaggaggatgccttctccgggacagattggatgttggagaaaatggatttgaaggagttcgacttggatgccctgttgggtatagatgacctggaaaccatgccagatgaccttctgaccacgttggatgacacttgtgatctctttgcccccctagtccaggagactaataagcagcccccccagacggtgaacccaattggccatctcccagaaagtttaacaaaacccgaccaggttgcccccttcaccttcttacaacctcttcccctttccccaggggtcctgtcctccactccagatcattcctttagtttagagctgggcagtgaagtggatatcactgaaggagataggaagccagactacactgcttacgttgccatgatccctcagtgcataaaggaggaagacaccccttcagataatgatagtggcatctgtatgagcccagagtcctatctggggtctcctcagcacagcccctctaccaggggctctccaaataggagcctcccatctccaggtgttctctgtgggtctgcccgtcccaaaccttacgatcctcctggagagaagatggtagcagcaaaagtaaagggtgagaaactggataagaagctgaaaaaaatggagcaaaacaagacagcagccactaggtaccgccagaagaagagggcggagcaggaggctcttactggtgagtgcaaagagctggaaaagaagaacgaggctctaaaagagagggcggattccctggccaaggagatccagtacctgaaagatttgatagaagaggtccgcaaggcaagggggaagaaaagggtcccctagttgaggatagtcaggagcgtcaatgtgcttgtacatagagtgctgtagctgtgtgttccaataaattatttt

SEQ ID NO: 22056 - DNA, 1285 bp, Homo Sapiens
atcccccgggctgcaggaattcggcacgaggggaggagcgtggctgtctcctctctccgccatggcgtgtgctcgcccactgatatcggtgtactccgaaaagggggagtcatctggcaaaaatgtcactttgcctgctgtattcaaggctcctattcgaccagatattgtgaactttgttcacaccaacttgcgcaaaaacaacagacagccctatgctgtcagtgaattagcaggtcatcagactagtgctgagtcttggggtactggcagagctgtggctcgaattcccagagttcgaggtggtgggactcaccgctctggccagggtgcttttggaaacatgtgtcgtggaggccgaatgtttgcaccaaccaaaacctggcgccgttggcatcgtagagtgaacacaacccaaaaacgatacgccatctgttctgccctggctgcctcagccctaccagcactggtcatgtctaaaggtcatcgtattgaggaagttcctgaacttcctttggtagttgaagataaagttgaaggctacaagaagaccaaggaagctgttttgctccttaagaaacttaaagcctggaatgatatcaaaaaggtctatgcctctcagcgaatgagagctggcaaaggcaaaatgagaaaccgtcgccgtatccagcgcaggggcccgtgcatcatctataatgaggataatggtatcatcaaggccttcagaaacatccctggaattactctgcttaatgtaagcaagctgaacattttgaagcttgctcctggtgggcatgtgggacgtttctgcatttggactgaaagtgctttccggaagttagatgaattgtacggcacttggcgtaaagccgcttccctcaagagtaactacaatcttcccatgcacaagatgattaatacagatcttagcagaatcttgaaaagcccagagatccaaagagcccttcgagcaccacgcaagaagatccatcgcagagtcctaaagaagaacccactgaaaaacttgagaatcatgttgaagctaaacccatatgcaagaagcctgtggtaggtaagaaaggaaagaaggctgctgttggtgttaagaagcagaagaagcctctggtgggaaaaaaggcagcagctaccaagaaaccagcctctgaaaagaagcctgcagagaagaaacctactacagaggagaagaagcctgctgcataaactcttaaatttgattattccataaaggtcaaatcattttggacagcttcttttgaataaagac

SEQ ID NO: 22057 - DNA, 1222 bp, Homo Sapiens
cgggctgcaggaattcggcacgaggaaaggcgttgagtcatctggcaaaaatgtcactttgcctgctgtattcaaggctcctattcgaccagatattgtgaactttgttcacaccaacttgcgcaaaaacaacagacagccctatgctgtcagtgaattagcaggtcatcagactagtgctgagtcttggggtactggcagagctgtggctcgaattcccagagttcgaggtggtgggactcaccgctctggccagggtgcttttggaaacatgtgtcgtggaggccgaatgtttgcaccaaccaaaacctggcgccgttggcatcgtagagtgaacacaacccaaaaacgatacgccatctgttctgccctggctgcctcagccctaccagcactggtcatgtctaaaggtcatcgtattgaggaagttcctgaacttcctttggtagttgaagataaagttgaaggctacaagaagaccaaggaagctgttttgctccttaagaaacttaaagcctggaatgatatcaaaaaggtctatgcctctcagcgaatgagagctggcaaaggcaaaatgagaaaccgtcgccgtatccagcgcaggggcccgtgcatcatctataatgaggataatggtatcatcaaggccttcagaaacatccctggaattactctgcttaatgtaagcaagctgaacattttgaagcttgctcctggtgggcatgtgggacgtttctgcatttggactgaaagtgctttccggaagttagatgaattgtacggcacttggcgtaaagccgcttccctcaagagtaactacaatcttcccatgcacaagatgattaatacagatcttagcagaatcttgaaaagcccagagatccaaagagcccttcgagcaccacgcaagaagatccatcgcagagtcctaaagaagaacccactgaaaaacttgagaatcatgttgaagctaaacccatatgcaaagaccatgcgccggaacaccattcttcgccaggccaggaatcacaagctccgggtggataaggcagctgctgcagcagcggcactacaagccaaatcagatgagaaggcggcggttgcaggcaagaagcctgtggtaggtaagaaaggaaaaaggctgctgttggtgttaagaagcagaaaagcctctggtgggaaaaaggcagcagctaccaagaaaccagccccctgaaaagaa

SEQ ID NO: 22058 - DNA, 839 bp, Homo Sapiens
gcgtccgcggagcgcggcggcaagatggcagtgcaaatatccaagaagaggaagtttgtcgctgatggcatcttcaaagctgaactgaatgagtttcttactcgggagctggctgaagatggctactctggagttgaggtgcgagttacaccaaccaggacagaaatcattatcttagccaccagaacacagaatgttcttggtgagaagggccggcggattcgggaactgactgctgtagttcagaagaggtttggctttccagagggcagtgtagagctttatgctgaaaaggtggccactagaggtctgtgtgccattgcccaggcagagtctctgcgttacaaactcctaggagggcttgctgtgcggagggcctgctatggtgtgctgcggttcatcatggagagtggggccaaaggctgcgaggttgtggtgtctgggaaactccgaggacagagggctaaatccatgaagtttgtggatggcctgatgatccacagcggagaccctgttaactactacgttgacactgctgtgcgccacgtgttgctcagacagggtgtgctgggcatcaaggtgaagatcatgctgccctgggacccaactggtaagattggccctaagaagcccctgcctgaccacgtgagcattgtggaacccaaagatgagatactgcccaccacccccatctcagaacagaagggtgggaagccagagccgcctgccatgccccagccagtccccacagcataacagggtctccttggcagctgtattctggagtctggatgttgctctctaaagacctttaataaaattttgtacaaagacaaaaa

SEQ ID NO: 22059 - DNA, 758 bp, Homo Sapiens
ccccgggctcgcaggaattcggcacgagggatggcagtgcaaatatccaagaagaggaagtttgtcgctgatggcatcttcaaagctgaactgaatgagtttcttactcgggagctggctgaagatggctactctggagttgaggtgcgagttacaccaaccaggacagaaatcattatcttagccaccagaacacagaatgttcttggtgagaagggccggcggattcgggaactgactgctgtagttcagaagaggtttggctttccagagggcagtgtagagctttatgctgaaaaggtggccactagaggtctgtgtgccattgcccaggcagagtctctgcgttacaaactcctaggagggcttgctgtgcggagggcctgctatggtgtgctgcggttcatcatggagagtggggccaaaggctgcgaggttgtggtgtctgggaaactccgaggacagagggctaaatccatgaagtttgtggatggcctgatgatccacagcggagaccctgttaactactacgttgacactgctgtgcgccacgtgttgctcagacgggtgaggggcattgtggaacccaaagatgagatactgcccaccacccccatctcagaacagaagggtgggaagccagagccgcctgccatgccccagccagtccccacagcataacagggtctccttggcagctgtattctggagtctggatgttgctctctaaagacctttaataaaattttgtacaaaga

SEQ ID NO: 22060 - DNA, 746 bp, Homo Sapiens
cccgggctgcaggaattcggcacgaggcagaacttttcttcttgggttgaggaaaacgccttttggagtcaggccctggaggggcgagccttgctcacaggttctcccaggagaaagccatgttcagttcgagcgccaagatcgtgaagcccaatggcgagaagccggacgagttcgagtccggcatctcccaggctcttctggagctggagatgaactcggacctcaaggctcagctcagggagctgaatattacggcagctaaggaaattgaagttggtggtggtcggaaagctatcataatctttgttcccgttcctcaactgaaatctttccagaaaatccaagtccggctagtacgcgaattggagaaaaagttcagtgggaagcatgtcgtctttatcgctcagaggagaattctgcctaagccaactcgaaaaagccgtacaaaaaataagcaaaagcgtcccaggagccgtactctgacagctgtgcacgatgccatccttgaggacttggtcttcccaagcgaaattgtgggcaagagaatccgcgtcaaactagatggcagccggctcataaaggttcatttggacaaagcacagcagaacaatgtggaacacaaggttgaaactttttctggtgtctataagaagctcacgggcaaggatgttaattttgaattcccagagtttcattgtaaacaaaaatgactaaataaaaagtatatattcacagtaaaaaaa

SEQ ID NO: 22061 - DNA, 485 bp, Homo Sapiens
gcacgaggtccgcaagttctcccaggagaaagccatgttcagttcgagcgccaagatcgtgaagcccaatggcgagaagccggacgagttcgagtccggcatctcccaggctcttctggagctggagatgaactcggacctcaaggctcagctcagggagctgaatattacggcagctaaggaaattgaagttggtggtggtcggaaagctatcataatctttgttcccgttcctcaactgaaatctttccagaaaatccaagtccggctagtacgcgaattggagaaaaagttcagtgggaagcatgtcgtctttatcgctcataaaggttcatttggacaaagcacagcagaacaatgtggaacacaaggttgaaactttttctggtgtctataagaagctcacgggcaaggatgttaattttgaattcccagagtttcaattgtaaacaaaaatgactaaataaaaagtatatattcacagt

SEQ ID NO: 22062 - DNA, 922 bp, Homo Sapiens
  misc_feature (872)..(880): n is a, c, g, or t
gcacgaggctcctgaaggctctagaaagaacccagctcgcacatgccgtgacttgagactcagccacccagagtggagcagtggttactactggattgaccctaaccaaggatgcactatggatgctatcaaagtatactgtgatttctctactggcgaaacctgtatccgggcccaacctgaaaacatcccagccaagaactggtataggagctccaaggacaagaaacacgtctggctaggagaaactatcaatgctggcagccagtttgaatataatgtagaaggagtgacttccaaggaaatggctacccaacttgccttcatgcgcctgctggccaactatgcctctcagaacatcacataccactgcaagaacagcattgcatacatggatgaggagactggcaacctgaaaaaggctgtcattctacagggctctaatgatgttgaacttgttgctgagggcaacagcaggttcacttacactgttcttgtagatggctgctctaaaaagacaaatgaatggggaaagacaatcattgaatacaaaacaaataagccatcacgcctgcccttccttgatattgcacctttggacatcggtggtgctgaccaggaattctttgtggacattggcccagtctgtttcaaataaatgaactcaatctaaattaaaaagaaagaaatttgaaaaaactttctctttgccatttcttcttcttcttttttaactgaaagctgaatccttccatttcttctgcacatctacttgcttaaattgtgggcaaaagagaaaaagaaggattgatcagagcattgtgcaatacagtttcattaactccttcccccgctcccccaaaaatttgaannnnnnnnncaacactcttacacctgttatggaaaatgtcaacctttgtaa

SEQ ID NO: 22063 - DNA, 777 bp, Homo Sapiens
  misc_feature (539)..(569): n is a, c, g, or t
  misc_feature (612)..(620): n is a, c, g, or t
ggaaaaccaaacatgctttatttcatttttttcacaatttatttaaacatctcacatatacaaaataggtacaatttaatttttctgcttgcccaagaaacaaagcttctgtggaaccatggaagaagatgaaaatgagactggcaaagaacaaatgctgaatctgaagaagaggacaactttgggcaaataatctgcatacttttaattgggaataagatggaaaatatgaatgctaaatcaaattttttaaaaaatacaccacacgatacaactcaatacaggagtatttcttctcaaattcttctagcaccatcaacattcttcaagtatctgaaatactattaattagcacctttgtattatgaacaaaacaaaacaaggacctcagttcatctctgtctaggtcagcacctaacaatgtggatcacactcatgggaaagtgttttgaggtagtttaaacctttggaagtttgggttttaaacttccctctgtggaagatattcaaaagccacaagtggtgcaaatgtttatggnnnnnnnnnnnnnnnnnnnnnnnnnnnnnnnttacaaaggttgacattttccataacaggtgtaagagtgttgnnnnnnnnnttcaaatttttgggggagcgagggaaggagttaatgaaactgtattgcacaatgctctgatcaatccttctttttctcttttgcccacaatttaagcaagtagatgtgcagaagaaatggaaggattcagctttcagttaaaaaagcggacgcgtgg

SEQ ID NO: 22064 - DNA, 849 bp, Homo Sapiens
gcacgaggctgaaggccaagtcagagaaacttgcctgtgattcaggcctggccttggcccccttttgttcctagttatttaaaattggcatgtctgtcaacatgtttgagtggctctcctctagacagaaacgagaataagcaagctggcaggcttccttgcatcctggggcattgagtatcagcccatgtttagtgccggaagcgccacagcagacagcttgtgttttcttacccctcgaatagctgcgcttccctggtctgggtgcccagctaaattctcagcctgggcttgtggagttctttgtagatgtatttaagaaggcagaaacttctctacctcactgcagccaccaggtaattctgtgtgttgctttatttgcagaggaatatgtcacttgtcacacatgccgatcaccggacacaatcctgcagaaggacacacgactctatttcctacagtgcgaaacttgtcattctagatgttctgttgccagtatcaaaaccggcttccaggctgtcacgggcaagcgagcacagctccgtgccaaagctaactaatttgctaatcactgattttgcaaagcttgttgtggagatgtggctggacaggtttgccatcagagtggatataccgttgtattaaaaacaagataaaaaagctgccaagatttttggcgagtggttggtctgaagtccttgcaagacgctgatgctcaagctgttgacatactcattgcctactttaacacctgtcagagaaacgtgatatggggtaaggaggtgcttttttaaaatcgttcatagacttctgtaaaatgcaagataaattaaagttattataacagtg

SEQ ID NO: 22065 - DNA, 1263 bp, Homo Sapiens
  misc_feature (1053)..(1080): n is a, c, g, or t
ccccgggctgcaggtttttttcactgttataataactttaatttatcttgcattttacagaagtctatgaacgattttaaaaaagcacctccttaccccatatcacgtttctctgacaggtgttaaagtaggcaatgagtatgtcaacagcttgagcatcagcgtcttgcaaggacttcagaccaaccactcgccaaaaatcttggcagcttttttatcttgtttttaatacaacggtatatccactctgatggcaaacctgtccagccacatctccacaacaagctttgcaaaatcagtgattagcaaattagttagctttggcacggagctgtgctcgcttgcccgtgacagcctggaagccggttttgatactggcaacagaacatctagaatgacaagtttcgcactgtaggaaatagagtcgtgtgtccttctgcaggattgtgtccggtgatcggcatgtgtgacaagtgacatattccttgatatatcttctcaagacattttctatctgtttctgttggaatcttcctttgattacaagttggttattaccatctatagaaccacttgtacccaattcagccaacaaaaatgcaaggagatgtttgggctgacgatgtaatagtttacagatatctgtaaagttgacaaaagaagttttcttggttcctactcggacgacttgtggaggtttcatgacaaatttccttttctccccagcaaccatatctggattcttttccctcatgatgttgaacactcgattcagcagctcctcgtatgtgtagtctctttctgagcctgcccaagcagggcctgtctgattactgaatgagataccatcatcttttttgttgtcttcatcttctagagcttcatctttctctagtatttcatcctcatctgggaacttaacattcttctttttcttctttttattgccaagcataatgtcaaggtcatcctctggttcagttggttcttgaacatcactttcaatcttaagatcctttacaccttcttcagcttcatcaatatcaaatatcnnnnnnnnnnnnnnnnnnnnnnnnnnnngattaaagaagttcaagtcatctagatcatcagaagcatcttttttcctagtgtcctcttcatcagcttccaaatccttgtcctcagttggctctggctccacttcttttgtttttgaaggctgggtttcctctgtttgggtatccccttcctcatctaacataaaaggcttcttcctcgtgc

SEQ ID NO: 22066 - DNA, 378 bp, Homo Sapiens
gcacgaggcggcacgaggcttagactagtaaattatcatacagagttttattttgagtttttctttttgtgcattgtcctcatgcctgtattctccaggaaacttgtccttctggaaatcatattgaatgatatttctatatcgaagtgaggtaggtgcggtattaaagtgaaagggaaggtgatgcatttattctgggttatgcttgaagtgttagatggctaagtattaaaattatccaaattaaatccttagcagtcagaacacttgcttcactagaatatgccaactgccaatcatgttggactgagctaatttgttcctctttctgaaactattaaggtaaataattaacaataaaaattctcttataaaggc

SEQ ID NO: 22067 - DNA, 987 bp, Homo Sapiens
gcacgagggccgtgtagtcgccgccgtcgctgccgctgccgctgccgccgtcgttgttgttgtgctcggtgcgctgagctccgcggctccgcgagccggttccgtccccttcccgccgccgccatgaagtggatgttcaaggaggaccactcgctggaacacagatgcgtggagtccgcgaagattcgagcgaaatatcccgacagggttccggtgattgtggaaaaggtctcaggctctcagattgttgacattgacaaacggaagtacttggttccatctgatatcactgtggctcagttcatgtggatcatcaggaaaaggatccagcttccttctgaaaaggcgatcttcctgtttgtggataagacagtcccacagtccagcctaactatgggacagctttacgagaaggaaaaagatgaagatggattcttatatgtggcctacagcggagagaacacttttggcttctgagggccattgctgggctaggtgcaccgtaactgcttgtgtatcttgtaaatagccagccattttcagttattataccagaacctcttcacatagacctattagtgcatttgtaactggatttatttcttaatatattggaaggttttgtttccttagactagtaaattatcatacagagttttattttgagtttttctttttgtgcattgtcctcatgcctgtattctccaggaaacttgtccttctggaaatcatattgaatgatatttctatatcgaagtgaggtaggtgcggtattaaagtgaaagggaaggtgatgcatttattctgggttatgcttgaagtgttagatggctaagtattaaaattatccaaattaaatccttagcagtcagaacacttgcttcactagaatatgccaactgccaatcatgttggactgagctaatttgttcctctttctgaaactattaaggtaaataattacaataaaaattctcttataaaggc

SEQ ID NO: 22068 - DNA, 838 bp, Homo Sapiens
gcacgaggccggtctcagtctttaatcgtggcagggcctcacgcacgcgcgcacgtacacacactcaggcttcagatcttgttgaaagctgcgatatcgacactctgcacgtgctcctcaaacttggtgatctcctcctccagcaagtctgtccccaccttgtcgtcctccaccacacactgaatctgtagcttccggataccgtagcccacgggcaccagcttggaagccccccagaccagcccgtccagctggatagagcgcacacaggcctccagctgagccatgtccgtctcatcatcccaaggcttgacatccagcaggatggaggacttggccaccagtgcaggcttcttggccttcttctccgcgtactgccgtagccgctcctcccgcagctgtgccgcctccttgtcctcctcctcattgtcactgccaaacaggtcaatgtcatcatcctcgtcatcctctgctggtgtggctggcttcttggctgggggctccacttggcgcatgggagatacgtgctgggtctgtggggccgtggcccggtggccaggcgagctcttctccagcacgttcagccgggcctgagcttccagccagggatttctggatgttctctctggctctcgcaatgtcacggaggatcacgctggcgccgttctcctggcgggaggcacctgccacaggcccgttcatctgctcctagaatctcctttctgcgtcgtcatatttgaacttgtcgaaccagatcttctcatgtgctaggaagtttgtagcctttttctgaccccagcccaaggacgccgcgaccaaagaggaggaatcggcggac

SEQ ID NO: 22069 - DNA, 968 bp, Homo Sapiens
gcacgaggcgccgattcctcctccttggtcgccgcgtccttggctggcgtcgaaaaatggctacaaacttcctagcacatgagaagatctggttcgacaagttcaaatatgacgacgcagaaaggagattctacgagcagatgaacgggcctgtggcaggtgcctcccgccaggagaacggcgccagcgtgatcctccgtgacattgcgagagccagagagaacatccagaaatccctggctggaagctcaggccccggggcctccagcggcaccagcggagaccacggtgagctcgtcgtccggattgccagtctggaagtggagaaccagagtctgcgtggcgtggtacaggagctgcagcaggccatctccaagctggaggcccggctgaacgtgctggagaagagctcgcctggccaccgggccacggccccacagacccagcacgtatctcccatgcgccaagtggagcccccagccaagaagccagccacaccagcagaggatgacgaggatgatgacattgacctgtttggcagtgacaatgaggaggaggacaaggaggcggcacagctgcgggaggagcggctacggcagtacgcggagaagaaggccaagaagcctgcactggtggccaagtcctccatcctgctggatgtcaagccttgggatgatgagacggacatggcccagctggaggcctgtgtgcgctctatccagctggacgggctggtctggggggcttccaagctggtgcccgtgggctacggtatccggaagctacagattcagtgtgtggtggaggacgacaaggtggggacagacttgctggaggaggagatcaccaagtttgaggagcacgtgcagagtgtcgatatcgcagctttcaacaagatctgaagcctgagtgtgtgtacgtgcgcgcgtgcgtgaggccctgccacgattaaagactgagcctcgtgc

SEQ ID NO: 22070 - DNA, 2042 bp, Homo Sapiens
  misc_feature (97)..(111): n is a, c, g, or t
gcacgaggcgggagccggctgacgggtggacaagggggggttagcagctgggctgcgaccgttagggaggggctcaaggtgtgcatgtgtgagggannnnnnnnnnnnnnnagggcgcctcagaggtgactttcagcctgcgagccttcttcccggggcgccataaacgcccccaatttcccagctgctaaaggaagaggaagatcttagcaaagcaatgtctcaagatggtgcttctcagttccaagaagtcattcggcaagagctagaattatctgtgaagaaggaactagaaaaaatactcaccacagcatcatcacatgaatttgagcacaccaaaaaagacctggatggatttcggaagctatttcatagatttttgcaagaaaaggggccttctgtggattggggaaaaatccagagaccccctgaagattcgattcaaccctatgaaaagataaaggccaggggcttgcctgataatatatcttccgtgttgaacaaactagtggtggtgaaactcaatggtggtttgggaaccagcatgggctgcaaaggccctaaaagtctgattggtgtgaggaatgagaatacctttctggatctgactgttcagcaaattgaacatttgaataaaacctacaatacagatgttcctcttgttttaatgaactcttttaacacggatgaagataccaaaaaaatactacagaagtacaatcattgtcgtgtgaaaatctacactttcaatcaaagcaggtacccgaggattaataaagaatctttacttcctgtagcaaaggacgtgtcttactcaggggaaaatacagaagcttggtaccctccaggtcatggtgatatttacgccagtttctacaactctggattgcttgatacctttataggagaaggcaaagagtatatttttgtgtctaacatagataatctgggtgccacagtggatctgtatattcttaatcatctaatgaacccacccaatggaaaacgctgtgaatttgtcatggaagtcacaaataaaacacgtgcagatgtaaagggcgggacactcactcaatatgaaggcaaactgagactggtggaaattgctcaagtgccaaaagcacatgtagacgagttcaagtctgtatcaaagttcaaaatatttaatacaaacaacctatggatttctcttgcagcagttaaaagactgcaggagcaaaatgccattgacatggaaatcattgtgaatgcaaagactttggatggaggcctgaatgtcattcaattagaaactgcagtaggggctgccatcaaaagttttgagaattctctaggtattaatgtgccaaggagccgttttctgcctgtcaaaaccacatcagatctcttgctggtgatgtcaaacctctatagtcttaatgcaggatctctgacaatgagtgaaaagcgggaatttcctacagtgcccttggttaaattaggcagttcttttacgaaggttcaagattatctaagaagatttgaaagtataccagatatgcttgaattggatcacctcacagtttcaggagatgtgacatttggaaaaaatgtttcattaaagggaacggttatcatcattgcaaatcatggtgacagaattgatatcccacctggagcagtattagagaacaagattgtgtctggaaaccttcgcatcttggaccactgaaatgaaaaatactgtggacacttaaataatgggctagtttcttacaatgaaatgttctctaggattctaaaataggcaggtactttactatgttactgtaccctgcagtgttgatttttaaaatagagttttctgcagtatgcttttagtctaagaaaagcacagatggagcaatactttccttctttgaagagaatcccaaaagttagttcatcttaaagtgcaatattgtttaatcttaaaactgggcaactttggaagaacttttaacagaagcctcaatgatgatcactttgaattgcttgtgatttcaaaaataaagcagtgaagc

SEQ ID NO: 22071 - DNA, 897 bp, Homo Sapiens
  misc_feature (72)..(97): n is a, c, g, or t
  misc_feature (222)..(236): n is a, c, g, or t
gcacgaggctcaggagttcccaaaccgactcagtcgcaccaagtttccgtcttttggaattggggaaggagnnnnnnnnnnnnnnnnnnnnnnnnnngagccagttttaatcgctttgaataaatactcccttaagtagttaaatataggaggagaaagaatacatcggttgttaaagcaggagaggaagagagacctgccctgtagcgtgactcctctagnnnnnnnnnnnnnnnggccggagtattttactaagcccctaaaatgtcgagatttgtacaagatcttagcaaagcaatgtctcaagatggtgcttctcagttccaagaagtcattcggcaagagctagaattatctgtgaagaaggaactagaaaaaatactcaccacagcatcatcacatgaatttgagcacaccaaaaaagacctggatggatttcggaagctatttcatagatttttgcaagaaaaggggccttctgtggattggggaaaaatccagagaccccctgaagattcgattcaaccctatgaaaagataaaggccaggggcttgcctgataatatatcttccgtgttgaacaaactagtggtggtgaaactcaatggtggtttgggaaccagcatgggctgcaaaggccctaaaagtctgattggtgtgaggaatgagaatacctttctggatctgactgttcagcaaattgaacatttgaataaaacctaccatacagatgttcctcttgttttatgaactcttttaacacggatgaagataccaaaaaaatactacagaagtacaatcattgtcgtgtgaaaatctacactttcaatcaaagcaggtacccgaggataataaagaatcttacttcctggtagcaaaggacgtgtctactcaagg

SEQ ID NO: 22072 - DNA, 1065 bp, Homo Sapiens
ccgggctgcaggaattcggcacgaggcgggagccgtggaggtacgaacttaagacatgcctattttattaatttacttccaaacgcaacgaaaggtccatggacaatttgtgggccatttaattcagggcccccaattcgtacgtggagaagtgggaatgcaaaagtactttgacctttaaccttcggtccggcgcggtggagggaaacgcctccgtctctatataaggaattttccggtctcttcgggtcctttttcctctcttcagcgtggggcgcccacaatttgcgcgctctctttctgctgctccccagctctcggatacagccgacaccatgggtttcggagacctgaaaagccctgccggcctccaggtgctcaacgattacctggcggacaagagctacatcgaggggtatgtgccatcacaagcagatgtggcagtatttgaagccgtgtccagcccaccgcctgccgacttgtgtcatgccctacgttggtataatcacatcaagtcttacgaaaaggaaaaggccagcctgccaggagtgaagaaagctttgggcaaatatggtcctgccgatgtggaagacactacaggaagtggagctacagatagtaaagatgatgatgacattgacctctttggatctgatgatgaggaggaaagtgaagaagcaaagaggctaagggaagaacgtcttgcacaatatgaatcaaagaaagccaaaaaacctgcacttgttgccaagtcttccatcttactagatgtgaaaccttgggatgatgagacagatatggcgaaattagaggagtgcgtcagaagcattcaagcagacggcttagtctggggctcatctaaactagttccagtgggatacggaattaagaaacttcaaatacagtgtgtagttgaagatgataaagttggaacagatatgctggaggagcagatcactgcttttgaggactatgtgcagtccatggatgtggctgctttcaacaagatctaaaatccatcctggatcatggcatttaaataaaagattgaaagattaaaaaaaa

SEQ ID NO: 22073 - DNA, 867 bp, Homo Sapiens
gcacgaggccgtcatcttcgggagccgtggaggtacgaacttaagacatgcctattttattaatttacttccaaacgcaacgaaaggtccatggacaatttgtgggccatttaattcagggcccccaattcgtacgtggagaagtgggaatgcaaaagtactttgacctttaaccttcggtccggcgcggtggagggaaacgcctccgtctctatataaggaattttccggtctcttcgggtcctttttcctctcttcagcgtggggcgcccacaatttgcgcgctctctttctgctgctccccagctctcggatacagccgacaccatgggtttcggagacctgaaaagccctgccggcctccaggtgctcaacgattacctggcggacaagagctacatcgaggggtatgtgccatcacaagcagatgtggcagtatttgaagccgtgtccagcccaccgcctgccgacttgtgtcatgccctacgttggtataatcacatcaagtcttacgaaaaggaaaaggccaggtaaaatcatctttgtatagagctgaagaataagactgctctcgaagtttatcaggatgttcacatgacaaaactggacccaggctactttagttttgttgggatattgtaagctaaatttttctgtaaccttagaaggccaagagactgaagccctccattttttcacagaacaggtagaacatggacagcagcaattcaacttttccccacactgccctgccaatgtgcctcgaccttgacctggggggcccacctctggggtgagagggtggctcattcattcagtccttggccattcttctgaaactgccaacaagggtggaagtttggggaa

SEQ ID NO: 22074 - DNA, 1779 bp, Homo Sapiens
gcacgaggagcatttcgagcatgtgcgcatggtggatcccaagaaagccgctcagatccggtcccaggttatgacacacctccgtgtgatttatgagcgcatgaatcagtctctctccctgctctacaacgtgcctgcagtggccgaggagattcaggatgaagttgatgagctgcttcagaaagagcaaaactattcagatgacgtcttggccaacatgattagtgaaccaaggatcagttacggaaacgatgctctcatgccatctttgaccgaaacgaaaaccaccgtggagctccttcccgtgaatggagagttcagcctggacgatctccagccgtggcattcttttggggctgactctgtgccagccaacacagaaaacgaagttgagcctgttgatgcccgccctgctgccgaccgaggactgaccactcgaccaggttctgggttgacaaatatcaagacggaggagatctctgaagtgaagatggatgcagaattccgacatgactcaggatatgaagttcatcatcaaaaattggtgttctttgcagaagatgtgggttcaaacaaaggtgcaatcattggactcatggtgggcggtgttgtcatagcgacagtgatcgtcatcaccttggtgatgctgaagaagaaacagtacacatccattcatcatggtgtggtggaggttgacgccgctgtcaccccagaggagcgccacctgtccaagatgcagcagaacggctacgaaaatccaacctacaagttctttgagcagatgcagaactagacccccgccacagcagcctctgaagttggacagcaaaaccattgcttcactacccatcggtgtccatttatagaataatgtgggaagaaacaaacccgttttatgatttactcattatcgccttttgacagctgtgctgtaacacaagtagatgcctgaacttgaattaatccacacatcagtaatgtattctatctctctttacattttggtctctatactacattattaatgggttttgtgtactgtaaagaatttagctgtatcaaactagtgcatgaatagattctctcctgattatttatcacatagccccttagccagttgtatattattcttgtggtttgtgacccaattaagtcctactttacatatgctttaagaatcgatgggggatgcttcatgtgaacgtgggagttcagctgcttctcttgcctaagtattcctttcctgatcactatgcattttaaagttaaacatttttaagtatttcagatgctttagagagattttttttccatgactgcattttactgtacagattgctgcttctgctatatttgtgatataggaattaagaggatacacacgtttgtttcttcgtgcctgttttatgtgcacacattaggcattgagacttcaagcttttctttttttgtccacgtatctttgggtctttgataaagaaaagaatccctgttcattgtaagcacttttacggggcgggtggggaggggtgctctgctggtcttcaattaccaagaattctccaaaacaattttctgcaggatgattgtacagaatcattgcttatgacatgatcgctttctacactgtattacataaataaattaaataaaataaccccgggcaagactttttctttgaaggatgactacagacattaaataatccaagtaattttgggtggggagagaggcagatccaattttctttaacagtctgaagtttctttatgatacaaa

SEQ ID NO: 22075 - DNA, 933 bp, Homo Sapiens
atcccccgggctgcaggaattcggcacgaggctatcctacattattaatgggttttgtgtactgtaaagaatttagctgtatcaaactagtgcatgaatagattctctcctgattatttatcacatagccccttagccagttgtatattattcttgtggtttgtgacccaattaagtcctactttacatatgctttaagaatcgatgggggatgcttcatgtgaacgtgggagttcagctgcttctcttgcctaagtattcctttcctgatcactatgcattttaaagttaaacatttttaagtatttcagatgctttagagagattttttttccatgactgcattttactgtacagattgctgcttctgctatatttgtgatataggaattaagaggatacacacgtttgtttcttcgtgcctgttttatgtgcacacattaggcattgagacttcaagcttttctttttttgtccacgtatctttgggtctttgataaagaaaagaatccctgttcattgtaagcacttttacggggcgggtggggaggggtgctctgctggtcttcaattaccaagaattctccaaaacaattttctgcaggatgattgtacagaatcattgcttatgacatgatcgctttctacactgtattacataaataaattaaataaaataccccgggcaagacttttctttgaaggatgactacagacattaaataatcgaagtaattttgggtggggagaagaggcagattcaattttctttaaccagtctgaagtttcatttatgatacaaaagaagatgaaaatggaagtggcaatataaggggatgaggaaggcatgcctggacaaacccttcttttaagatgtgtcttcaatttgtataaaatggtgttttcatgtaaataaatacattcttggaggag

SEQ ID NO: 22076 - DNA, 1910 bp, Homo Sapiens
  misc_feature (87)..(108): n is a, c, g, or t
  misc_feature (708)..(717): n is a, c, g, or t
  misc_feature (1002)..(1010): n is a, c, g, or t
  misc_feature (1129)..(1139): n is a, c, g, or t
  misc_feature (1206)..(1218): n is a, c, g, or t
gcacgagggggtgttttatttatttggaagtgaattttaactatcaatacaaatgccaagatactacacaaaacatccacaggaacnnnnnnnnnnnnnnnnnnnnnngaattgtacacaaacatttcctacataatccaacatacaacagagaaatggtacatctttttctttcaatttgcatacaatggaaaaacaagtatatatatattttacaaagtttaactaataagacactagagcaaattgacagtttaagtctataggtgagaaattatctaataaaaataatcaattttttcagcattagtcacttccataaccaagtgttattctgattaataaaacttgctgccaatcagaattctggtatatactcataccattactcaacttgtagtactgctccccaccttagttcttcacaactaacatagaaaattgttgaaaagtaggggcaagcatttgcaaaaacaaacaaaaaatccccagcttattataagcatgaatatgtatgatggaatttcttcccagcaatagacttccaaaccatcaagaaatcaccagaactaagtttgccaagttattttgcctatgtccaacaagagatgcacttatatgtccaacagaggagctgaaaattaaacttagtgtttagtttgggggtgggttgggaaattcagccaccattttaaaatgactgtcttnnnnnnnnnntgaccaccaaaaatggttcactaaatttattttaaaaatcataaaacgtttcttacaaaagagcattacattctgcacactgctctgaacagatgccagggacatgtggactattgttacttttcctccctgtcccaccccccaaatgttacagtgaccacaaagcaaggtgttcacaataattacatggggggaattttttaaaccaccaacaataacgaaaaataaaatccactcactctgctgctgtttcaaaatttcaatgttagtttttgcacgcccttnnnnnnnnnaaccctgtttgtaaggaactaaaacattacatctggtgaacagcaaagatttcactacacctcaaatgcagaacacctatgaagcaaaggaatgttggctttttaaacagaagcagatnnnnnnnnnnngatgcaggactccttcagttcttcactagtcttaaaaaaactttccagaatactgcttcacactatnnnnnnnnnnnnntatcttgcattagaatccttcaacatctgcatactgcttcacactgttctgcagcaaatactgtgcattctgtatctggtcctgtgttcctgtaatggtaatgatccgatcttcggatccttctaaaggctcatcaattttgatcgaagctcccgactcatgacggatttgtttaatccgctgaccacctttgccaataatagatccagccaaatctttgggaatagttacttgtgtagtaataataggtccaccaagatcaccatatgagccacgaccccctgcataggaataatcatatccggagccaccctgtggttcataagccatctgccattctgatgggctccatgtatctattgcagagtcccaagtttcatcagcactgaaaccaaccatgccgtcgtaacggtctccaggtctccctcttctgtcataggccatgaggtctcgacgagggctcatatcatcataatctcttctagatggaggcatgggacgcccaccccgaccaggaggcattctgtcaaaaccacctcttccccgcatgggaaatcccactgggcgtccgcgacggtcatcaaacatcattgtaaaaccaccataatcataggtttcatcgtaaaaattgggatcataaggctgtgcacgtcctttgatgggagactcagatataagatcaagcctcgtgc

SEQ ID NO: 22077 - DNA, 976 bp, Homo Sapiens
  misc_feature (869)..(890): n is a, c, g, or t
gcacgagggcgacagcactgcagacgccattatcctctgtttctctgctgcaccgacctcgacgtcttgcctgtgtcccacttgttcgcggcctataggctactgcagcactggggtgtcagttgttggtccgacccagaacgcttcagttctgctctgcaaggatatataataactgattggtgtgcccgtttaataaaagaatatggaaactgaacagccagaagaaaccttccctaacactgaaaccaatggtgaatttggtaaacgccctgcagaagatatggaagaggaacaagcatttaaaagatctagaaacactgatgagatggttgaattacgcattctgcttcagagcaagaatgctggggcagtgattggaaaaggaggcaagaatattaaggctctccgtacagactacaatgccagtgtttcagtcccagacagcagtggccccgagcgcatattgagtatcagtgctgatattgaaacaattggagaaattctgaagaaaatcatccctacttttcaacaattttctatgttagttgtgaagaactaaggtggggagcagtactacaagttgagtaatggtatgagtatataccagaattctgattggcagcaagttttattaatcagaataacacttggttatggaagtgactaatgctgaaaaaattgattatttttattagataatttctcacctatagacttaaactgtcaatttgctctagtgtcttattagttaaactttgtaaaatatatatatacttgtttttcccttgtatgcaaattgaaagaaaaagatgtaccatttctctgttgtatgttggattatgtaggaaatgtttgtgtacaattcnnnnnnnnnnnnnnnnnnnnnngttcctgtggatgttttgtgtagtatcttggcatttgtattgatagttaaaattcacttccaaataaataaaacacccatgatgct

SEQ ID NO: 22078 - DNA, 1634 bp, Homo Sapiens
  misc_feature (1441)..(1461): n is a, c, g, or t
cccgggctgcaggaattcggcacgaggtttttcttaaatcaaagagtagtttattaaaaaagaatcaaacagaaactctaagtaccagtgtgtacattgtacacatttaaatgactcacgagaatgaagtttttttcaaatatattaagatcacaccaccttgttgtttatcgaaagatattcaaggagaaagatctgactctccaaactgcatctgagattgccactttaaacagacctcatttcaaacatgcaacaacgccactggtaataaagctttggaatgggtgctcattctattatttcactacaaacagcatagaaagcaagagaagttgggaatttattctaaaatagaatggaggttgtcatctacagcagcactcctcactcctctgttgccatttttagcaagtactccttgtcgatcttgaacagtctccaaccctcttcactggacagatcagaagcacctcttcttttatagaagttgatggatggttcattccattctgctaccaagaagtgcatgctgctgcagcgacacctcattgcaacctggcttagattcttcagaatttctgatcctatgccaaagcctctataatcactcatcacgaagaagtcctcaagatacaataacttgccaatccacgggtcataggtaaaatagtacatggcaaaaccaacaatgctgtgtcctgtaataagagcatcacatgagatgtggagaaggaaaacattccataaaagttgcagctgcagaatcagaggcctatcataggttttaaaaaacacacatgcatgtattacagaaacaagtagccatggctgtctcatgatttttatgtgagtgcagtccaggccactgctggatgatctcactgttctgagaacatgtatttgcaaaaagcacacatcagaactcactgaagtcaggctacaactgtggactggccactctgcagtctgctggagctcacactcaggaagcgagaacgctttcattacttgccagagcaaaactgctatggttttaaactcaacacacacattattcacatcctattggtatactggtatgttgacttgggaatacgtcaggtttacacggcagttcagaatagtaaatatttggaagtttacaaactcttgcttccttaaaggtcagaacatcaggccaaagtacaacgtttaatttcagaacttgccttccaatttacgcattttcaatttgctctccccatttgttgagtcagaagaagcagcattgcccagaaacaggtattacgtaacatgcacatactttaaaaagtactcatcccttgttttctgctcatttcttccagcctgaggaacagacgtcagaaaaaaagcaaccacccagacaacttccccttttagctgagctgttttttgaccaatcaacagggaccagccnnnnnnnnnnnnnnnnnnnnnggcatctgacaccctcttaactggtgtctactattccaaatggaggcaaaggtttcaaattaaactttctagccattttatattccttagcaaacagacaggaagcgagtatcatagtgggtttctgatctaccgtgtttgaagtgtgtgataataggaccttaccctcgtgc

SEQ ID NO: 22079 - DNA, 1040 bp, Homo Sapiens
gcacgagggcgggccgactggtgtttatccgtcactcgccgaggttccttgggtcatggtgccagcctgactgagaagaggacgctcccgggagacgaatgaggaaccacctcctcctactgttcaagtacaggggcctggtccgcaaagggaagaaaagcaaaagacgaaaatggctaaattcgtgatccgcccagccactgccgccgactgcagtgacatactgcggctgatcaaggagctggctaaatatgaatacatggaagaacaagtaatcttaactgaaaaagatctgctagaagatggttttggagagcaccccttttaccactgcctggttgcagaagtgccgaaagagcactggactccggaaggacacagcattgttggttttgccatgtactattttacctatgacccgtggattggcaagttattgtatcttgaggacttcttcgtgatgagtgattatagaggctttggcataggatcagaaattctgaagaatctaagccaggttgcaatgaggtgtcgctgcagcagcatgcacttcttggtagcagaatggaatgaaccatccatcaacttctataaaagaagaggtgcttctgatctgtccagtgaagagggttggagactgttcaagatcgacaaggagtacttgctaaaaatggcaacagaggagtgaggagtgctgctgtagatgacaacctccattctattttagaataaattcccaacttctcttgctttctatgctgtttgtagtgaaataatagaatgagcacccattccaaagctttattaccagtggcgttgttgcatgtttgaaatgaggtctgtttaaagtggcaatctcagatgcagtttggagagtcagatctttctccttgaatatctttcgataaacaacaaggtggtgtgatcttaatatatttgaaaaaaacttcattctcgtgagtcatttaaatgtgtacaatgtacacactggtacttagagtttctgtttgattcttttttaataaactactctttgattt

SEQ ID NO: 22080 - DNA, 884 bp, Homo Sapiens
  misc_feature (514)..(524): n is a, c, g, or t
cgcgggccgactggtgtttatccgtcactcgccgaggttccttgggtcatggtgccagcctgactgagaagaggacgctcccgggagacgaatgaggaaccacctcctcctactgttcaagtacaggggcctggtccgcaaagggaagaaaagcaaaagacgaaaatggctaaattcgtgatccgcccagccactgccgccgactgcagtgacatactgcggctgatcaaggagctggctaaatatgaatacatggaagaacaagtaatcttaactgaaaaagatctgctagaagatggttttggagagcaccccttttaccactgcctggttgcagaagtgccgaaagagcactggactccggaaggtaacccctcgccctttccagaagccagagagaccaagtgttatgtaagaagtagtgtcggctgtgtagaaccactgactacacaggccgaagttactgagaacttggacagaaaaaatagccagcaagtgttcaaactactgaggnnnnnnnnnnnttagatatgctgcacttaagaatactagggcaggttaaaagagctgtttaagtaagtatcagagtgctgtggagactcggaagtgtttaagctgcttaagtaagtataagtgctgtggagacccggaagagttagatataatgtcatttgttgtaattcagtttcataaaatggttcttgtttgaccctaacgtaacagtttttgtaattgtgttaaatcacatttttttctttaatttgtcccaatcttctgttacagtctctagcttcgccatgtacatggcccttccgggtacatggatgggcggggaggtaactaaaagatccctttacccataagtagatgatcatgataaatga

SEQ ID NO: 22081 - DNA, 900 bp, Homo Sapiens
gcacgaggcttccttcgctaacgcctcccggctctcgtcagcctcccgccggccgtctccttaacaccgaacaccatgccttcaattaagttgcagagttctgatggagagatatttgaagttgatgtggaaattgccaaacaatctgtgactattaagaccatgttggaagatttgggaatggatgatgaaggagatgatgacccagttcctctaccaaatgtgaatgcagcaatattaaaaaaggtcattcagtggtgcacccaccacaaggatgaccctcctcctcctgaagatgatgagaacaaagaaaagcgaacagatgatatccctgtttgggaccaagaattcctgaaagttgaccaaggaacactttttgaactcattctggctgcaaactacttagacatcaaaggtttgcttgatgttacatgcaagactgttgccaatatgatcaaggggaaaactcctgaggagattcgcaagaccttcaatatcaaaaatgactttactgaagaggaggaagcccaggtaggtagcacacagttttgtctttgatcacatgctcttaaaaagggagtaacacctataacatgccagcaaaagaggtgactgtatcaagtagtcttgatactttagggataatatgtacttaatgtgtcttaaacatactcttactgttctgtctttatgaatctgaacacttagatgatactgcattttaagcataagaacaattagttttcaatgagaagagctcttgttatgtattaacagttactagttttggcacctgcactttctgtatagaccatacatatctgacatcagaaaagcaggccctagagagaatatatactaaggtactttagagcaacttaatgaggggaggaaatgaaa

SEQ ID NO: 22082 - DNA, 951 bp, Homo Sapiens
ttttctattccagaaaacttttttgcaagttgttttatttacaatgccaacttttaaaaggtcactaaagttaactggacaataaactaggcagacattgctttacaaaaaagagggaaagcccaaaatgccacttatagagaacccacagttcagttttattcagagcaaagaaaaaagaaactttccatcatactagaagaaacttggccgtaaggtttgggatctgtgctcaaactacacatgcaatgaggacaatattctgctaatacaattgacttgctgctgcatttgtctactgtttgtctaatattaacaattataaacagagcagtgcaactagtatttggaacaatccttacagtgttacagtgtcaggcacaacatttcacttctcttcacaccactggttctctttgcgtacctgggcttcctcctcttcagtaaagtcatttttgatattgaaggtcttgcgaatctcctcaggagttttccccttgatcatattggcaacagtcttgcatgtaacatcaagcaaacctttgatgtctaagtagtttgcagccagaatgagttcaaaaagtgttccttggtcaactttcaggaattcttggtcccaaacagggatatcatctgttcgcttttctttgttctcatcatcttcaggaggaggagggtcatccttgtggtgggtgcaccactgaatgaccttttttaatattgctgcattcacatttggtagaggaactgggtcatcatctccttcatcatccattcccaaatcttccaacatggtcttaatagtcacagattgtttggcaatttccacatcaacttcaaatatctctccatcagaactctgcaacttaattgaaggcatggtgttcggtgttaaggagacggccggcgggaggctgacgagagccgggaggcgttagcgaagcctcgtgc

SEQ ID NO: 22083 - DNA, 707 bp, Homo Sapiens
  misc_feature (41)..(59): n is a, c, g, or t
gcacgaggctcccttggcaacattcgtaaatgaagcagaannnnnnnnnnnnnnnnnnnccaaatatgttagttttgttcttgtaagatgtatcatgggtattggtgctgtgtaatgaacaacgaattttaattagcatgtggttcagaatatacaatgttaggtttttaaaaagtatcttgatggttcttttctatttataatttcagactttcataaagtgtaccaagaatttcataaatttgttttcagtgaactgctttttgctatggtaggtcattaaacacagcacttactcttaaaaatgaaaatttctgatcatctaggatattgacacatttcaatttgcagtgtctttttgactggatatattaacgttcctctgaatggcattgatagatggttcagaagagaaactcaatgaaataaagagaatatttattcatggcgattaattaaattatttgcctaacttaagaaaactactgtgcgtaactctcagtttgtgcttaactccatttgacatgaggtgacagaagagagtctgagtctacctgtggaatatgttggtttattttcagtgcttgaagatacattcacaaatacttggtttgggaagacaccgtttaattttaagttaacttgcatgttgtaaatgcgttttatgtttaaataaagaggaaaattttttgaaaaaaacctcgtgc

SEQ ID NO: 22084 - DNA, 1743 bp, Homo Sapiens
  misc_feature (1018)..(1063): n is a, c, g, or t
  misc_feature (1332)..(1349): n is a, c, g, or t
ccccgggctgcaggaattcggcacgaggtcacggttaaaattacttgtattgtttctgaagtttgctcctgaaaactactgtttgagcactgaaacgttacaaatgcctaataggcatttgagactgagcaaggctacttgttatctcatgaaatgcctgttgccgagttattttgaatagaaatattttaaagtatcaaaagcagatcttagtttaagggagtttggaaaaggaattatatttctctttttcctgattctgtactcaacaagtcttgatggaattaaaatactctgctttattctggtgagcctgctagctaatataagtattggacaggtaataatttgtcatctttaatattagtaaaatgaattaagatattataggattaaacataattttatacggttagtactttattggccgacctaaatttatagcgtgtggaaattgagaaaaatgaagaaacaggacagatatatgatgaattaaaaatatatataggtcaattttggtctgaaatccctgaggtgtttttaacctgctacactaatttgtacactaatttatttctttagtctagaaatagtaaattgtttgcaagtcactaataatcattagataaattattttcttggccatagccgataattttgtaatcagtactaagtgtatacgtatttttgccactttttcctcagatgattaaagtaagtcaacagcttattttaggaaactgtaaaagtaatagggaaagagatttcactatttgcttcatcagtggtaggggggcggtgactgcaactgtgttagcagaaattcacagagaatggggatttaaggttagcagagaaacttggaaagttctgtgttaggatcttgctggcagaattaactttttgcaaaagttttatacacagatatttgtattaaatttggagccatagtcagaagactcagatcataattggcttatttttctatttccgtaactattgtaatttccacttttgnnnnnnnnnnnnnnnnnnnnnnnnnnnnnnnnnnnnnnnnnnnnnntagtcaaaaatctttgctgttgtagtctgcaacctctaaaatgattgtgttgcttttaggattgatcagaagaaacactccaaaaattgagatgaaatgttggtgcagccagttataagtaatatagttaacaagcaaaaaaagtgctgccaccttttatgatgattttctaaatggagaaacatttggctgcatccacatagacctttatgttttgttttcagttgaaaacttgcctcctttggcaacattcgtaaatgaagcagaannnnnnnnnnnnnnnnnnccaaatatgttagttttgttcttgtaagatgtatcatgggtattggtgctgtgtaatgaacaacgaattttaattagcatgtggttcagaatatacaatgttaggtttttaaaaagtatcttgatggttcttttctatttataatttcagactttcataaagtgtaccaagaatttcataaatttgttttcagtgaactgctttttgctatggtaggtcattaaacacagcacttactcttaaaaatgaaaatttctgatcatctaggatattgacacatttcaatttgcagtgtctttttgactggatatattaacgttcctctgaatggcattgatagatggttcagaagagaaactcaatgaaatcctcgtgccgaattcctgcagcccgg

SEQ ID NO: 22085 - DNA, 1190 bp, Homo Sapiens
gcacgaggctcgcaagtgcctccgtgaggagattcacaaggacctgctagtgactggcgcgtacgagatctccgaccagtctgggggcgctggcggcctgcgcagccacctcaagatcacagattctgctggccatattctctactccaaagaggatgcaaccaaggggaaatttgcctttaccactgaagattatgacatgtttgaagtgtgttttgagagcaagggaacagggcggatacctgaccaactcgtgatcctagacatgaagcatggagtggaggcgaaaaattacgaagagattgcaaaagttgagaagctcaaaccattagaggtagagctgcgacgcctagaagacctttcagaatctattgttaatgattttgcctacatgaagaagagagaagaggagatgcgtgataccaacgagtcaacaaacactcgggtcctatacttcagcatcttttcaatgttctgtctcattggactagctacctggcaggtcttctacctgcgacgcttcttcaaggccaagaaattgattgagtaatgaatgaggcatattctcctcccaccttgtacctcagccagcagaacatcgctgggacgtgcctggcctaaggcatcctaccaacagcaccatcaaggcacgttggagctttcttgccaaaactgatctcttttggtgtgggaggacatggggtaccacctacacccaacaagtcaatgagggacttctttttaatttggtaggattttgactggttttgcaacaataggtctattattagagtcacctatgacaaaaaataggggttacctagataatgccaaagtcagcatttgtcctgggttcccttgtgtgatctgtttggactatgttttcttttcttctcccacttgctcaacagcttgggcttccattctagttcttttaccaagatttttgtgtgaccatgttgacttcatttggattgccctctttcaatttccttgtgaaaacacccttaactttctctttacccttagctgaaatgtttacatagcttctggtgatatcttttcatgattttatatctcttaacatggtgatggatgtgacacctcataaaagtgagctttgaactgtagataactcttaaagaaaatgtcatttttagacaattaaaatatttgtgctcaactgcttg

SEQ ID NO: 22086 - DNA, 1904 bp, Homo Sapiens
  misc_feature (717)..(725): n is a, c, g, or t
  misc_feature (967)..(978): n is a, c, g, or t
  misc_feature (1000)..(1264): n is a, c, g, or t
ctaatttgccatctatgtatcctcttcggtgaaatgtcttcatgtcttttgtctattttctatttaggtcatttgttctttttactattgagttttgagaggttttttatatatcctagataaaattcctctgttagatatgtggttgcttgaatttttaacataacttctaccaaggaaaaataagtaaaatttccaacccttgcatggccagtcacttacttaattcctgtccttcagtgttccatctagagaattaagagatatgatgtataaaatagacatcgagggccattaagagagtaaatacttaaaaatacatgttatgaaagcaaagccaataatcactgtaggagtatgagttgcctaagggccaaaactaatgtaaataagagaaagtgtggatataaatgaccattgtttataaacagtcatgaaaaatgctgtgacttgaaatctttcccacatctcccaagaaagtaggtaggagtttatcctttccgtaatctctttttaaccctgctgactattacagggcttgtttaatcacagtggcaagaattacatgtatcttacagtaaagaaacagaatactggaatcgttagagaaccctgatgtgttgacctggataaagtacaaaggtggaagagggaatgagttatgctgttaaaatctcaggctattctgttatgttcctgctactatgaacccaaacnnnnnnnnncccccttttgactccttgtgtcttcctctcctgtggcataaaagtagttctgtcgttaacttgtacaacattgccatctgctgtcaaaattggtaggtactgcttctgagaacctggctgcagatccttagcataggcagcaaatgttgagaaagtctatctgtagtattacatatactaagttacagaggatgcatccaagtagagaaaataatatgtgggttaagatacatccttaaacnnnnnnnnnnnnggggggggggggacggagtctnnnnnnnnnnnnnnnnnnnnnnnnnnnnnnnnnnnnnnnnnnnnnnnnnnnnnnnnnnnnnnnnnnnnnnnnnnnnnnnnnnnnnnnnnnnnnnnnnnnnnnnnnnnnnnnnnnnnnnnnnnnnnnnnnnnnnnnnnnnnnnnnnnnnnnnnnnnnnnnnnnnnnnnnnnnnnnnnnnnnnnnnnnnnnnnnnnnnnnnnnnnnnnnnnnnnnnnnnnnnnnnnnnnnnnnnnnnnnnnnnnnnnnnnnnnnnnnnnnnnnnnnncagcctccatctttaaacttttaaatgtgaaatttctatcatgtaccgttagcctaacaagattttctttcctatttctgactggtgcctttcccctttttaggagcaacgaaagctactctcttagttatgttcttgtgatgtgacaaaatgtcaagaagataggagaagagaatattttatttcgttgatgcttttgttcccaagtgtgaccctaaacttaagctttgtaggagttgacattctttcatgtcccttccctttactcatgccgaaactatcaactgggacattttgtgcttttggtttaaaagttaattgatattatactttggttttatctaaaaagtaaatgtatttgcctttgacaaaagactgacacaagagcaaataagctttaaaatcgggtgttatgtgctttcctccatttttgagcatattatccaaaatggtctgtataatataaatgagaatgatgcagtttaagtaagccttgttataccattgtcatggaccctgtcataaagccattttcttggtttgtttgggaaagaggcatatgggattatacagattcacttgtaaatgttggattggggatttttgtgtaaattttctcaaataaaggctagcagaaacc

SEQ ID NO: 22087 - DNA, 953 bp, Homo Sapiens
gcacgaggttttaaaattagaaagtggtttatttgcaatttacatggattcctctactttgtgaggtttagtataattgaaatgtattgcaattttcaggaacattacctacaaattgatattaggtggtctacagcttgtaattgatgtgcttcatgataaagatggcagtaatgatgttttaaatattctagtgctcactggatttcatttttgcaggcaatttgcagctcctctgagtaaaacatttatattcaattacagagtctgataaataggattcccgccaccccaccccttctaatcactgcagagtattaatagtgctttcttatggctgatttcttgcagggagcaaagataagattatagccaaatttctttcaaaacctcagcagcatctccttctggtagctatttagatattttcttccacctctttgacttcagatgacacgaccttgccatccactacttcttgcacgactgtcttaatcttcctggttttctttatatctctctcttccagggtgcttaactgatattctgtagtttttacgtcttctccttccagaaggcggcggtaagtagcaatttcctgttcaagtcgagtctttatgtcaagaaggatatggtattcgttgttctggcgttccatgttactccgaatctgcatcagttgggcctccagagagctcaacagcgactggaggttggctaactggctgctgtaacgggccttggtctcctctagagtgtgctccaaagactctttcatgctgagatgggactggagttctatctcaaggctctgggaggtgcgtctcagctccgttagttgaacctcagttccttttaattcttcagtattcactgtgacctgttgctgcagaactgcagtctgtctctcaaactgttctttggcctcttgaaggttcttctgggcctcgtgc

SEQ ID NO: 22088 - DNA, 839 bp, Homo Sapiens
aaaattagaaagtggtttatttgcaatttacatggattcctctactttgtgaggtttagtataattgaaatgtattgcaattttcaggaacattacctacaaattgatattaggtggtctacagcttgtaattgatgtgcttcatgataaagatggcagtaatgatgttttaaatattctagtgctcactggatttcatttttgcaggcaatttgcagctcctctgagtaaaacatttatattcaattacagagtctgataaataggattcccgccaccccaccccttctaatcactgcagagtattaatagtgctttcttatggctgatttcttgcagggagcaaagataagattatagccaaatttctttcaaaacctcagcagcatctccttctggtagctatttaaatattttcttccacctctttgacttcagatgacacgaccttgccatccactacttcttgcacgactgtcttaatcttcctggttttctttatatctctctcttccagggtgcttaactgatatgcactgtagtcgcgaccagccctcggggcgttggtttcgtaccactgcttgatttgcacttcaagtttggagttggactgctccagggtccgcaccttttctaggtagctcgctagacggtcatttaggttctgcatggccattttctcattgcccacaaacaggtccccgccgcctgtgagatcgctcccatagtttcaccgtgtgtctggagttggagatgcggatgccccgggctccagcaccctcaaaaacggctggggggtcgtcccgaggcgctgcatgccactgtactgactacagggg

SEQ ID NO: 22089 - DNA, 1051 bp, Homo Sapiens
gcacgagggtgagaagccatgagcagcaaagtctctcgcgacaccctgtacgaggcggtgcgggaagtcctgcacgggaaccagcgcaagcgccgcaagttcctggagacggtggagttgcagatcagcttgaagaactatgatccccagaaggacaagcgcttctcgggcaccgtcaggttggcaccgttctgatcccacccagccctcagtgcccccgtgcttgcccctcccctgcaggctcccgctgagccggaggcgggcacgtcggtactgatgtgctagggtagttcagaccctctgctccgggcaggcgcggctggacggacccccaccctgggtcttaaaacatgaggggaggcgtgggtaggcctcggccgagcccgccggccagcctgagaagccaggctggctgctggtgaatgtgaacgctccgggtaaggctcggtggctgctgcggtcccagacccttcaccggcccttgggacccagggctaggcgtaacctgttggtgctgtcccccaaaacgcaggcttaagtccactccccgccctaagttctctgtgtgtgtcctgggggaccagcagcactgtgacgaggctaaggccgtggatatcccccacatggacatcgaggcgctgaaaaaactcaacaagaataaaaaactggtcaagaagctggccaagaagtatgatgcgtttttggcctcagagtctctgatcaagcagattccacgaatcctcggcccaggtttaaataaggcaggaaagttcccttccctgctcacacacaacgaaaacatggtggccaaagtggatgaggtgaagtccacaatcaagttccaaatgaagaaggtgttatgtctggctgtagctgttggtcacgtgaagatgacagacgatgagcttgtgtataacattcacctggctgtcaacttcttggtgtcattgctcaagaaaaactggcagaatgtccgggccttatatatcaagagcaccatgggcaagccccagcgcctatattaaggcacatttgaataaattctattacc

SEQ ID NO: 22090 - DNA, 642 bp, Homo Sapiens
gcacgaggctggtaatagaatttgacattctgccagtttttcttgagcaatgacaccaagaagttgacagccaggtgaatgttatacacaagctcatcgtctgtcatcttcacgtgaccaacagctacagccagacataacaccttcttcatttggaacttgattgtggacttcacctcatccactttggccaccatgttttcgttgtgtgtgagcagggaagggaactttcctgccttatttaaacctgggccgaggattcgtggaatctgcttgatcagagactctgaggccaaaaacgcatcatacttcttggccagcttcttgaccagttttttattcttgttgagttttttcagcgcctcgatgtccatgtgggggatatccacggccttagcctcgtcacagtgctgctggtcccccaggacacacacagagaacttagggcggggagtggacttaagcctgacggtgcccgagaagcgcttgtccttctggggatcatagttcttcaagctgatctgcaactccaccgtctccaggaacttgcggcgcttgcgctggttcccgtgcaggacttcccgcaccgcctcgtacagggtgtcgcgagagactttgctgctcatggcttctcacgccgcg

SEQ ID NO: 22091 - DNA, 1538 bp, Homo Sapiens
  misc_feature (385)..(403): n is a, c, g, or t
  misc_feature (678)..(832): n is a, c, g, or t
  misc_feature (834)..(859): n is a, c, g, or t
gcacgaggcgaacctcttcaacaggcttaccaggaagcatttgaaattagtaagaaagaaatgcagcctacacacccaattcgtcttggtctggcactaaatttctcagtcttttactatgagattctaaactctcctgaaaaggcctgtagcctggcaaaaacggcatttgatgaagcaattgctgaattggatacgctgaatgaagagtcttataaagacagcactctgatcatgcagttacttagggacaatctcactctgtggacatcggaaaaccagggagacgaaggagacgctggggagggagagaactaatgtttctcgtgctttgtgatccgttcagtgtcactctgtaccctcaacatatatcccttgtgcgatnnnnnnnnnnnnnnnnnnngaatcgtacgtcgactttcgatttttcacagcctcagcctaggaaaaatggttcatgggataaacagctggtatttgtatctaaaactcatataacacaccacactgaaccccctttcctacagcaatatgttcactatgttaccaatttgcaacttgtgcttcaatagtggaatctactttcattgttaacactgagctaaagaaaaaaagccgtgtgttttatgaatgaccttatctgtttcctggataatacctttaagaataatgtcctgnnnnnnnnnnnnnnnnnnnnnnnnnnnnnnnnnnnnnnnnnnnnnnnnnnnnnnnnnnnnnnnnnnnnnnnnnnnnnnnnnnnnnnnnnnnnnnnnnnnnnnnnnnnnnnnnnnnnnnnnnnnnnnnnnnnnnnnnnnnnnnnnnnnnnnnnnnncnnnnnnnnnnnnnnnnnnnnnnnnnnggaatgatgttctgtagagatggcctttcacttgaggagtactcagttttcaggttcttcctagctcggggcttttaaattttgaaatctaaacattctttcccaccatcctttttgactgttgaccttggttttctcttctaagtttctgtccctctgcttccttactttttttcctttttgaattctatctttatctgtcttttgttcactttttaatgctatatatgggcaggggtgagagacattactgagcaccttggtgagcaagcctggctttaaagattggagaagagcttctggcaccagaaccctgtcttcctccagttctcaacacggtgttgctcttcagtcataccggaatctgaatcaaaaaagtatttttaaatatccatgatttctccctgtattgaggctagccctgatcatgctttttgtgcctgtcaccaggtctcccaagtgcactcatccaggtcagtgctcagatgtgtttaaggagaccctatattcagggaagttgcgtgaacactgcagtggggagaattgagaatagtcaggcctatcagtctcacagaatcacccctctacctttgatattccacttagctgtagagtccatctgtttgtccatctgctgaaatgagaaaagaaaaatttatgcactgatttaaaacaaacc

SEQ ID NO: 22092 - DNA, 1510 bp, Homo Sapiens
  misc_feature (764)..(918): n is a, c, g, or t
  misc_feature (920)..(945): n is a, c, g, or t
  misc_feature (1105)..(1177): n is a, c, g, or t
gcacgaggcgactttcgatttttcacagcctcagcctaggaaaaatggttcatgggataaacagctggtatttgtatctaaaactcagattggtcacataaatgccacggcattccgaagttttgattttgattaacattgacaggattactgtgtgtttaattttttaaaaactgaacactgtgattatggggttttgtaatttagcagaactcttactggtagaaaaaatagacctgaattatgtgtaactttttggaaggtttaatctgatatcaaaataatcattgaaatacaattccattgtaaagttgtacagaaagttatagagattatattgtgatgctggaacttggagtgagacacacatcatttggcatttgagttgaatggtaattcacagtaatgctgccgttgttcgggacttaaagacacttgacctgtttgggctgttgccacttaaaagttcatgaccacaaatgtccacagtgtcttcctctgaggaaactcgaatcctgaaatggaaattctttgtggcagataactggcttatgacaccttgaaaagttcaagtgctcatataacacaccacactgaaccccctttcctacagcaatatgttcactatgttaccaatttgcaacttgtgcttcaatagtggaatctactttcattgttaacactgagctaaagaaaaaaagccgtgtgttttatgaatgaccttatctgtttcctggataatacctttaagaataatgtcctgnnnnnnnnnnnnnnnnnnnnnnnnnnnnnnnnnnnnnnnnnnnnnnnnnnnnnnnnnnnnnnnnnnnnnnnnnnnnnnnnnnnnnnnnnnnnnnnnnnnnnnnnnnnnnnnnnnnnnnnnnnnnnnnnnnnnnnnnnnnnnnnnnnnnnnnnnnncnnnnnnnnnnnnnnnnnnnnnnnnnnggaatgatgttctgtagagatggcctttcacttgaggagtactcagttttcaggttcttcctagctcggggcttttaaattttgaaatctaaacattctttcccaccatcctttttgactgttgaccttggttttctcttctaagtttctgtccctctgnnnnnnnnnnnnnnnnnnnnnnnnnnnnnnnnnnnnnnnnnnnnnnnnnnnnnnnnnnnnnnnnnnnnnnnnntccctcctttctagctgaacaaaaatgtgcagttaatacttggcgcttgaaaatgcagtagtgaatgtggaaccaagcctgtctgtatatctggtagctcttttcttgctttgttttttcttaccagtattctgcctaacgtttgcttctgtgatggttatattgcctagcaagcacacccgtggttgtgaaaatagtatagcaaaaaagaaaaatccccggttattgatgtactagatttgtgtatgtcttttaaacagttctagtttcaccttacacagaataatcagaaaagtgtaaaaattcaaaagtgaaataaaaattttatcagtt

SEQ ID NO: 22093 - DNA, 1388 bp, Homo Sapiens
  misc_feature (1196)..(1216): n is a, c, g, or t
gaattcggcacgagggataacccctatacaccacactatatgttggtggtctaggtgataccattactgagacagatttaagaaatcatttctaccagttcggagagatccggacgatcactgttgtgcagagacagcagtgtgctttcatccagtttgccacacggcaggctgcagaagtggctgctgagaagtcctttaataagttgattgtaaatggccgcagactgaatgtgaaatggggaagatcccaggcagccagaggaaaagaaaaagagaaagatggaactacagactctgggatcaaactagaacctgttcctggattgccaggagctcttcctcctcctcctgcagcagaagaagaagcctctgccaactacttcaacttgcccccaagtggtcctccagctgtggtgaacattgctctgccaccgccccctggcattgctccacccccacccccaggttttgggccacacatgttccacccaatgggaccaccccctcctttcatgcgggctccaggaccaatccactatccttctcaggaccctcagaggatgggagctcatgctggaaaacacagcagcccctagcaccttgtcaccactctggggctctgtggaagaaagggcacttaaaactcccagtaaatcttggaataaatatatttttccttcccttgtagtttccatggtagctgaatgtgctcagatgtgagcagtcagagactgacagccatgctttcctatacttgttcaaaggatcgatggaccgtaaataagctgccattaacacatctggttactgctgtaacatgactaataaaaccgaacgcctgttccccttacccgtgtgggggacacgcagatgagtgaattggaatgtccagcagagttaccctcccaattatatgttcattttgtatattttttggtcgggggaaaaattgacctgcagtaaaaaaacctttgaccatttttatgtccattggatactttcctttttatcatcttaaaaaaagataactagtactaatcattgtagtggcctaagtgtgatttaactcttgaagtcacaccctccgaaagatgagtagaaaccagcaccagcacagcccagatcttctctttcctctccttttcctcatttattcctaaaggaatctgaccattttacgtctctacggcccnnnnnnnnnnnnnnnnnnnnnttcctttttattcctgtcaactggatggaaacacaaatttcatggagctgtgtaccatcgaagaaacctggtgtctggcatgaaattactgtaaagaacttcctgtaaaacacgttctttacaaactgaaatgaaaacattggagcgtctgaatgaaagacgtgacctcctg

SEQ ID NO: 22094 - DNA, 894 bp, Homo Sapiens
  misc_feature (533)..(553): n is a, c, g, or t
gcgtccgatatttttccttcccttgtagtttccatggtagctgaatgtgctcagatgtgagcagtcagagactgacagccatgctttcctatacttgttcaaaggatcgatggaccgtaaataagctgccattaacacatctggttactgctgtaacatgactaataaaaccgaacgcctgttccccttacccgtgtgggggacacgcagatgagtgaattggaatgtccagcagagttaccctcccaattatatgttcattttgtatattttttggtcgggggaaaaattgacctgcagtaaaaaaacctttgaccatttttatgtccattggatactttcctttttatcatcttaaaaaaagataactagtactaatcattgtagtggcctaagtgtgatttaactcttgaagtcacaccctccgaaagatgagtagaaaccagcaccagcacagcccagatcttctctttcctctccttttcctcatttattcctaaaggaatctgaccattttacgtctctacggcccnnnnnnnnnnnnnnnnnnnnnttcctttttattcctgtcaactggatggaaacacaaatttcatggagctgtgtaccatcgaagaaacctggtgtctggcatgaaattactgtaaagaacttcctgtaaaacacgttctttaacaaactgaaatgaaaagcattggagcgtctgaatgaaagacgtgacctcctgctgggactctgatggtcttcagcattcaccttcgtgtgtcttcagtgtctcattgtcatccctgcttctgtttggtcttaaagtgtttggatataactgaattgtagatggtaaaggaaatttgatgtgttttttgtttttaaataattaaaacgggtcaatttttc

SEQ ID NO: 22095 - DNA, 1035 bp, Homo Sapiens
gcacgaggcacacagaataaatgctagtgctagccaatgatccctttgcttttaatgtatagaaaatactgttgttccttttgtcatttccagtgacatctgttttctaagcagctcttttctagggaggaaaccaaaggggctaggttaagaccctaatagaaatgttttttctaatctctggtgagtctggaagtgtcacattcacagtccacccttgggagtggcttggtggagctggggacaaggttttgtttactacatagtgcacatgataaatggccttaaactgtgattctttctggtaggataagttataataaactgaccctaaagaatgcaatggcttttaaactgcagttactgtgttcttaatgaagcaatacccaaagctctgttcttttggagcacttgaggggagcttgaatgaaaggtgcagataagagcagtaccttgatcttatgctttctgagtgtcctgccttgttgccatctgcatggatgagtgaatgcttctatgcacgaggagactcaagccaactcagagtctgctttttccaacgctcttcccaggtttcttttgcaaagcttggtcatttggcccaggtcttcctggaaagtggagtacatgtcactgactagggtggcgtggtgtctttacccttaacattaagtcttgttacctcagtgatgtgaagccaatggttggaattataaaaagcatccttgctggttcttcacaggacactggaacccaccctgtcaattcagctagcatgtccacacagtcttgatgatccctctctgtaacaggcagctaacattaagagaagggggaaagagaagaagagagcaatagcttatgggagagctgagatcttacttcgttgacccatatttttcccctgaccaagttacctgtaaactggaatttgcaaggggatgctgtgatgataacccctttctattgctgtaatgttcatataacctgggaaactgagagaaggggatgtgtaaataaaagcttaaacatttt

SEQ ID NO: 22096 - DNA, 501 bp, Homo Sapiens
cccgggctgcaggaattcggcacgaggtttcctttttaaaggtagtaagttttttaatccacttaaaaatacaagagcacaaatccacatttatttattgatttttcgttagtttaaatccttgaggggtacagcatcactcggattctgtgtccaatggccttagcaggaagattgcttcggaatttggcacgaaccatgccactgtttccatgggcccgagttacttttccccagatgactctggttttgtttggtttgccgccaggagtgactgtgttgttctttgctttatatacataagcgcatctcttgcccaaatagaattctgtttcatctcgggcgtaaacaccttcaattttaagaagagctgtgtgctccctttggttccggagaccccgcttatagccagcaaaaatggccttggaccacagccttccagacatagttccttttagaagtcccgttcccagcaggcctccacaggagccagcctcgtgc

SEQ ID NO: 22097 - DNA, 574 bp, Homo Sapiens
gcacgaggccaggctgcaaggcctgacctgcatccccgaaggtggccagaatgcacgtgggggccatcgccctgtgccgtcagctgcatcctcaggcgtggagacttagtggagacccaagggggcgaaccggaaggcttcctggaggaggaggcagcactggggttggggcaagagaaaagctaggagttggctgggggaaaaggagacagggtcggagggaggcttgaaggggtgctactaggggccctaggcaggggcccctcagggcactgaggccccacccccaccatcggccccatccccacaggaccttgcagatgcttcgggagaacctggaggaggaggccatcatcatgaaggacgtgcccgactggaaggtgggggagtctgtgttccacacaacccgctgggtgccccccttgatcggggagctgtacgggctgcgcaccacagaggaggctctccatgccagccacggcttcatgtggtacacgtaggccctgtgccctccggccacctggatccctgcccctccccactgggacggaataaatgctctgcagacctggaa

SEQ ID NO: 22098 - DNA, 529 bp, Homo Sapiens
acccacgcgtccgcggacgcgtgggggcggcgtcaaaggtgaagcaggacatgcctccgccggggggctatgggcccatcgactacaaacggaacttgccgcgtcgaggactgtcgggctacagcatgctggccatagggattggaaccctgatctacgggcactggagcataatgaagtggaaccgtgagcgcaggcgcctacaaatcgaggacttcgaggctcgcatcgcgctgttgccactgttacaggcagaaaccgaccggaggaccttgcagatgcttcgggagaacctggaggaggaggccatcatcatgaaggacgtgcccgactggaaggtgggggagtctgtgttccacacaacccgctgggtgccccccttgatcggggagctgtacgggctgcgcaccacagaggaggctctccatgccagccacggcttcatgtggtacacgtaggccctgtgccctccggccacctggatccctgcccctccccactgggacggaataaatgctctgcagacctg

SEQ ID NO: 22099 - DNA, 844 bp, Homo Sapiens
  misc_feature (705)..(720): n is a, c, g, or t
cagcatacactttctttacacctaataacataaagcaagtgagcgaccttatctctgtgcttcgtgaagctaatcaagcaattaatcccaagttgcttcagttggtcgaagacagaggttcaggtcgttccaggggtagaggaggcatgaaggatgaccgtcgggacagatactctgcgggcaaaaggggtggatttaatacctttagagacagggaaaattatgacagaggttactctagcctgcttaaaagagattttggggcaaaaactcagaatggtgtttacagtgctgcaaattacaccaatgggagctttggaagtaattttgtgtctgctggtatacagaccagttttaggactggtaatccaacagggacttaccagaatggttatgatagcactcagcaatacggaagtaatgttccaaatatgcacaatggtatgaaccaacaggcatatgcatatcctgctactgcagctgcacctatgattggttatccaatgccaacaggatattcccaataagactttagaagtatatgtaaatgtctgtttttcataattgctctttatattgtgtgttatctgacaagatagttatttaagaaacatgggaattgcagaaatgactgcagtgcagcagtaattatggtgcactttttcgctatttaagttggatatttctctacattcctgaaacaannnnnnnnnnnnnnnngtactagaaaatgcaggcagtgttttcacaaaagtaaatgtacagtgatttgaaatacaataaatgaaggcaatgcatggccttccaataaaaaatatttgaagactgaaaaaaaacctcgtgc

SEQ ID NO: 22100 - DNA, 1212 bp, Homo Sapiens
  misc_feature (1073)..(1088): n is a, c, g, or t
atcccccgggctgcaggaattcggcacgaggcaacaccttacagatgtggaagatgtgaaatttgtcatcaattatgactaccctaactcctcagaggattatattcatcgaattggaagaactgctcgcagtaccaaaacaggcacagcatacactttctttacacctaataacataaagcaagtgagcgaccttatctctgtgcttcgtgaagctaatcaagcaattaatcccaagttgcttcagttggtcgaagacagaggttcaggtaaggatgactgataggaaatgttggtagttacgagtcacatcgttgtctacaaatccatttaaatggtattggagggtgagtaaaaccttgaatgtgaaaacttaagctgaaaaattgtaaaaacatttcacgcctaccatgaatagatctgtttctttctgtccacaatgatttgtgtcatagacataattgatcaatttgcaattgttttcttgacaggtcgttccaggggtagaggaggcatgaaggatgaccgtcgggacagatactctgcgggcaaaaggggtggatttaatacctttagagacagggaaaattatgacagaggttactctagcctgcttaaaagagattttggggcaaaaactcagaatggtgtttacagtgctgcaaattacaccaatgggagctttggaagtaattttgtgtctgctggtatacagaccagttttaggactggtaatccaacagggacttaccagaatggttatgatagcactcagcaatacggaagtaatgttccaaatatgcacaatggtatgaaccaacaggcatatgcatatcctgctactgcagctgcacctatgattggttatccaatgccaacaggatattcccaataagactttagaagtatatgtaaatgtctgtttttcataattgctctttatattgtgtgttatctgacaagatagttatttaagaaacatgggaattgcagaaatgactgcagtgcagcagtaattatggtgcactttttcgctatttaagttggatatttctctacattcctgaaacaannnnnnnnnnnnnnnngtactagaaaatgcaggcagtgttttcacaaaagtaaatgtacagtgatttgaaatacaataaatgaaggcaatgcatggccttccaataaaaaatatttgaagactgaaaaaaaacctcgtgc

SEQ ID NO: 22101 - DNA, 1127 bp, Homo Sapiens
  misc_feature (730)..(742): n is a, c, g, or t
gcacgagggtcccttttctttgaccagatctttctcttccctgaacgttttcttctttccctggacaggcagcctcctttgtgtgtattcagaggcagtgatgacttgctgtccaggcagctccctcctgcacacagaatgctcagggtcactgaaccactgcttctcttttgaaagtagagctagctgccactttcacgtggcctccgcagtgtctccacctacacccctgtgctcccctgccacactgatggctcaagacaaggctggcaaaccctcccagaaacatctctggcccagaaagcctctctctccctccctctctcatgaggcacagccaagccaagcgctcatgttgagccagtgggccagccacagagcaaaagagggtttattttcagtcccctctctctgggtcagaaccagagggcatgctgaatgccccctgcttacttggtgaggatgccccgcctgagtcagtgctctcagctggcagtgcaatgcttgtagaagtaggaggaaacagttctcactgggaagaagcaagggcaagaacccaagtgcctcacctcgaaaggaggccctgttccctggagtcagggtgaactgcaaagctttggctgagacctgggatttgagataccacaaaccctgctgaacacagtgtctgttcagcaaactaaccagcattccctacagcctagggcagacaatagtatagaagtctggnnnnnnnnnnnnncagaatttgagaaccttggaccactcctgtccctgtagctcagtcatcaaagcagaagtctggctttgctctattaagattggaaatgtacactaccaaacactcagtccactgttgagccccagtgctggaagggaggaaggcctttcttctgtgttaattgcgtagaggctacaggggttagcctggactaaaggcatccttgtcttttgagctattcacctcagtagaaaaggatctaagggaagatcactgtagtttagttctgttgacctgtgcacctaccccttggaaatgtctgctggtatttctaattccacaggtcatcagatgcctgcttgataatatataaacaataaaaacaactttcacttcttcctattgt

SEQ ID NO: 22102 - DNA, 1075 bp, Homo Sapiens
  misc_feature (360)..(375): n is a, c, g, or t
  misc_feature (542)..(660): n is a, c, g, or t
gcacgaggctcaattcaagtgacacattaatgataaactcagatctgatcaagagtccggatttctaacagtccttgctttggggggtgtgctgacaacttagctcaggtgccttacatcttttctaatcacagtgttgcatatgagcctgccctcactccctctgcagaatccctttgcacctgagaccctactgaagtggctggtagaaaaaggggcctgagtggaggattatcagtatcacgatttgcaggattcccttctgggcttcattctggaaacttttgttagggctgcttttcttaagtgcccacatttgatggagggtggaaataatttgaatgtatttgatttataagnnnnnnnnnnnnnnnngggttaaaagatggttgtagcatttaaaatggaaaattttctccttggtttgctagtatcttgggtgtattctctgtaagtgtagctcaaataggtcatcatgaaaggttaaaaaagcgaggtggccatgttatgctggtggttaaggccagggcctctccaaccannnnnnnnnnnnnnnnnnnnnnnnnnnnnnnnnnnnnnnnnnnnnnnnnnnnnnnnnnnnnnnnnnnnnnnnnnnnnnnnnnnnnnnnnnnnnnnnnnnnnnnnnnnnnnnnnnnnnnncatgactaatgctttttagaaagcattttgggatccttcagcacaggaattctcaagacctgagtattttttataataggaatgtccaccatgaacttgatacgtccgtgtgtcccagatgctgtcattagtctatatggttctccaagaaactgaatgaatccattggagaagcggtggataactagccagacaaaatttgagaatacataaacaacgcattgccacggaaacatacagaggatgccttttctgtgattgggtgggattttttccctttttatgtgggatatagtagttacttgtgacaagaataattttggaataatttctattaatatcaactctgaagctaattgtactaatctgagattgtgtttgttcataataaaagtgaagtgaatctgaaaaaatt

SEQ ID NO: 22103 - DNA, 2253 bp, Homo Sapiens
gcacgaggggacagcagagctgacagtcacagcagccctgacaagagagttcctggagcccaagctcttctccacagaggacaagcaggcagcagagaccatggggtccccttcagcctgtccatacagagtgtgcattccctggcaggggctcctgctcacagcctcgcttttaaccttctggaacctgccaaacagtgcccagaccaatattgatgtcgtgccgttcaatgtcgcagaagggaaggaggtccttctagtagtccataatgagtcccagaatctttatggctacaactggtacaaaggggaaagggtgcatgccaactatcgaattataggatatgtaaaaaatataagtcaagaaaatgccccagggcccgcacacaacggtcgagagacaatataccccaatggaaccctgctgatccagaacgtcacccacaatgacgcaggaatctataccctacacgttataaaagaaaatcttgtgaatgaagaagtaaccagacaattctacgtattctcggagccacccaagccctccatcaccagcaacaacttcaatccggtggagaacaaagatattgtggttttaacctgtcaacctgagactcagaacacaacctacctgtggtgggtaaacaatcagagcctcctggtcagtcccaggctgctgctctccactgacaacaggaccctcgttctactcagcgccacaaagaatgacataggaccctatgaatgtgaaatacagaacccagtgggtgccagccgcagtgacccagtcaccctgaatgtccgctatgagtcagtacaagcaagttcacctgacctctcagctgggaccgctgtcagcatcatgattggagtactggctgggatggctctgatatagcagccttggtgtagtttctgcatttcgggaagagtgactggactggattcttctagctccttcaatcccattttctcctgtggcatcactaagtataagacctgctctcttcctgaagacctataagctggaggtggacaactcaatgtaaatttcaaggaaaaaccctcatgcctgagatgtgggccactcagagctaaccaaaatgttcaacaccataactagagacactcaaattgccaaccaggacaagaagttgatgacttcatgctgtggacagtttttcccaagatgtcccaagcctcatcgtgacgaggctcttatcccactccatttttccctgctcatgcctgcctctttaatttggtaagataatgctgtaactagaatttcacaatcagcgccttgtgcaggtaatttgacagagtgttggatgtgtcatgtcatcatgtcaaacccaaatatttgacctaagggatcctttattctgcccagtggctaactttaacaacatccctaatacaactgtttattcaaatgcacggtggtccctgttagagttagacctctagactcacctgttctcacgccctgttttaatttaacccagctatgggatgccagataacagaattgctgcctactagctgaacagggaggagtttgtgcagttgctgacacttcttgttgcacataaataaatacagtgggtactatagagactcagttgcaaaaattaacaaatatgctgcttgattaaaatgggtaggcttctcatgtggctcattctttaatctattctcttttatttggtttggttcatggggtctctgcctatggatcatacttcaaactcttggtgtgatcctcctgattgtcacaatattagttaccctggtgtgctgtattctctaaaacctttaaatgtttgcatgcagccattcgtcaaatgtcaaatattctctctttggctggaatgacaaaaactcaaataaatgtatgattaggaggacatcataacctatgaatgatggaagtccaaaatgatggtaactgacagtagtgttaatgccttatgtttagtcaaactctcatttaggtgacagcctggtgactccagaatggagccagtcatgctaaatgccatatactcacactgaaacatgaggaagcaggtagatcccagaacagacaaaattttcctaaaaacatgagagtccaggctgtctgagtcagcacagtaagaaagtcctttctgcttttactcttagaaaaagtaatatgaagtattctgaaataaaccatcagtttatttaaatcaatttattatatctctgttctggattcccatttta

SEQ ID NO: 22104 - DNA, 917 bp, Homo Sapiens
gcacgaggcagtgacccagtcaccctgaatgtccgctatgagtcagtacaagcaagttcacctgacctctcagctgggaccgctgtcagcatcatgattggagtactggctgggatggctctgatatagcagccttggtgtagtttctgcatttcgggaagagtgtttttattatccacctgcagactggactggattcttctagctccttcaatcccattttctcctgtggcatcactaagtataagacctgctctcttcctgaagacctataagctggaggtggacaactcaatgtaaatttcaaggaaaaaccctcatgcctgagatgtgggccactcagagctaaccaaaatgttcaacaccataactagagacactcaaattgccaaccaggacaagaagttgatgacttcatgctgtggacagtttttcccaagatgtcccaagcctcatcgtgacgaggctcttatcccactccatttttccctgctcatgcctgcctctttaatttggtaagataatgctgtaactagaatttcacaatcagcgccttgtgcaggtaatttgacagagtgttggatgtgtcatgtcatcatgtcaaacccaaatatttgacctaagggatcctttattctgcccagtggctaactttaacaacatccctaatacaactgtttattcaaatgcacggtggtccctgttagagttagacctctagactcacctgttctcacgccctgttttaatttaacccagctatgggatgccagataacagaattgctgcctactagctgaacagggaggagtttgtgcagttgctgacacttcttgttgcacataaataaatacagtgggtactatagagactcagttgcaaaaattaacaaatatgctgcttgattaaaatgggta

SEQ ID NO: 22105 - DNA, 842 bp, Homo Sapiens
gcacgagggccaccggtgcacccagtccgctcacccagcccagtccgtccggtcctcaccgcctgccggccggcccaccccccaccgcagccatggacgccatcaagaagaagatgcagatgctgaagctggacaaggagaacgccatcgaccgcgccgagcaggccgaagccgacaagaagcaagctgaggaccgctgcaagcagctggaggaggagcagcaggccctccagaagaagctgaaggggacagaggatgaggtggaaaagtattctgaatccgtgaaggaggcccaggagaaactggagcaggccgagaagaaggccactgatgctgaggcagatgtggcctccctgaaccgccgcattcagctggttgaggaggagctggaccgggcccaggagcgcctggctacagccctgcagaagctggaggaggccgagaaggcggctgatgagagcgagagaggaatgaaggtcatcgaaaaccgggccatgaaggatgaggagaagatggaactgcaggagatgcagctgaaggaggccaagcacatcgctgaggattcagaccgcaaatatgaagaggtggccaggaagctggtgatcctggaaggagagctggagcgctcggaggagagggctgaggtggccgagagccgagccagacagctggaggaggaacttcaaaccatggaccaggccctcaagtccctgatggcctcagaggaggaggtagtgacccctctgaacctttctgggcaatggcgccttctctcagctcaccttccctccgtctcagcaccgcaggctgctctttctcagctgctggggatcaggaagggc

SEQ ID NO: 22106 - DNA, 1031 bp, Homo Sapiens
gcacgaggccgtcctcctcgcctgccaccggtgcacccagtccgctcacccagcccagtccgtccggtcctcaccgcctgccggccggcccaccccccaccgcagccatggacgccatcaagaagaagatgcagatgctgaagctggacaaggagaacgccatcgaccgcgccgagcaggccgaagccgacaagaagcaagctgaggaccgctgcaagcagctggaggaggagcagcaggccctccagaagaagctgaaggggacagaggatgaggtggaaaagtattctgaatccgtgaaggaggcccaggagaaactggagcaggccgagaagaaggccactgatgctgaggcagatgtggcctccctgaaccgccgcattcagctggttgaggaggagctggaccgggcccaggagcgcctggctacagccctgcagaagctggaggaggccgagaaggcggctgatgagagcgagagaggaatgaaggtcatcgaaaaccgggccatgaaggatgaggagaagatggaactgcaggagatgcagctgaaggaggccaagcacatcgctgaggattcagaccgcaaatatgaagaggtggccaggaagctggtgatcctggaaggagagctggagcgctcggaggagagggctgaggtggccgagagccgagccagacagctggaggaggaacttcgaaccatggaccaggccctcaagtccctgatggcctcagaggaggagtattccaccaaagaagataaatatgaagaggagatcaaactgttggaggagaagctgaaggaggctgagacccgagcagagtttgccgagaggtctgtggcaaagttggagaaaaccatcgatgacctagaagagaccttggccagtgccaaggaggagaacgtcgagattcaccagaccttggaccagaccctgctggaactcaacaacctgtgagggccagccccacccccagccaggctatggttgccaccccaacccaataaaactgatgttactagcctc

SEQ ID NO: 22107 - DNA, 1017 bp, Homo Sapiens
cccgggctgcaggaattcggcacgaggggcacctttaaacactggtggaagtgttgggtggtgaattcctcaagtacatggaggcctttaaacccttcctgggcattggattaaaaaattatgctgaataccaggtttgtttggcagctgtgggcttagtgggagacttgtgccgtgccctgcaatccaacatcatacctttctgtgacgaggtgatgcagctgcttctggaaaatttggggaatgagaacgtccacaggtctgtgaagccgcagattctgtcagtgtttggtgatattgcccttgctattggaggagagtttaaaaaatacttagaggttgtattgaatactcttcagcaggcctcccaagcccaggtggacaagtcagactatgacatggtggattatctgaatgagctaagggaaagctgcttggaagcctatactggaatcgtccagggattaaagggggatcaggagaacgtacacccggatgtgatgctggtacaacccagagtagaatttattctgtctttcattgaccacattgctggagatgaggatcacacagatggagtagtagcttgtgctgctggactaataggggacttatgtacagcatttgggaaggatgtactgaaattagtagaagctaggccaatgatccatgaattgttaactgaagggcggagatcgaagactaacaaagcaaaaacccttgctacatgggccacaaaagaactgaggaaactgaagaaccaagcttgatctgttaccattgggatgataacctgaggacccccactggaaatctccccatcttttgaaaaacctggaaagtgaggagtgtgcaccgatgctgaatggttgggaatgagaggatgattgagtgaggcttgaaaacccaccacattgaaaatccctgcacaccagcagcccgcagccgccaacagcagcgctgttatgagctaattagccctgacttccttaaaaaccttaacatcggccatcttgg

SEQ ID NO: 22108 - DNA, 938 bp, Homo Sapiens
  misc_feature (209)..(245): n is a, c, g, or t
  misc_feature (317)..(330): n is a, c, g, or t
  misc_feature (430)..(474): n is a, c, g, or t
  misc_feature (505)..(533): n is a, c, g, or t
attttatcagattgtttgaacatttaatttatcctggttgcaatccaaaatagttacctgaagtttgctgttttgggggtatgtgtttacttttattggatatttatttttctaaactctttggcacaattttctgggggcgttcagactgccacaatacaagtcaggagagggcgttttctttgtgctgccaattctgatcatttaannnnnnnnnnnnnnnnnnnnnnnnnnnnnnnnnnnnnaagtctgcgttatttgtaacaattgtacttatatttttctatatcctctaacgccagagttttctttttctnnnnnnnnnnnnnnacttctacattcacagttgaaccatattattaggaaaggcgccttgatgaaaagatcaggataggagctctgaccattcgtcagtgttttccctagagtnnnnnnnnnnnnnnnnnnnnnnnnnnnnnnnnnnnnnnnnnnnnncctaaagagcgtctttcctctgtgtgtgtgnnnnnnnnnnnnnnnnnnnnnnnnnnnnnacatctcttgtgctgcatcagtagacagaacttcggttagttttatgaaatgcaacatctaaccccttgttttctgggaaaaagaaactgcaatgacttgaagttgagaatgtggataccgcctcactcacacacactcattctcagactgtaaaaaatccctgaccctccttctagctggcaagcatacagtaccatgtggcaaaggtacagcgaaggtgggcttgagacccaggctccatctttctcctcagtagcaaaggccaggctgccttttacaacaaagcaccacagctgaacccagtccctcctcctcccccaaaccaggcattccactcggcactggccaaaagacagaaaagctacttctagcctctcctgggaagagataactttccctcgtgc

SEQ ID NO: 22109 - DNA, 572 bp, Homo Sapiens
gcacgaggacattccaggccacagtcctgggaagtcagatgggattgaaaggatcttctgcaggacaactggtccttatcacagccagggtgaccacagaaaggactgcaggaacctgcctatattttagtgctgttccaggaatcctaccctccagccagccacccatatcctgctcagaggagggggctggaaatgccaccctgagccctagaatgggtgaggaatgtgttagtgtctggagccatgaaggccttgtgctgaccaagctgctcacctcggaggagctggctctgtgtggctccaggctgctggtcttgggctccttcctgcttctcttctgtggccttctctgctgtgtcactgctatgtgcttccacccgcgccgggagtcccactggtctagaacccggctctgagggcactggcctagttcccgacttgtttctcaggtgtgaatcaacttcttgggccttggctctgagttggaaaaggttttagaaaaagtgaagagctggaatgtgggggaaaataaaaagcttttttgcccgccaaaaaaacaagtagaaaat

SEQ ID NO: 22110 - DNA, 552 bp, Homo Sapiens
gcacgaggcttgtcagaggggggtgcatgaaatttgagagccatgtgttatgcatccagctcttgaactggtctcagcttcagctggctgcagtgccctaggaagttactatgggaaaagtggaaatagttgaggcccagggaactgatcaggccagaggaagtggaagctcaagatcaactgtgcttattttgctgatggctgggcctaaatgccccaaccacctacttgggacaggaaatgacaggaccctgtcaaccttggactgggaaaggagggcttcctggcccctgacagaccctggggtcctgaggctaccttagttgggattaaatgcccgtattggtctctagctgtcactccctctgctccttcctcaatttctgcacacatctcagagcttcctctagcagctcttcgacctgttttgttgttttattttctttctccccaggtgtgaatcaacttcttgggccttggctctgagttggaaaaggttttagaaaaagtgaagagctggaatgtgggggaaaataaaaagcttttttgccc

SEQ ID NO: 22111 - DNA, 1332 bp, Homo Sapiens
  misc_feature (1248)..(1271): n is a, c, g, or t
gcacgaggcccatgctttttgcagaggaaaaggcggtggcagatacaagagatcaagccgatgggagcagagcatctgtggattccggcagctctgaggaacaaggtggaagctccagagcgctggtctccaccctggtgcccctgggcctggtgctggcagtgggagccgtggctgtgggggtggccagagcccggcacaggaagaacgtcgaccgagtttcaatcagaagctacaggacagacattagcatgtcagacttcgagaactccagggaatttggagcttatgacaacatgggagcctcttctatcactcaggagacatccctcggaggaaaagaagagtttgttgccaccactgagagcatcacagagaccaaagaacccaagaaggcaaaaaggtcatccaaggaggaagccgagatggcctacaaagacttcctgctccagtccagcaccgtggccgccgaggcccaggacggcccccaggaagcctaaacggtgtcgccgcctgctccctgcacccatgataatcaccttcagaatcatgtcgatcctggggccctcagctcctggggaccccactccctgctctaacacctgcctaggtttttcctactgtcctcagaggcgtgctggtcccctcctcagtgacatcaaagcctggcctaattgttcctattggggatgagggtggcatgaggaggtcccacttgcaacttctttctgttgagagaacctcaggtacggagaagaatagaggtcctcatgggtcccttgaaggaagagggaccagggtgggagagctgattgcagaaaggagagacgtgcagcgcccctctgcacccttatcatgggatgtcaacagaatttttccctccactccatccctccctcccgtccttcccctcttcttctttccttccatcaaaagatgtatttgaattcatactagaattcaggtgctttgctagatgctgtgacaggtatgccaccaacactgctcacagcctttctgaggacaccagtgaaagaagccacagctcttcttggcgtatttatactcactgagtcttaacttttcaccaggggtgctcacctctgcccctattgggagaggtcataaaatgtctcgagtcctaaggccttaggggtcatgtatgatgagcatacacacaggtaattataaacccacattcttaccatttcacacataagaaaattgaggtttggaagagtgaagcgnnnnnnnnnnnnnnnnnnnnnnnngagacagtgataatgaaagctagcctcgggctaatttccccatagcccgggggtgacttcc

SEQ ID NO: 22112 - DNA, 475 bp, Homo Sapiens
actggggattatataggcatgagccactgagcctggcccagaagcgtttttctcaaaggccctcagtgagataaattagatttggcatctcctgtcctgggccagggatctctctacaagagcccctgcccctctgttggaggcacagttttagaataaggaggaggagggagaagagaaaatgtaaaggagggagatctttcccaggccgcaccatttctgtcactcacatggacccaagataaaagaatggccaaaccctcacaacccctgatgtttgaagagttccaagttgaagggaaacaaagaagtgtttgatggtgccagagaggggctgctctccagaaagctaaaatttaatttcttttttcctctgagttctgtacttcaaccagcctacaagctggcacttgctaacaaatcagaaatatgacaattaatgattaaagactgtgattgccaccccccctaaaaa

SEQ ID NO: 22113 - DNA, 862 bp, Homo Sapiens
ccaccgctcacccccagggtcagctgttccaggcccctcagcctccttggccccctcggccactgagccacccagccttggtgtcaatgtgggcagcctcatggtgcctgtctttgtggtgctgttgggtgtggtctggtacttccgaatcaattaccgccaattcttcacagcacctgccactgtctccctggtgggagtcaccgtcttcttcagcttcctagtatttgggatgtatggacgataaggacataggaagaaaatgaaagccatggtctttctcctttatggcctccccacttttcctggccagagctgggcccaagggccggggagggaggggtggaaaggatgtgatggaaatctcctccataggacacaggaggcaagtatgcggcctccccttctcatccacaggagtacagatgtccctcccgtgcgagcacaactcaggtagaaatgaggatgtcatcttccttcacttttagggtcctctgaaggagttcaaagctgctggccaagctcagtggggagcctgggctctgagattccctcccacctgtggttctgactcttcccagtgtcctgcatgtctgcccccagcacccaaggctgcctgcaagggcagctcagcatggccccagcacaactccgtagggagcctggagtatccttcatttctcagcccaaatactcatcttttgagactgaaatcacactggcgggaatgaagattgtgccagccttctcttatggggcacctagcccccttcaccttcttcctctacccctttatcaggaatagggtgtcccccccttctttcaaagcactttgctttgcattttaatttaatttttttaa

SEQ ID NO: 22114 - DNA, 1651 bp, Homo Sapiens
gcacgaggagggagttgagagggaggccattctaggttcagtgttactagagtgttagaagggtcttagagaactttttaaattggaaaattgaaatcccaagtgggcaagcaagggctccagcctagcactcccttttctctcccacatagcatgagggagagtggaaaggtaggagtgggtgggaaagtgttgcacccagcctttccactccaaacctcgtattgctttcttgaggttggtggtgaccaggatgtatcattttaggtcatgtccaaagtaatggagatgttccagcctagtgcggtggtcttacagtgtggctcagactccctatctggggatcggttaggttgcttcaatctaactatcaaaggtgagaccaggtagcacaaggatgggtgggcggggtcctgcttggtgctcctgtaactcagcaccccttctcccaccaaaggacacgccaagtgtgtggaatttgtcaagagctttaacctgcctatgctgatgctgggaggcggtggttacaccattcgtaacgttgcccggtgctggacatatgagacagctgtggccctggatacggagatccctaatgagcttccatacaatgactactttgaatactttggaccagatttcaagctccacatcagtccttccaatatgactaaccagaacacgaatgagtacctggagaagatcaaacagcgactgtttgagaaccttagaatgctgccgcacgcacctggggtccaaatgcaggcgattcctgaggacgccatccctgaggagagtggcgatgaggacgaagacgaccctgacaagcgcatctcgatctgctcctctgacaaacgaattgcctgtgaggaagagttctccgattctgaagaggagggagaggggggccgcaagaactcttccaacttcaaaaaagccaagagagtcaaaacagaggatgaaaaagagaaagacccagaggagaagaaagaagtcaccgaagaggagaaaaccaaggaggagaagccagaagccaaaggggtcaaggaggaggtcaagttggcctgaatggacctctccagctctggcttcctgctgagtccctcacgtttcttccccaacccctcagattttatattttctatttctctgtgtatttatataaaaatttattaaatataaatatccccagggacagaaaccaaggccccgagctcagggcagctgtgctgggtgagctcttccaggagccaccttgccacccattcttcccgttcttaactttgaaccataaagggtgccaggtctgggtgaaagggatacttttatgcaaccataagacaaactcctgaaatgccaagtgcctgcttagtagctttggaaaggtgcccttattgaacattctagaaggggtggctgggtcttcaaggatctcctgtttttttcaggctcctaaagtaacatcagccatttttagattggttctgttttcgtaccttcccactggcctcaagtgagccaagaaacactgcctgccctctgtctgtcttctcctaattctgcaggtggaggttgctagtctagtttcctttttgagatactattttcatttttgtgagcctctttgtaataaaatggtacatttctataa

SEQ ID NO: 22115 - DNA, 851 bp, Homo Sapiens
gaattccgcacgagggtccccctggcagttttaaaacgaaaaatcagtgttaagtttgatgcagttattggatataaaatgaaagcgcaataagcacctagttttctgaaaactgatttaccaggtttaggttgatgtcatctaatagtgccagaattttaatgtttgaacttctgttttttctaattatccccatttcttcaatatcatttttgaggctttggcagtcttcatttactaccacttgttctttagccaaaagctgattacatatgatataaacagagaaatacctttagaggtgactttaaggaaaatgaagaaaaagaaccaaaatgactttattaaaataatttccaagattatttgtggctcacctgaaggctttgcaaaatttgtaccataaccgtttatttaacatatatttttatttttgattgcacttaaattttgtataatttgtgtttctttttctgttctacataaaatcagaaacttcaagctctctaaataaaatgaaggactatatctagtggtatttcacaatgaatatcatgaactctcaatgggtaggtttcatcctacccattgccactctgtttcctgagagatacctcacattccaatgccaaacatttctgcacagggaagctagaggtggatacacgtgttgcaagtataaaagcatcactgggatttaaggagaattgagagaatgtacccacaaatggcagcaataataaatggatcacacttaaacttttggtgtttccatctttttgtcttaaacagaacatgacaaccttcaaattaaaggaaaataaattgtgcaatctttttttaaaaactgg

SEQ ID NO: 22116 - DNA, 646 bp, Homo Sapiens
  misc_feature (41)..(52): n is a, c, g, or t
aacagtcataataatcctttattagtaccagctcttaaaannnnnnnnnnnngccagagctaaacaatttaatataaaaaatgccattttttgtccatacagtatttataaaaaagtacatagtggttagttttgcaataatttctttttagccagatgtcatatcatcatataaatctatgaatataacaaatgacataagaacagtataaataagtttttgtagtatttacacttacacagaaactagcccaaatggtgtcctaagaaattgtttacagttaaagtgaaactactgattcaacatactgacactccaatgctttttaaagtttcgtattattttctatactagttttggctatgattttgcatagaattacttataaagtatgagcatttcacatcacagtaggagcttttagtataatagtacaaaaaaactagctcagaaaaggtcaaatcctcctaaatctagtttttcttaacatctggcttcttacttttgggaacaaggaaaacattgccatctcttgtttgctgcagggagtattcactaggagaataaggttttccatcttcatcacgtagcatgctgaaaacttcgagatataaggtgctgagttgttttttcagtaggtgaagg

SEQ ID NO: 22117 - DNA, 1099 bp, Homo Sapiens
gcacgaggggaacgagatggcggttctctggaggctgagtgccgtttgcggtgccctaggaggccgagctctgttgcttcgaactccagtggtcagacctgctcatatctcagcatttcttcaggaccgacctatcccagaatggtgtggagtgcagcacatacacttgtcaccgagccaccattctggctccaaggctgcatctctccactggactagcgagagggttgtcagtgttttgctcctgggtctgcttccggctgcttatttgaatccttgctctgcgatggactattccctggctgcagccctcactcttcatggtcactggggccttggacaagttgttactgactatgttcatggggatgccttgcagaaagctgccaaggcagggcttttggcactttcagctttaacctttgctgggctttgctatttcaactatcacgatgtgggcatctgcaaagctgttgccatgctgtggaagctctgacctttttgacttcatactttgaagaattgatgtatgcctctttgcctctgctttgtcatgccattaagctcacaataaggaagaaataacagataagtccattggtggacagccttcttctcttaatcacaagattattttcagaatttaatctttgaggaaaaggtttgagaggaattatatctaagttgtgagactgagttctatattctggtgagttaatggggttgcctcccagcttcttataagactcacagtataactaaacatgatatatcagcttttgccctttcatttatcaatctcttaaagagaatccactttattacgattagtatatgatcaaacttccatatttgccttgggaataatggacaaagggaatactcttaattcatgaataaaaactttgcagaaattagacagtgtttaattttcgaaaacttccctctctagacagtatataccacctactgatggttacatatactagggaaattttaaaattaggaaatgctgatagctcatattataaatttctaaatcctaggagaaacgcttggagtgcttcttgatatacagaagttcatttaagggcaagtt

SEQ ID NO: 22118 - DNA, 953 bp, Homo Sapiens
gcacgaggtatataacattttatttaaaaaaattattttcatagaatacattttcacattagagattcccattgtgcgaaaataacaatttattacttatagttttatatttgtggacagattgttttagaacaagtagaatacatttgggaattaaatctcaatttacagttggtagtattttgatacatctacggggaaacttgcccttaaatggaacttctgtatattcagaagcactccaagcgtttcttcctaggatttagaaatttataatatgagctatcagcatttcctaattttaaaatttccctagtatatgtaaccatcagtaggtggtatctactgtctagagagggaagttttcgaaaattaaacactgtctaattttctgcaaagtttttattcatgaattaagagtatttccctttgtccattattcccaaggcaaatatggaagtttgatcatatactaatcgtaataaagttggattctctttaagagattgataaattgaaaggcaaaagctgatatatcatgtttagttatactgtgagtcttataagaagctgggaggcaaccccattaactcaccagaatatagaactcagtctcacaacttagatataattcctctcaaaccttttcctcaaagattaaattctgaaaataatcttgtgattaagagaagaaggctgtccaccaatggacttatctgttatttcttccttattgtgagcttaatggcatgacaaagcagaggcaaagaggcatacatcaattcttcaaagtatgaagtcaaaaaggtcagagcttccacagcatggcaacagctttgcagatgcccacatcgtgatagttgaaatagcaaagcccagcaaaggttaaagctgaaagtgccaaaagccctgccttggcagctttctgcaaggattcaaataagccctcgtgc

SEQ ID NO: 22119 - DNA, 924 bp, Homo Sapiens
  misc_feature (774)..(793): n is a, c, g, or t
atcccccgggctgcaggcccgtagggccggggaggcaccagctgccgcgcggggaggaggccgaggccgcagcttgagggaggccccggcccctctgcgcctgtgtctggcagagctggtgtgagacgagacaatcctgccccgccgccgggataatcaagagttttggccggacctttgagcatacaccgagagagtgaggagccagacgacaagcacacactatggcgctgaaacggattaataaggaacttagtgatttggcccgtgaccctccagcacaatgttctgcaggtccagttggggatgatatgtttcattggcaagccacaattatgggacctaatgacagcccatatcaaggcggtgtattctttttgacaattcattttcctacagactaccccttcaaaccacctaaggttgcatttacaacaagaatttatcatccaaatattaacagtaatggcagcatttgtctcgatattctaagatcacagtggtcgcctgctttaacaatttctaaagttcttttatccatttgttcactgctatgtgatccaaacccagatgaccccctagtgccagagattgcacggatctataaaacagacagagataagtacaacagaatatctcgggaatggactcagaagtatgccatgtgatgctaccttaaagtcagaataacctgcattatagctggaataaactttaaattactgttccttttttgattttcttatccggctgctcccctatcagacctcatcnnnnnnnnnnnnnnnnnnnngtttacctcctccattcattccccatgctcatctggagaagacttaagttctttccagctttggacaataactgctttttagaactgtaaagtagtttacaagagaccgttggccaagactccaaattttt

SEQ ID NO: 22120 - DNA, 1787 bp, Homo Sapiens
  misc_feature (132)..(166): n is a, c, g, or t
  misc_feature (317)..(361): n is a, c, g, or t
gcacgaggaatccctccggctgtccgaccaagagaggccggccgagcccgaggcttgggcttttgctttctggcggagggatctgcggcggtttaggaggcggcgctgatcctgggaggaagaggcagctannnnnnnnnnnnnnnnnnnnnnnnnnnnnnnnnnnaataaaggggccgccgccgggtgatgcggtgaccgctgcggcaggcccaggagctgagtgggccccggccctcagcccgtcccgccggacccgctttcctcaactctccatcttctcctgccgaccgagatcgccgaggcggcctcaggcnnnnnnnnnnnnnnnnnnnnnnnnnnnnnnnnnnnnnnnnnnnnngggggccgccgccacccgcctcccaccatggctctgaagagaatccacaaggaattgaatgatctggcacgggaccctccagcacagtgttcagcaggtcctgttggagatgatatgttccattggcaagctacaataatggggccaaatgacagtccctatcagggtggagtatttttcttgacaattcatttcccaacagattaccccttcaaaccacctaaggttgcatttacaacaagaatttatcatccaaatattaacagtaatggcagcatttgtcttgatattctacgatcacagtggtctccagcactaactatttcaaaagtactcttgtccatctgttctctgttgtgtgatcccaatccagatgatcctttagtgcctgagattgctcggatctacaaaacagatagagaaaagtacaacagaatagctcgggaatggactcagaagtatgcgatgtaattaaagaaattattggataacctctacaaataaagataggggaactctgaaagagaaagtccttttgatttccatttgactgctttctatgagcccacgcctcatcttcccctgtgcacatgtttacctgatacagcagtgctgcgtgttgtacatacttggaacaacaaactagaaatactgtacttctgtaccaacattgcctcctagcagagaagtgtgtgtgtgacaagccagttctacaggcattacctaggtgtgagactaaaagcttttcttattgacttaaatttggataacagcaaggtgtgaggggggtggtgggtatggtgtgtgcttggatgggaaagaaaaggctccactcacctataggagattatttttaagtggaatccatttaaactcaaaacagttatgaaaagcaaggtgaagaacatgaagctgtgtctgtattcattttattccgaaggagctacgtcttaggtgaaagttatgaccaaccagattaaactctacccacatcctgcattttaaggtctaagtttaactggtcaacatttaaatggattggagctattagtacatcaagtgtgatgggctttgttcccaactcttttacatctccctaccccttcaacctttggcctttcagcccttctttctctcttccatattctttggtttgtatgtggtttctcagttaatacatagctaatagctcttatttttcttatgtttttaaccgcttaggtctatttggatgtaagggtgaaaattcatttgatggaaatacttgtgtatatttaaagacccaattgctcctctggagcttgtactttcaagaatgattaatctgtgtaataaactggttactacagtcattacatatatttttgtgtgaataggcttttttcattttaagaaagtttgtctagctgatattagtggtggattt

SEQ ID NO: 22121 - DNA, 1222 bp, Homo Sapiens
  misc_feature (112)..(130): n is a, c, g, or t
  misc_feature (260)..(270): n is a, c, g, or t
gcacgaggctaccttaaagtcagaataacctgcattatagctggaataaactttaaattactgttccttttttgattttcttatccggctgctcccctatcagacctcatcnnnnnnnnnnnnnnnnnnngtttacctccctccattcattcacatgctcatctgagaagacttaagttcttccagctttggacaataactgcttttagaaactgtaaagtagttacaagagaacagttgcccaagactcagaatttttnnnnnnnnnnntggagcatgtgtattatgtggccaatgtcttcactctaacttggttatgagactaaaaccattcctcactgctctaacatgctgaagaaatcatctgagggggagggagatggatgctcagttgtcacatcaaaggatacagcattattctagcagcatccattcttgtttaagccttccactgttagagatttgaggttacatgatatgctttatgctcataactgatgtggctggagaattggtattgaatttatagcatcagcagaacagaaaatgtgatgtattttatgcatgtcaataaaggaatgacctgttcttgttctacagagaatggaaattggaagtcaaacaccctttgtattccaaaatagggtctcaaacattttgtaattttcatttaaattgttagggaggcttggagctattagttaatctatctgccaatacactgtttaatatagcactgaataaatgatgcaagttgtcaatggatgagtgatcaactaatagctctgctagtaattgatttatttttcttcaataaagttgcataaaccaatgagttagctgcctggattaatcagtatgggaaacaatcttttgtaaatgcaaagctgttttttgtatatactgttgggatttgcttcattgtttgacatcaaatgatgatgtaaagttcgaaagagtgaatattttgccatgttcagttaaagtgcacagtctgttacaggttgacacattgcttgacctgatttatgcagaattaataagctatttggatagtgtagctttaatgtgctgcacatgatactggcagccctagagttcatagatggacttttgggacccagcagttttgaaatgtgtttatggagtttaagaaatttattttccaggtgcagcccctgtctaactgaaatttctcttcaccttgtacacttgacagctg

SEQ ID NO: 22122 - DNA, 482 bp, Homo Sapiens
gcacgaggctttgctgccagttatcataggctgttttaagttagaaaactgaatagcaacactgaatactgtagaaatgcactttgctcagtaatacttgagttgttgcaatatttgattatccatttggttgttacagaaaaattcttaactgtaattgatggttgttgccgtaatagtatattgcctgtatttctacctctagtaatgggctttatgtgctagattttaatatccttgagcctgggcaagtgcacaagtctttttaaaagaaacatggtttacttgcacaaaactgatcagttttgagagatcgttaatgcccttgaagtggtttttgtgggtgtgaaacaaatggtgagaatttgaattggtccctcctattatagtattgaaattaagtctacttaatttatcaagtcatgttcatgccctgattttatatacttgtatctatcaataaacattgtgatacttgatgt

SEQ ID NO: 22123 - DNA, 3490 bp, Homo Sapiens
gcacgaggcccctccccaccccatctattaatattattcttttgaagattcttcgttgtcaagccgccaaagtggagagtgcgattgcagaagggggtgcttctcgtttcagcgagttcctggggaaaaccccagggcaaaacgctcagaaatggattcctgcacgaagcactagacgagatgacaactccgcagcaaacaactccgcaaacgaaaaagaacgacatgatgcaatcttcaggaaagtaagaggcatactaaataagcttactcctgaaaagtttgacaagctatgccttgagctcctcaatgtgggtgtagagtctaaactcatccttaaaggggtcatactgctgattgtggacaaagccctagaagagccaaagtatagctcactgtatgctcagctatgtctgcgattggcagaagatgcaccaaactttgatggcccagcagcagagggtcaaccaggacagaagcaaagcaccacattcagacgcctcctaatttccaaattacaagatgaatttgaaaaccgaactagaaatgttgatgtctatgataagcgtgaaaatcccctcctccccgaggaggaggaacagagagccattgctaagatcaagatgttgggaaacatcaaattcattggagagcttggcaagcttgatcttattcacgaatctatccttcataagtgcatcaaaacacttttggaaaagaagaagagagtccaactcaaagatatgggagaggatttggagtgcctctgtcagataatgaggacagtgggacctagattagaccatgaacgagccaagtccttaatggatcagtactttgcccgaatgtgctccttgatgttaagtaaggaattgccagcaaggattcgtttcctgctgcaggataccgtagagttgcgagaacaccattgggttcctcgcaaggcttttcttgacaatggaccaaagacgatcaatcaaattcgtcaagatgcagtaaaagatctaggggtgtttattcctgctcctatggctcaagggatgagaagtgacttctttctggagggaccgttcatgccacccaggatgaaaatggatagggacccacttggaggacttgctgatatgtttggacaaatgccaggtagcggaattggtactggtccaggagttatccaggatagattttcacccaccatgggacgtcatcgttcaaatcaactcttcaatggccatgggggacacatcatgcctcccacacaatcgcagtttggagagatgggaggcaagtttatgaaaagccaggggctaagccagctctaccataaccagagtcagggactcttatcccagctgcaaggacagtcgaaggatatgccacctcggttttctaagaaaggacagcttaatgcagatgagattagcctgaggcctgctcagtcgttcctaatgaataaaaatcaagtgccaaagcttcagccccagataactatgattcctcctagtgcacaaccaccacgcactcaaacaccacctctgggacagacacctcagcttggtctcaaaactaatccaccacttatccaggaaaagcctgccaagaccagcaaaaagccaccaccgtcaaaggaagaactccttaaactaactgaaactgttgtgactgaatatctaaatagtggaaatgcaaatgaggctgtcaatggtgtaagagaaatgagggctcctaaacactttcttcctgagatgttaagcaaagtaatcatcctgtcactagatagaagcgatgaagataaagaaaaagcaagttctttgatcagtttactcaaacaggaagggatagccacaagtgacaacttcatgcaggctttcctgaatgtattggaccagtgtcccaaactggaggttgacatccctttggtgaaatcctatttagcacagtttgcagctcgtgccatcatttcagagctggtgagcatttcagaactagctcaaccactagaaagtggcacccattttcctctcttcctactttgtcttcagcagttagctaaattacaagatcgagaatggttaacagaactttttcaacaaagcaaggtcaatatgcagaaaatgctcccagaaattgatcagaataaggaccgcatgttggagattttggaaggaaagggactgagtttcttattcccactcctcaaattggagaaggaactgttgaagcaaataaagttggatccatcccctcaaaccatatataaatggattaaagataacatctctcccaaacttcatgtagataaaggatttgtgaacatcttaatgactagcttcttacagtacatttctagtgaagtaaacccccccagcgatgaaacagattcatcctctgctccttccaaagaacagttagagcaggaaaaacaactactactatctttcaagccagtaatgcagaaatttcttcatgatcacgttgatctacaagtcagtgccctgtatgctctccaggtgcactgctataacagcaacttcccaaaaggcatgttacttcgcttttttgtgcacttctatgacatggaaattattgaagaagaagctttcttggcttggaaagaagatataacccaagagtttccgggaaaaggcaaggctttgttccaggtgaatcagtggctaacctggttagaaactgctgaagaagaagaatcagaggaagaagctgactaaagaaccagccaaagccttaaattgtgcaaaacatactgttgctatgatgtaactgcatttgacctaaccactgcgaaaattcattccgctgtaatgttttcacaatatttaaagcagaagcacgtcagttaggatttccttctgcataaggtttttttgtagtgtaatgtcttaatcatagtctaccatcaaatattttaggagtatctttaatgtttagatagtatattagcagcatgcaataattacatcataagttctcaagcagaggcagtctattgcaaggaccttctttgctgccagttatcataggctgttttaagttagaaaactgaatagcaacactgaatactgtagaaatgcactttgctcagtaatacttgagttgttgcaatatttgattatccatttggttgttacagaaaaattcttaactgtaattgatggttgttgccgtaatagtatattgcctgtatttctacctctagtaatgggctttatgtgctagattttaatatccttgagcctgggcaagtgcacaagtctttttaaaagaaacatggtttacttgcacaaaactgatcagttttgagagatcgttaatgcccttgaagtggtttttgtgggtgtgaaacaaatggtgagaatttgaattggtccctcctattatagtattgaaattaagtctacttaatttatcaagtcatgttcatgccctgattttatatacttgtatctatcaataaacattgtgatacttg

SEQ ID NO: 22124 - DNA, 860 bp, Homo Sapiens
  misc_feature (574)..(591): n is a, c, g, or t
gcacgaggggcgagtccaaggttttctattataaaatgaaaggggactaccacaggtatctggcagaatttgccacaggaaacgacaggaaggaggctgcggagaacagcctagtggcttataaagctgctagtgatattgcaatgacagaacttccaccaacgcatcctattcgcttaggtcttgctctcaatttttccgtattctactacgaaattcttaattcccctgaccgtgcctgcaggttggcaaaagcagcttttgatgatgcaattgcagaactggatacgctgagtgaagaaagctataaggactctacacttatcatgcagttgttacgtgataatctgacactatggacttcagacatgcagggtgacggtgaagagcagaataaagaagcgctgcaggacgtggaagacgaaaatcagtgagacataagccaacaagagaaaccatctctgaccaccccctcctccccatcccaccctttggaaactccccattgtcactgagaaccaccaaatctgacttttacatttggtctcagaatttaggttcctgccctgttggnnnnnnnnnnnnnnnnnnaaacagttttcaaaagttcttaaaggcaagagtgaatttctgtggattttactggtcccagcttttaggttctttaagacactaacagggactacatagaggctttttcagcattactgtgtcgtctccgtgccagatgtggcaagatcaccattagcaaatggaaattacatttgagagccattagacttataggtgatgcaaagcatctaagagagaggttaatcacactatagaggctaagtggtatcagttttcatttttctaat

SEQ ID NO: 22125 - DNA, 941 bp, Homo Sapiens
  misc_feature (209)..(229): n is a, c, g, or t
  misc_feature (769)..(814): n is a, c, g, or t
gcacgagggggtgacggtgaagagcagaataaagaagcgctgcaggacgtggaagacgaaaatcagtgagacataagccaacaagagaaaccatctctgaccaccccctcctccccatcccaccctttggaaactccccattgtcactgagaaccaccaaatctgacttttacatttggtctcagaatttaggttcctgccctgttggnnnnnnnnnnnnnnnnnnnnnaaacagttttcaaaagttcttaaaggcaagagtgaatttctgtggattttactggtcccagcttttaggttctttaaaacactaacaggactacatagaggctttttcagcattactgtgtcgtctccgtgccagatgtggcaagatcaccattagcaaatggaaattacatttgaaagccattaaacttataggtgatgcaagcatctaagagagaggttaatcacactatagaggcataagtggtatcagttttcatttttctaattgtttaaactgtgttttataccagtgtttgcaagtaattgggtgttagcttgagatggttaaaggtggtttggggagggacttcgttgtaatggttttgctgtaaaaaatgtttccaactccgctgaaatgttgctgaaaagcatggtgctggtaacagttcaacaatccgtggctgctcattcttgcctactttactctcccactgaagcaggttagcgttgaaggtggtatggaaaagcctgcatgcctgttcaattcttttgtttcttnnnnnnnnnnnnnnnnnnnnnnnnnnnnnnnnnnnnnnnnnnnnnntcgctcgctcaacctcttttgttcagtatgtgtaacttgaagctaatttgtactactggatatctgactggagccacagatacagaatctgtattgttcttactgaaacacagcatggaattaacat

SEQ ID NO: 22126 - DNA, 788 bp, Homo Sapiens
ccccgggctgcaggaattcggcacgaggccccaatgttcattacagaaattaacaatgcttaccattctttaaacaccatgtacattattaatatatactgtatatttccaattaactccattcttaggctcaatttaagaaacacaattgtaacattttatacaaaaaatacttcactaagaaagtagacaaactgcacaaaacagtacaagtataatgtgcatagcaagatagcttgaagcattctatgtatggctttctttaaaaataaaactattaggggaatgggcccatttgggacctactgttacagttgacatatgtaaactgtttcacatcttttttaggcacttgctaacaatagtgttcaatccctgaagaacgaatttacctcaaaaacaaaatctacatctgaaataaaaaccaagaaaataacatgggtaaagtcttatatattccttttaaattaaacaaccagttttattagtgcatgcactgaactaaactgaaagaaaataaacttatgccaaaaatttctgtgcaaaatttacataaaaggtacaaaaatatgtacagacttaatttgttatatacagaaaagaacctctgaagttttcatccattaatgaaaatgtcattaacacttgtaacaatgtaacaaaaaaatcatatagcatcgtattttgtaaacacaagaactccattatccaaagaaccagctaagttttagtccgagctacagggtgaaaaattctaaaatctatgattctgttgtcatcctgaaaaa

SEQ ID NO: 22127 - DNA, 589 bp, Homo Sapiens
ccacgcgtccgcggacgcgtgggggcaagatggcagaagtagagcagaagaagaagcggaccttccgcaagttcacctaccgcggcgtggacctcgaccagctgctggacatgtcctacgagcagctgatgcagctgtacagtgcgcgccagcggcggcggctgaaccggggcctgcggcggaagcagcactccctgctgaagcgcctgcgcaaggccaagaaggaggcgccgcccatggagaagccggaagtggtgaagacgcacctgcgggacatgatcatcctacccgagatggtgggcagcatggtgggcgtctacaacggcaagaccttcaaccaggtggagatcaagcccgagatgatcggccactacctgggcgagttctccatcacctacaagcccgtaaagcatggccggcccggcatcggggccacccactcctcccgcttcatccctctcaagtaatggctcagctaataaaggcgcacatgactcctaaactgaaaaaaaataaacttatgccaaaaatttctgtgcaaaattaacataaaaggtacaaaaatatgtacagacttaatttgttatat

SEQ ID NO: 22128 - DNA, 1261 bp, Homo Sapiens
  misc_feature (890)..(930): n is a, c, g, or t
gcacgagggcccgagggccacgagcaggtgcaggcgcagccgcggcgagagcgtgtggagccgagccgttagcgcgcgccgtcggtgagtcagtccgtccgtccgtccgtccgtcggggcgccgcagctcccgccaggcccagcggccccggcgcctcgtctccccgcacccggagccacccggtggagcgggccttgccgcggcagccatgtccatgggcctggagatcacgggcaccgcgctggccgtgctgggctggctgggcaccatcgtgtgctgcgcgttgcccatgtggcgcgtgtcggccttcatcggcagcaacatcatcacgtcgcagaacatctgggagggcctgtggatgaactgcgtggtgcagagcaccggccagatgcagtgcaaggtgtacgactcgctgctggcactgccacaggaccttcaggcggcccgcgccctcatcgtggtggccatcctgctggccgccttcgggctgctagtggcgctggtgggcgcccagtgcaccaactgcgtgcaggacgacacggccaaggccaagatcaccatcgtggcaggcgtgctgttccttctcgccgccctgctcaccctcgtgccggtgtcctggtcggccaacaccattatccgggacttctacaaccccgtggtgcccgaggcgcagaagcgcgagatgggcgcgggcctgtacgtgggctgggcggccgcggcgctgcagctgctggggggcgcgctgctctgctgctcgtgtcccccacgcgagaagaagtacacggccaccaaggtcgtctactccgcgccgcgctccaccggcccgggagccagcctgggcacaggctacgaccgcaaggactacgtctaagggacagacgcagggagnnnnnnnnnnnnnnnnnnnnnnnnnnnnnnnnnnnnnnnnngcgagctggagcgcgcaccaggccatccagcgtgcagccttgcctcggaggccagcccacccccagaagccaggaagcccccgcgctggactggggcagcttccccagcagccacggctttgcgggccgggcagtcgacttcggggcccagggaccaacctgcatggactgtgaaacctcacccttctggagcacggggcctgggtgaccgccaatacttgaccaccccgtcgagccccatcgggccgctgcccccatgctcgcgctgggcagggaccggcagccctggaaggggcacttgatatttttcaataaaagcctttcgttttgc

SEQ ID NO: 22129 - DNA, 856 bp, Homo Sapiens
gcacgaggcacggctccactctgttcctctctgctttgttcttccctggactgagctcagcgcaggctgtgaccccagggggccctgccacgggccactggctgctggggactggggactgggcagagactgagccaggcaggaaggcagcagccttcagcctctctggcccactcggacaacttcccaaggccgcctcctgctagcaagaacagagtccaccctcctctggatattggggagggacggaagtgacagggtgtggtggtggagtggggagctggcttctgctggccaggatggcttaaccctgactttgggatctgcctgcatcggtgttggccactgtccccatttacattttccccactctgtctgcctgcatctcctctgttgcgggtaggccttgatatcacctctgggactgtgccttgctcaccgaaacccgcgcccaggagtatggctgaggccttgcccacccacctgcctgggaagtgcagagtggatggacgggtttagaggggaggggcgaaggtgctgtaaacaggtttgggcagtggtgggggagggggccagagaggcggctcaggttgcccagctctgtggcctcaggactctctgcctcacccgcttcagcccagggcccctggagactgatcccctctgagtcctctgccccttccaaggacactaatgagcctgggagggtggcagggaggaggggacagcttcacccttggaagtcctggggtttttcctcttccttctttgtggtttctgttttgtaatttaagaagagctattcatcactgtaattattattattttctacaataaatgggacctgtgcacagga

SEQ ID NO: 22130 - DNA, 1261 bp, Homo Sapiens
gcacgaggcttgttttttaaaggagcaacttcgtaaagcagaggaacaggttcaggcaactcggcaagaagttgtctttctggctaaagaactcagtgatgctgtcaacgtacgagacagaacgatggcagacctgcatactgcacgcttggaaaacgagaaagtgaaaaagcagttagctgatgcagtggcagaacttaaactaaatgctatgaaaaaagatcaggacaagactgatacactggaacacgaactaagaagagaagttgaagatctgaaactccgtcttcagatggctgcagaccattataaagaaaaatttaaggaatgccaaaggctccaaaaacaaataaacaaactttcagatcaatcagctaataataataatgtcttcacaaagaaaacggggaatcagcagaaagtgaatgatgcttcagtaaacacagacccagccacttctgcctctactgtagatgtaaagccatcaccttctgcagcagaggcagattttgacatagtaacaaaggggcaagtctgtgaaatgaccaaagaaattgctgacaaaacagaaaagtataataaatgtaaacaactcttgcaggatgagaaagcaaaatgcaataaatatgctgatgaacttgcaaaaatggagctgaaatggaaagaacaagtgaaaattgctgaaaatgtaaaacttgaactagctgaagtacaggacaattataaagaacttaaaaggagtctagaaaatccagcagaaaggaaaatggaagatggagcagatggtgctttttacccagatgaaatacaaaggccacctgtcagagtcccctcttggggactggaagacaatgttgtctgcagccagcctgctcgaaactttagtcggcctgatggcttagaggactctgaggatagcaaagaagatgagaatgtgcctactgctcctgatcctccaagtcaacatttacgtgggcatgggacaggcttttgctttgattccagctttgatgttcacaagaagtgtcccctctgtgagttaatgtttcctcctaactatgatcagagcaaatttgaagaacatgttgaaagtcactggaaggtgtgcccgatgtgcagcgagcagttccctcctgactatgaccagcaggtgtttgaaaggcatgtgcagacccattttgatcagaatgttctaaattttgactagttactttttattatgagttaatatagtcctcgtgccgaattcctgcagcccggg

SEQ ID NO: 22131 - DNA, 1217 bp, Homo Sapiens
  misc_feature (755)..(772): n is a, c, g, or t
gcacgaggctcttgcaggatgagaaagcaaaatgcaataaatatgctgatgaacttgcaaaaatggagctgaaatggaaagaacaagtgaaaattgctgaaaatgtaaaacttgaactagctgaagtacaggacaattataaagaacttaaaaggagtctagaaaatccagcagaaaggaaaatggaaggtcagaattcccagagtcctcaatgtttcaaaacatgctcagagcaaaatggttatgttctcacattgtcaaatgcacaaccagttctgcaatatgatggagcagatggtgctttttacccagatgaaatacaaaggccacctgtcagagtcccctcttggggactggaagacaatgttgtctgcagccagcctgctcgaaactttagtcggcctgatggcttagaggactctgaggatagcaaagaagatgagaatgtgcctactgctcctgatcctccaagtcaacatttacgtgggcatgggacaggcttttgctttgattccagctttgatgttcacaagaagtgtcccctctgtgagttaatgtttcctcctaactatgatcagagcaaatttgaagaacatgttgaaagtcactggaaggtgtgcccgatgtgcagcgagcagttccctcctgactatgaccagcaggtgtttgaaaggcatgtgcagacccattttgatcagaatgttctaaattttgactagttactttttattatgagttaatatagtttagcagtnnnnnnnnnnnnnnnnnnccacacctaaaatagaccactgaggagaccatagagcggatgctttcatgcaccctttactgcactttctgaccaggagctactttgagtttggtgttactaggatcagggtcagtctttggcttatcaataaattttaatctctgttaatcttacctgctttaaaaaaaagttcttgggtgttcgtatctttatttattccctagtttgcagaactgtctgaataaaggatacaaggatttatttcaatgttactgcactgaaaaacgtgtatgtattaatgtgctagattattttagcagaatattcacaagtttctgttgaccttgttgattgagcatgactactaaatattatgtaacaaaaagcctttgtcataacagtcttatgagtatttcttcaatatagaaagttcctataatttagccatgaaatgataggtttt

SEQ ID NO: 22132 - DNA, 770 bp, Homo Sapiens
gaaaaaacagataggagctttactcaaaatcacaaagacactatttttcattgaaaaccagtgggagagtaggaaaattggcaaatggccagttgcccccagcagccctgaaaaaatcagggaaattccgctccagaaacgggagaactgggggggccattcttcagggcagcacagcctttttctgctacacctcactcggccagggcaaagtttgtaaactgcagccgctcagtctcctggcaaaagttctgctccactgggtcacactcggctaggaatgcctgaaccttttttaccaagcctttccttttcaatctactgtctttgaaattttctggcaggatcagtgggtcaatctcctccaagatcttcataaactgctctattggggcttttactctcctatcaagtttgcagaaagcttcagcttgcaaatccttgggcagaaaaccctgctggattccagtaagctctttattcaactcttccagctggtcagctatcttctccacagacttctccaaatgtttcaacttctttagttcaacctcttcctgtggactgttctttttcccaattaacatgacccggcaaccatcttgtattccaagtgctgacaacggtgtttccatttccttcagagattttcctaaaaagaggagaaaggtaggccaagttgtaataattgtaccacacctgaaaataaatttcagcaggatacaggaaatagacaagtgtgttcactaatgagaactggtatcttttta

SEQ ID NO: 22133 - DNA, 1252 bp, Homo Sapiens
gcacgaggccagtgcgggcctggctcagcgcgggggggcgcggagaccgcgaggcgaccgggagcggctgggttcccggctgcgcgcccttcggccaggccgggagccgcgccagtcggagcccccggcccagcgtggtccgcctccctctcggcgtccacctgcccggagtactgccagcgggcatgaccgacccacgaggggcgccgccgccggcgctcgcaggccgcggatgaagaagaaaacccggcgccgctcgacccggagcgaggagttgacccggagcgaggagttgaccctgagtgaggaagcgacctggattgaagaggcgacccagagtgaggaggcgacccagggcgaagagatgaatcggagccaggaggtgacccgggacgaggattccacccggatcgaggaggtgaccagggaggaaatggcggcagctgggctcaccgtgactgtcacccacagtaatgataatcacgatcttcatgttacctcccagcagggcagcagtgaaccagttgtccaagacctggcccaggttgttgaagaggtcataggggttccacagtcttttcagaaactcatatttaagggaaaatctctgaaggaaatggaaacaccgttgtcagcacttggaatacaagatggttgccgggtcatgttaattgggaaaaagaacagtccacaggaagaggttgaactaaagaagttgaaacatttggagaagtctgtggagaagatagctgaccagctggaagagttgaataaagagcttactggaatccagcagggttttctgcccaaggatttgcaagctgaagctctctgcaaacttgataggagagtaaaagccacaatagagcagtttatgaagatcttggaggagattgacacactgatcctgccagaaaatttcaaagacagtagattgaaaaggaaaggcttggtaaaaaaggttcaggcattcctagccgagtgtgacacagtggagcagaacatctgccaggagactgagcggctgcagtctacaaactttgccctggccgagtgaggtgtagcagaaaaaggctgtgctgccctgaagaatggcgccaccagctctgccgtctctggagcggaatttacctgatttcttcagggctgctgggggcaactggccatttgccaattttcctactctcacactggttctcaatgaaaaatagtgtctttgtgatttttgagtaaagctcctatctgttttctc

SEQ ID NO: 22134 - DNA, 945 bp, Homo Sapiens
ttcgcggtgcccactccactccttgtgcggcgctaggccccccgtcccggtcatggccatgctcagagtccagcccgaggcccaagccaaggtggatgtgtttcgtgaagacctctgtaccaagacagagaacctgctcgggagctatttccccaagaagatttctgagctggatgcatttttaaaggagccagctctcaatgaagccaacttgagcaatctgaaggccccattggacatcccagtgcctgatccagtcaaggagaaagagaaagaggagcggaagaaacagcaggagaaggaagacaaggatgaaaagaagaagggggaggatgaagacaaaggtcctccctgtggcccagtgaactgcaatgaaaagatcgtggtccttctgcagcgcttgaagcctgagatcaaggatgtcattgagcagctcaacctggtcaccacctggttgcagctgcagatacctcggattgaggatggtaacaattttggagtggctgtccaggagaaggtgtttgagctgatgaccagcctccacaccaagctagaaggcttccacactcaaatctctaagtatttctctgagcgtggtgatgcagtgactaaagcagccaagcagccccatgtgggtgattatcggcagctggtgcacgagctggatgaggcagagtaccgggacatccggctgatggtcatggagatccgcaatgcttatgctgtgttatatgacatcatcctgaagaacttcgagaagctcaagaagcccaggggagaaacaaagggaatgatctattgagagccctctctcccattctgtgatgagtacagcagagaccttcctgctttttactggggactccagattttccccaaacttgcttctgttgagatttttccctcaccttgcctctcaggcacaataaatatagttataccact

SEQ ID NO: 22135 - DNA, 391 bp, Homo Sapiens
gtaccggtccggaattcccgggtcccaccaacaacgtccggatgcagtgactaaagcagccaagcagccccatgtgggtgattatcggcagctggtgcacgagctggatgaggcagagtaccgggacatccggctgatggtcatggagatccgcaatgcttatgctgtgttatatgacatcatcctgaagaacttcgagaagctcaagaagcccaggggagaaacaaagggaatgatctattgagagccctctctcccattctgtgatgagtacagcagagaccttcctgctttttactggggactccagattttccccaaacttgcttctgttgagatttttccctcaccttgcctctcaggcacaataaatatagttataccactgaac

SEQ ID NO: 22136 - DNA, 570 bp, Homo Sapiens
atcccccgggctgcagggttttttgagccccagaccaataatgttttaaagttatccccttgctactttactgatacctttatcattcctgagacagtttgctaatttaaaaatgtagcattccatttgtatttatttctctcccttgccaaaaagattttctaatactgcttgtaccagccagagaaagatccaaaacactactcagctctcttgcactgaggaaatttttccccctacattgactcctggcctacatcagccaaacttaaccttggtggggtttggatttgatagccaattagttctgtgctggttgcaaagaattgatatttagatggtttttaatactcagcagattgtcttcctttatattgtgtcttttttatgttgcatgttgcttttgttatcagcctgattttttgctcagtatatgatagttctgctgatgttttgtttattgggcagacatatcttcattaagagtttttggaaaactcatcaaattcgatgaatacattttcttcataacccatttggaattattcctaataaaatgataaaatacgt

SEQ ID NO: 22137 - DNA, 1616 bp, Homo Sapiens
gcacgaggggagctgccgcgccagtcgcctagcaggtcctctaccggcttattcctgtgccggatcttcatcggcacaggggccactgagacgtttctgcctccctctttcttcctccgctctttctcttccctctcgtttagtttgcctgggagcttgaaaggagaaagcacggggtcgccccaaaccccttctgcttctgcccatcacaagtgccactaccgccatgggcctcactatctcctccctcttctcccgactatttggcaagaagcagatgcgcattttgatggttggattggatgctgctggcaagacaaccattctgtataaactgaagttaggggagatagtcaccaccattcctaccattggttttaatgtggaaacagtagaatataagaacatttgtttcacagtatgggatgttggtggtcaagatagaattaggcctctctggaagcattacttccagaatacccagggtcttatttttgtggtagatagcaacgatcgtgaaagaattcaggaagtagcagatgagctgcagaaaatgcttctggtagatgaattgagagatgcagtgctgctactttttgcaaacaaacaggatttgccaaatgctatggccatcagtgaaatgacagataaactagggcttcagtctcttcgtaacagaacatggtatgttcaagccacttgtgcaacacaaggaactggtctgtatgaaggacttgactggctgtcaaatgagctttcaaaacgttaaatgaaattggatatctaaccaaggacatgtttgataaaattggtctaggcttgttacaacaaaattagtttgtatcttggttattaaacagtatctgggactggtttgggcagaatattaaacttattttgttgccaattattgtttaccgagtataatgttgctatttagcaatgtgcttggttttaaagaaattctccttgggaaaaaagtatcctcttttaattttacttcccataagcgtaaatgcctggacatagctcttgtgcaacctttaaataaattgttttgagtgttttttgagccccagacaaataatgttttaaagttatccccttgctactttactgatacctttatcattcctgagacagtttgctaatttaaaaatgtagcattccatttgtatttatttctctcccttgccaaaaagattttctaatactgcttgtaccagccagagaaagatccaaaacactactcagctctcttgcactgaggaaatttttccccctacattgactcctggcctacatcagccaaacttaaccttggtggggtttggatttgatagccaattagttctgtgctggttgcaaagaattgatatttagatggtttttaatactcagcagattgtcttcctttatattgtgtcttttttatgttgcatgttgcttttgttatcagcctgattttttgctcagtatatgatagttctgctgatgttttgtttattgggcagacatatcttcattaagagtttttggaaaactcatcaaattcgatgaatacattttcttcataacccatttggaattattcctaataaaatgataaaatacgt

SEQ ID NO: 22138 - DNA, 1448 bp, Homo Sapiens
  misc_feature (122)..(168): n is a, c, g, or t
gcacgaggggcggaggctgcaactcccggaacaacagccacaacatcaggagcaggagcggcagcggcgacggcggcagcagcctcccccaccccgatccccacagtcaccgccccgtcccnnnnnnnnnnnnnnnnnnnnnnnnnnnnnnnnnnnnnnnnnnnnnnntggactaaacaggtcacctgcaggtattttatgcatggggtttgtaaggaaggagacaactgtcgctactcgcatgacctctctgacagtccgtatagtgtagtgtgcaagtattttcagcgagggtactgtatttatggagaccgctgcagatatgaacatagcaaaccattgaaacaggaagaagcaactgctacagagctaactacaaagtcatcccttgctgcttcctcaagtctctcatcgatagttggaccacttgttgaaatgaatacaggcgaagctgagtcaagaaattcaaactttgcaactgtaggagcaggttcagaggactgggtgaatgctattgagtttgttcctgggcaaccctactgtggccgtactgcgccttcctgcactgaagcacccctgcagggctcagtgaccaaggaagaatcagagaaagagcaaaccgccgtggagacaaagaagcagctgtgcccctatgctgcagtgggagagtgccgatacggggagaactgtgtgtatctccacggagattcttgtgacatgtgtgggctgcaggtcctgcatccaatggatgctgcccagagatcgcagcatatcaaatcgtgcattgaggcccatgagaaggacatggagctctcatttgccgtgcagcgcagcaaggacatggtgtgtgggatctgcatggaggtggtctatgagaaagccaaccccagtgagcgccgcttcgggatcctctccaactgcaaccacacctactgtctcaagtgcattcgcaagtggaggagtgctaagcaatttgagagcaagatcataaagtgagactcctccccagtcttcatttgtgctttctcttttggggaagaatttagtaacttgtgccaactttcaaccagatggaccgcatttaaatgcatgcattttatcttgaaactgggatattctaatggggatttcttctttgtatttcagctagcttctaggttagttggtctatctacttttatttgaatgaggaaaccctgtgtatcagttagaatcttcgtgctttttctgaggagattgtgtttaatggattattagccagtttaggctcagtgaacaaactgatctagctctgaatgtatgtttcctgacgttttacatttccactttcctattccattcattaagctagccaacaatccaccatcctttaaagattgttctcataactgaacaaaaaccacataatctaaacagagcaaagctacagaaataaatttatttaaacg

SEQ ID NO: 22139 - DNA, 2126 bp, Homo Sapiens
gcacgaggtggagctctcatttgccgtgcagcgcagcaaggacatggtgtgtgggatctgcatggaggtggtctatgagaaagccaaccccagtgagcgccgcttcgggatcctctccaactgcaaccacacctactgtctcaagtgcattcgcaagtggaggagtgctaagcaatttgagagcaagatcataaagtcctgcccagaatgccggatcacatctaactttgtcattccaagtgagtactgggtggaggagaaagaagagaagcagaaactcattctgaaatacaaggaggcaatgagcaacaaggcgtgcaggtattttgatgaaggacgtgggagctgcccatttggagggaactgtttttacaagcatgcgtaccctgatggccgtagagaggagccacagagacagaaagtgggaacatcaagcagataccgggcccaacgaaggaaccacttctgggaactcattgaggaaagagagaacagcaacccctttgacaacgatgaagaagaggttgtcacctttgagctgggcgagatgttgcttatgcttttggctgcaggtggggacgacgaactaacagactctgaagatgagtgggacttgtttcatgatgagctggaagatttttatgacttggatctatagcaaccttgcgtggcgtgtgaactggtctgctgacctcagacagcagctgtcccctgtggtggtgtggcagtgcctgtgttctctcctaggcaggcctctcaactccaggtgctgtcctaagaatttttacccagggcctgtcttctcaacccctcacctttccctgaggagtgtgttgttttccctgttgaaaaaagttacaaaaataaatcttaaagttagttttttgtaacacgaatttaactgtcagacagttagtgtaggtgtgttgcgtcatctgttttcaaccagattgcatttatggacttttcacacactcattttgaggaccccaggttcaaaagtaaaagcagtggccctgctttggggtccaagaataggagtgatgggtgaagggacctaagctggccaatagccctctgccccagacatgggatgtggatccttgaggtttctggtgaaatctgcacatctgtgtttttatatctgttccctaccctgtaatccctaccacgtgcacttgttctgtggttttggtctcttgtttaattgcacacaagtaatactactgggtaaccagaatcaggtgtgaatgtgttgagattttttactgttttgcatgataggaaaattgagaaagaatacgtataaaagatagagaggcataacatcaatgcagagttggaagttggctcccaagggctgacatggtgtgagtgtgtgggtgtgtgataagcttctcatccctgcatagatgcagtattcttagccttagtagaaaaacctggtttagtggtttaagccttgtgtggcagatagatcttaaagggcaaagcagtatattggtagttgtcaatatagcagtgctagctctgtctatataaatagagaaatggggttagccatagaggttaaaactacctggttatcccatataataacacaaactgggtcttggatacacagttgtatttaatgttttacgatctagcctttccagtacaggcactttttgagaaacctttgtcctcacttgaggcattttgttgtcgggtttttgtgtttgtttttgtgggtatttgcctcattccacccctgagctttcaggtagacagacgtgattcaaaactctgttctaaggtgtttattgtagtggagtaatgggtttgcagtgataagtcatacttttccaccgaaagggagggcttgggaatccctgagattagctaaagttaagttgttggaagaattccttgattggaaattgtacctttgtgttttgttgctctgtttcctgaaaataactcggggatgctcctggtttgtccatctactgctttgattccttggatcccacccattctttcactttaagaaaaaacaaataattgttgcagaggtctttgtattttgcagctgcccttttgtaagaagcacttttcccaaataaaacaattaaacctcgtgc

SEQ ID NO: 22140 - DNA, 1452 bp, Homo Sapiens
  misc_feature (1262)..(1289): n is a, c, g, or t
gcacgaggaatctttacttataaagttacaaatacttttagttagtattagatttgagagcaagtctgcatttagtggaatcatttttagttacatcagattcagtttgcagaccagtggaaacagggtgggtaaacacaagctaatttttaacagttttagagtaggttatattaaacactttttaaaaagtaatcatttgaggcattgttttaggtgctaaagttatctgaagtaactgaagaaaattagattgattttttaaaaaaccttttaaaattaatgaagtgtgatgtctagagtctaatcaaggaaaggataactgtgtccaatatcatcaaattctgccttccatctgcctgttcatattcccacaccacggagaatataaaactgtctaccatggccactaataggaactgttgaaatgccacttttaaacaacataaaggaatatctttttttgtctccgtgtaggaaatcccataagttcttatatttgttccagttcccatttcctgccattgaccagataacatcattgactttcaaatgacttttagaagtgataactcttaatttcctaatagatactagattgtattgaattctgttttaattattctctaggtaagtatgttttaggattaaataccttttacagatactgaaagtgcctccttttgtggtgtaaaaaacaaattatggtgcaaaaagtaatcactagattgaaatacatgaaggttttttgctttttgacatacgaaaatgtcaagagaaaggccaaagatttgtactttttcacttacaaagcactcctttttcccttaaacttctttctgtcaaattagatttaatgagagagtactatttttaaggagctatctgtttatgtagaatgattttgttaagagtaatgtaaactattattgagtagaggcctaaagaggactgtgcatttttgctatttaaaggaatcacaaatgatcatacttaagtgagcaaaaatgacaagttttactagctaagtagagaaataaatctcaaatgcagcgctacaattttcattatcttaagcacattgtacatttctacagaacctgtgattattctcgcatgataaggatggtacttgcatatggtgaattactactgttgacagtttccgcagaaatcctatttcagtggaccaacattgtggcatggcagcaaatgccaacattttgtggaatagcagcaaatctacaagagaccctggttgnnnnnnnnnnnnnnnnnnnnnnnnnnnncccccttctcctgaatcagcagggatggaaggagggtagggaagttatgaattactcccttcagtagtagctctgaagtgtcacatttaatattcagtttttttaaacatgattctagtttaatgtaaaatagagaagaaagaggaagtgtttccctttttta

SEQ ID NO: 22141 - DNA, 1371 bp, Homo Sapiens
  misc_feature (639)..(651): n is a, c, g, or t
  misc_feature (923)..(950): n is a, c, g, or t
ccccgggctgcaggaattcggcacgaggaaaatatattttattctggacctctttcagatctgattcaaattacagttgtcaaagcaatacaatgcaaaggggaactgcaacaacaacaacaacaagaaatgtgcctagaaaggataaaagggtcactggggacaaatcattgtgatgtggaactaaaatacgtcgtaagtgtaattaacatggtccaggacagcacagaacatctacatcagtcttccttacacaataatcatgaaaactgaacaacgaagttctttaacatgtacaaaaacctgtcatgggctggtttacacttttacaacagttttaaagttaactggataactaaagaaatgatgcagacattttaatccagtgctataggtaggctcacagaattagacccaaaggatttgtaaaaacaaaaatggaaacagtatagctacaatgtcaaagtcaggaaagaagaaaatttacttccgtattcaaggattacagagctacaaatgcagtctgtgtgtttttgtttgtaatgagatggataagtacatcagactagatacaacatgcagaatgttttcctgaacttatccggaaattccaaagaaaacatcatgaaacagcttacnnnnnnnnnnnnntatatgccctagttattcaccctgcttcaacactgtcaacgtaaaggcagaaataaagcaagctatcaatacctcagaactactgaaatcaaattttaaatcagtgtattaaaaaagtgaacacttcctctttcttctctcttctacatttaactagaatcatgtttaaaaaaaactgatattaaatgtgacacttcagagctactactggaaggagtaattcataacttccctaccctccttccatccctgctgattcaggagaagggggnnnnnnnnnnnnnnnnnnnnnnnnnnnncaaccagggtctcttgtagatttgctgctattccacaaaatgttggcatttgctgccatgccacaatgttggtccactgaaataggatttctgcggaaactgtcaacagtagtaattcaccatatgcaagtaccatccttatcatgcgagaataatcacaggttctgtagaaatgtacaatgtacttaagataatgaaaattgtagcgctgcatttgagatttatttctctacttagctagtaaaacttgtcatttttgctcacttaagtatgatcatttgtgattcctttaaatagcaaaaatgcacagtcctctttaggcctctactcaataatagtttacattactcttaacaaaatcattctacataaacagatagctccttaaaaatagtactctctcattaaatctacctcgtgc

SEQ ID NO: 22142 - DNA, 1120 bp, Homo Sapiens
gcacgaggcacaccatcggctttggcatctatgaggttccagaggagttaagtgggcagaccaacatccacctcagcaaaaacttcttcctgacgaatcgcgccagggagcgctcagacaccttcatcaacctccgggaggtgctcaaccgcttcaagctgccgccaggagagtacattctcgtgccttccaccttcgaacccaacaaggatggggatttctgcatccgggtcttttctgaaaagaaagctgactaccaagctgtcgatgatgaaatcgaggccaatcttgaagagttcgacatcagcgaggatgacattgatgatggattcaggagactgtttgcccagttggcaggagaggatgcggagatctctgcctttgagctgcagaccatcctgagaagggttctagcaaagcgccaagatatcaagtcagatggcttcagcatcgagacatgcaaaattatggttgacatgctagattcggacgggagtggcaagctggggctgaaggagttctacattctctggacgaagattcaaaaataccaaaaaatttaccgagaaatcgacgttgacaggtctggtaccatgaattcctatgaaatgcggaaggcattagaagaagcaggtttcaagatgccctgtcaactccaccaagtcatcgttgctcggtttgcagatgaccagctcatcatcgattttgataattttgttcggtgtttggttcggctggaaacgctattcaagatatttaagcagctggatcccgagaatactggaacaatagagctcgaccttatctcttggctctgtttctcagtactttgaagttataactaatctgcctgaagacttctcatgatggaaaatcagccaaggactaagcttccatagaaatacactttgtatctggacctcaaaattatgggaacatttacttaaacggatgatcatagctgaaaataatgatactgtcaatttgagatagcagacgtttcacacatcaagtaaaagatttgcatatcattatactaaatgcaaatgagtcgcttaacccttgaccaggtcaaagaaaagctttaaatctgtaaaatagatatacactttttactttt

SEQ ID NO: 22143 - DNA, 603 bp, Homo Sapiens
gcacgaggggcagaccaacatccacctcagcaaaaacttcttcctgacgaatcgcgccagggagcgctcagacaccatcctgagaagggttctagcaaagcgccaagatatcaagtcagatggcttcagcatcgagacatgcaaaattatggttgacatgctagattcggacgggagtggcaagctggggctgaaggagttctacattctctggacgaagattcaaaaataccaaaaaatttaccgagaaatcgacgttgacaggtctggtaccatgaattcctatgaaatgcggaaggcattagaagaagcaggtttcaagatgccctgtcaactccaccaagtcatcgttgctcggtttgcagatgaccagctcatcatcgattttgataattttgttcggtgtttggttcggctggaaacgctattcaagatatttaagcagctggatcccgagaatactggaacaatagagctcgaccttatctcttggctctgtttctcagtactttgaagttataactaatctgcctgaagacttctcatgatggaaaatcagccaaggactaagcttccatagaaatacactttgtatctggacct

SEQ ID NO: 22144 - DNA, 1203 bp, Homo Sapiens
gcacgagggccccaggcagcgtgtgtcggtcgcctagtctggagaactagtcctcgactcacgtgcaaggatgatgctgaaaggaataacaaggcttatctctaggatccataagttggaccctgggcgttttttacacatggggacccaggctcgccaaagcattgctgctcacctagataaccaggttccagttgagagtccgagagctatttcccgcaccaatgagaatgacccggccaagcatggggatcagcacgagggtcagcactacaacatctccccccaggatttggagactgtatttccccatggccttcctcctcgctttgtgatgcaggtgaagacattcagtgaagcttgcctgatggtaaggaaaccagccctagaacttctgcattacctgaaaaacaccagttttgcttatccagctatacgatatcttctgtatggagagaagggaacaggaaaaaccctaagtctttgccatgttattcatttctgtgcaaaacaggactggctgatactacatattccagatgctcatctttgggtgaaaaattgtcgggatcttctgcagtccagctacaacaaacagcgctttgatcaacctttagaggcttcaacctggctgaagaatttcaaaactacaaatgagcgcttcctgaaccagataaaagttcaagagaagtatgtctggaataagagagaaagcactgagaaagggagtcctctgggagaagtggttgaacagggcataacacgggtgaggaacgccacagatgcagttggaattgtgctgaaagagctaaagaggcaaagttctttgggtatgtttcacctcctagtggccgtggatggaatcaatgctctttggggaagaaccactctgaaaagagaagataaaagcccgattgcccccgaggattagcacttgttcacaacttgaggaaaatgatgaaaaatgattggcatggaggcgccattgtgtcggctttgagccagactgggtctctctttaagccccggaaagcctatctgccccaggagttgctgggaaaggaaggatttgatggcctggatccctttattcccatcctgggttcccactataacccaaaggaatttgaaagttgtatcagtaattatttgggaaacaatttgcctcaacatgagaaagctcctacagaaaaagggaaaaaa

SEQ ID NO: 22145 - DNA, 1155 bp, Homo Sapiens
ccccgggctgcaggaattcggcacgagggaccatcttctgtatggagagaagggaacaggaaaaaccctaagtctttgccatgttattcatttctgtgcaaaacaggactggctgatactacatattccagatgctcatctttgggtgaaaaattgtcgggatcttctgcagtccagctacaacaaacagcgctttgatcaacctttagaggcttcaacctggctgaagaatttcaaaactacaaatgagcgcttcctgaaccagataaaagttcaagagaagtatgtctggaataagagagaaagcactgagaaagggagtcctctgggagaagtggttgaacagggcataacacgggtgaggaacgccacagatgcagttggaattgtgctgaaagagctaaagaggcaaagttctttgggtatgtttcacctcctagtggccgtggatggaatcaatgctctttggggaagaaccactctgaaaagagaagataaaagcccgattgcccccgaggaattagcacttgttcacaacttgaggaaaatgatgaaaaatgattggcatggaggcgccattgtgtcggctttgagccagactgggtctctctttaagccccggaaagcctatctgccccaggagttgctgggaaaggtcaagtcaaaggaaggatttgatgccctggatccctttattcccatcctggtttccaactataacccaaaggaatttgaaagttgtattcagtattatttggaaaacaattggcttcaacatgagaaagctcctacagaagaagggaaaaaagagctgctgttcctaagtaacgcgaacccctcgctgctggagcggcactgtgcctacctctaagccaagatcacagcatgtgaggaagacagtggacatctgctttatgctggacccagtaagatgaggaagtcgggcagtacacaggaagaggagccaggcccttgtacctatgggattggacaggactgcagttggctctggacctgcattaaaatgggtttcactgtgaatgcgtgacaataagatattcccttgttcctaaaactttatatcagtttattggatgtggtttttcacatttaagataattatggctcttttcctaaaaaataaaatatctttct

SEQ ID NO: 22146 - DNA, 1293 bp, Homo Sapiens
gcacgaggaaacagtgaaaacttttaattaatttacttagttgtttttataacctctaataccatacaatgaagaaagaaatgtttcggataatagattgatttttagaacttgtcaggcattttccatttgaatctcaagtataaaaatcttacttatttgcagtcagctgtgatgtctgccacatttgcaaaatttcatccaaatcttgttgttggtggtacatattcaggccaaattgtgctttgggataaccgtagcaataaaagaactccagtgcaaagaactccactgtcagcagctgcacacacacaccctgtatattgtgtaaatgttgttggaacacaaaatgctcacaatctgattagcatctctactgatggaaaaatttgttcatggagtctggacatgctttcccatccacaggatagcatggagttggttcataaacagtcaaaagcagtagctgtgacatctatgtccttccctgttggagatgtcaacaactttgttgttgggagtgaagaaggttctgtgtacacagcatgccgccatggcagcaaagctggaatcagtgagatgtttgaggggcatcaaggaccaatcactggcatccattgtcatgcagctgttggagcagtagacttctcacatctttttgtcacttcatcgtttgactggacagtaaagctttggacaactaagaataacaagcctttgtattcatttgaagataatgcagactatgtttatgatgttatgtggtcacctacccacccagccctgtttgcctgtgtggatggcatggggagattggatttgtggaatctcaataatgacacagaggtaccaactgccagcatttctgtggagggtaatcctgctcttaatcgtgtgagatggacccattctggcagagagattgctgtgggtgattctgaaggacagattgttatatacgatgtgggagagcagattgctgttccccgcaatgatgaatgggcacggtttggccgaacacttgcagaaattaatgcaaaccgagctgatgcagaggaggaagcagctacccgaatacctgcttagttcctgaaaaggggagtgtaactagtggatttgggaaaggttcttaagtagatcctgagactatttgcatgcttctgtctaaatgatattaaaaggaaatttcatggattaaaccatgggtttaatgcaacaaggaaacttacaatgtccctttatatataacatgcatcctgttttgggatttgtgtcattttttaatatagctga

SEQ ID NO: 22147 - DNA, 986 bp, Homo Sapiens
gcaggaattcggcacgagggtagacttctcacatctttttgtcacttcatcgtttgactggacagtaaagctttggacaactaagaataacaagcctttgtattcatttgaagataatgcagactatgtttatgatgttatgtggtcacctacccacccagccctgtttgcctgtgtggatggcatggggagattggatttgtggaatctcaataatgacacagaggtaccaactgccagcatttctgtggagggtaatcctgctcttaatcgtgtgagatggacccattctggcagagagattgctgtgggtgattctgaaggacagattgttatatacgatgtgggagagcagattgctgttccccgcaatgatgaatgggcacggtttggccgaacacttgcagaaattaatgcaaaccgagctgatgcagaggaggaagcagctacccgaatacctgcttagttcctgaaaaggggagtgtaactagtggatttgggaaaggttcttaagtagatcctgagactatttgcatgcttctgtctaaatgataattaaaaggaaatttcatggattaaaccatgggtttaatgcagcaaggaaacttacaatgtccctttatatataacatgcatcttgttttggatttgtgtcattttttaatatagctgattgacttcacagaaagcagcttttttgaattctaatacataggtgtatatttggtattagttattttgagttcttttcaacttataacactgtatacagttatttctaaagcacagatgaaataagttctgcatatttttaaataatcacagttccctgttatacagataatgttctcactacccataatatgtaggaacattgtttctccttagccgtagtatgcatacacctatccatgttcattctgacatcctttgttgtctttataattcatgtggtagttacctataaataaaaacaaatatgcgtt

SEQ ID NO: 22148 - DNA, 998 bp, Homo Sapiens
gcacgaggctccattctaggacagtcagaaccacaggtctgctgttaagggattttaaattgtgcatttttaaccctacagtgaaataacttaagatatccctgtgttcacagtgtgaggggctgttttatgtcatgttggcataaattgttttgtaaaagggaaagtgtttctaaaggtgtttcagcgcttgtgctgatacaaagtaagttattactttgcaccaggtggtttggccactgaattaatactgtatagcaagagaaacaatcttatttttttggacaacatgttttattaagttcttcatttctgttgattttttttattgcatttatgattcagtggctgggaattgagaatttatttgaaatagaataggtaacacctcagcgtactatagaaaatgcactcagctcaactgctgtgtttaaaatacacattttaaatccctctttacagacactaacataaaagtacatctttctgggttgtaaacatgtggtagtaccagagtattgtatagtcaatgttaaataaaagccaaaactggaatgtgcagaaagtaggctttggttaatttgtggattcatttttatttttgtctttgtttaactttttaaaaaataagatttctggagtagattggtatattctgttaaagacttacagtgatccattttgcttacactgttgcatcacaagggactcacccagggaccatgacctgctggtgtgtgtgtatatttacaaaaacaaaacaaacaaaccacccattgggatataaggtagcaatcacaaactaaagactgcggcttgttgaggtgcaataccctgactcccaaagttagttacagtgggttttattgtttttgtgactgaaggatttattcagactgctgtactcttcatttgatgtaacaaaatgctattaatctaaatatttgtaaataaagcctcgtgccgaattcctgcagcccgggggatctttttatggg

SEQ ID NO: 22149 - DNA, 1279 bp, Homo Sapiens
gcacgaggatcaaaggcaagtagagtaataaatctctcctgcatggtaaatctagactttttttcccccttgtcctcgtgataagtatgtcaccaatatatgatttaaaccgagcactgatgctggacttcatgatttttaccctccctttggcaaggctttgtctcactgtacggtttaatttggtgatatcttaagcctttcttcccatccttaactgttcaagtatgtctgttgtaaccaataagtttattgctgtgaaattacttctgatggtagagaaggggttctataactgcttttgttttgttttggataaatttcctgttgtgtgggtggcatttttcttaacgagatttgcttctgtcttagcctcacacagggaaaatatccatttatcttctctctcgtgcttaattaatagctttatctttttttataccattttatccttttctctttaacagaaagtaaatatgtataaaatttgaaggaatcgaactaacaatacattctgtgtatattattttaatgaagaaaataaattgattactggcattggaacagtataaaataccagtttgtacagtatgacctatatgtgaccatgttactcccttccatttcacacaaagaaatagacacaactgcagttcacaagtagtactggctccaccccttggtgctggcagtgtttggggacattatgctggaaagagctcctagcatcagaggattaacactagcagattctgttccatctttgcactgttgcttacctgctgattttcttaactgttcttgtgcaatcgacaatgtgctaacctgcttttctctttttgtaaacgtttttgcattacaggctgcattcttgccttactgtatagaaaaagaaaaaaggctgggtttactattgcacattttaagcttttatacctttatcttcttggaatggtcagattctgaactggacagtcagaaccacaggtctgctgttaagggattttaaattgtgcatttttaaccctacagtgaaataacttaagatatccctgtgttcacagtgtgaggggctgttttatgtcatgttggcataaattgttttgtaaaagggaaagtgtttctaaaggtgtttcagcgcttgtgctgatacaaagtaagttattactttgcaccacgtggtttgggcactgaattaatactgtatagcaagagaaacattcttatttttttggacaacatgttttattaagttcttcatttctgttgatttttttta

SEQ ID NO: 22150 - DNA, 640 bp, Homo Sapiens
cccccgggctgcaggaattcggcacgagggcccttagaaagagggaggggagagggtagacagggaggagcagaggctgggaatagtgcagaaagttgacatctctcctttaaagatattctacagatcaactctgtctaagcccagccctgatttagtcaggagcttttcttcttctttctgctttgtggtctgagaagcattgcctgttaagcacataagtttaggtaacaaatgacttttagtaggagcctcagaaaggagataccatttaacacgagccgttgctttatagatgcaatggcttctatgacaagcagcctttggaagttttaggaccaatcggacaccctgactgatgaataaatgccacaaaggacttgccaagtgggagaaaatatgaggttagaggataaagccagtactctcttgtttggtcataaacttgcctatctggtgataagattccaatgatgggaatccctttaaccttttgagggactccccaggcacttaactcatcctaaatagcaactgcatcaagaacagacaagggtgtgtagcggtttacaaatacagccataaaaaagtcaaacaggatctacatggcatcatcattccccttggccaatcctcgtgc

SEQ ID NO: 22151 - DNA, 1490 bp, Homo Sapiens
  misc_feature (134)..(178): n is a, c, g, or t
gcacgagggcttctcagaccacaaagcagaaagaagaagaaaagctcctgactaaatcagggctgggcttagacagagttgatctgtagaatatctttaaaggagagatgtcaactttctgcactattcccagnnnnnnnnnnnnnnnnnnnnnnnnnnnnnnnnnnnnnnnnnnnnnacttcaccccacaatcttgaaaaacttcctttctcttctgtgaacatcattggccagatccattttcagtggtctggatttctttttattttcttttcaacttgaaagaaactggacattaggccactatgtgttgttactgccactagtgttcaagtgcctcttgttttcccagagatttcctgggtctgccagaggcccagacaggctcactcaagctctttaactgaaaagcaacaagccactccaggacaaggttcaaaatggttacaacagcctctacctgtcgccccagggagaaaggggtagtgatacaagtctcatagccagagatggttttccactccttctagatattcccaaaaagaggctgagacaggaggttattttcaattttattttggaattaaatacttttttccctttattactgttgtagtccctcacttggatatacctctgttttcacgatagaaataagggaggtctagagcttctattccttggccattgtcaacggagagctggccaagtcttcacaaacccttgcaacattgcctgaagtttatggaataagatgtattctcactcccttgatctcaagggcgtaactctggaagcacagcttgactacacgtcatttttaccaatgattttcaggtgacctgggctaagtcatttaaactgggtctttataaaagtaaaaggccaacatttaattattttgcaaagcaacctaagagctaaagatgtaatttttcttgcaattgtaaatcttttgtgtctcctgaagacttcccttaaaattagctctgagtgaaaaatcaaaagagacaaaagacatcttcgaatccatatttcaagcctggtagaattggcttttctagcagaacctttccaaaagttttatattgagattcataacaacaccaagaattgattttgtagccaacattcattcaatactgttatatcagaggagtaggagagaggaaacatttgacttatctggaaaagcaaaatgtacttaagaataagaataacatggtccattcacctttatgttatagatatgtctttgtgtaaatcatttgttttgagttttcaaagaatagcccattgttcattcttgtgctgtacaatgaccactgttattgttactttgacttttcagagcacacccttcctctggtttttgtatatttattgatggatcaataataatgaggaaagcatgatatgtatattgctgagttgaaagcacttattggaaaatattaaaaggctaacattaaaagactaaaggaaacag

SEQ ID NO: 22152 - DNA, 1042 bp, Homo Sapiens
gcagtgcgggagattgtaaggaagcggtggcggctggtgaagcaagtctcacatgtcggcgttcttggccaatggatacaaagataaagaaaatgttgcctttttctaggaactgtcagaaatcctcatgcctttcaagacttctgtgaatgacttgaattttttattccctgcctagggtctgtgaacgaggcctgtctcttccctggggtttctttccatggcctttatttctcctcttccagtgggagttttgcaggctcttctctgtggaaacttcacgagcgttggctgggcctcggcttcgctggagtgtactccagggtgaaggcagagtgggatttgagacccaggttaggcacgacccaggctgagaagggacgtttccatcattcacagtgccctccccacagcactacctcaccccgacccccaccctcactcctaccccaccccgcgatcgtcaggggtgccacggtgggccggagggtgccggctctggctgtccctgtgccggtccctcacaaacctctccccctttgaaactcaagcacagctgcgaggagggcagcgaggagggacccctctctcatggttgtctctttcccccgctatgtcataggtagtggaggaagcgaaggaagtgaacgctgaatgtgacgcatttctgaagagctcagctgtcaccgggcatagcctggaagccccaagtctgttctgactttgcctggctgtctccttgacccgcctcctagatcattgtccttgatgtccaggctgggtcatttaaaatagagatgcaatcaggaaggttgggggacttgggactgtggctgaattgagaccttgctgatgtattcatgtcagcacctgagtcacagcccaggtgcccggaagcagcctcttcgcataggcagtgatttgcgattactttaaagctcaccttttttcttcccctctctgttcgctgctgtcagcataatgattgtgttccttccctatgggatccatctgttttgtaaacaataaagcgtctgaggga

SEQ ID NO: 22153 - DNA, 836 bp, Homo Sapiens
gcacgaggcctggggacacatctgcccacagctgcacaggccagggcacaggcacatctgttggttctcaggcctcagataaaaccatctccgcatcatatggccagtgaccgctttctcccttcaagaaaattctgtggctgtgcagtactttgaagttttaattattaacctgctttaattaaagcagtttcctttcttataaagtggaatcaccaaatcttatcacacagagcacagtcctgtagttacccagcccgctccagcagtgcgggagattgtaaggaagcggtggcggctggtgaagcaagtctcacatgtcggtgttcttggccaatggatacaaagataaagaaaatgttgcctttttctaggaactgtcagaaatcctcatgcctttcaagacttctgtgaatgacttgaattttttattccctgcctagggtctgtgaacgaggcctgtctcttccctggggtttctttccatggcctttatttctcctcttccagtgggagttttgcaggctcttctctgtggaaacttcacgagcgttggctgggcctcggcttcgctggagtgtactccagggtgaaggcagagtgggatttgagacccaggtagtggaggaagcgaaggaagtgaacgctgaatgtgacgcatttctgaagagctcagctgtcaccgggcatagcctggaagccccaagtctgttctgactttgcctggctgtctccttgacccgcctcctagatcattgtccttgatgtccaggctgggtcatttaaaatagagatgcaatcaagaaagttgggggacttgggactgtggctgattt

SEQ ID NO: 22154 - DNA, 902 bp, Homo Sapiens
gcacgaggacattgtgtctaatttatttcactcaacattatgtttgtaagagatgttcaaattgtgtctgtaataataatttggtgttgcccattttaaaatgtgatagcaactgtcataaataacttctaaaaagtgatattttacttcaatttttgcaagtcctagaagtccactcaatctttctgtaattcttaaaacagtatttcataatctttaattttgttattaacaaggggatatagtcagcaggctcagtgaataggtagttctatgtgaaaaggatgtaattaacatttttctgtgatatatggaatctttatacctttttaaaatattgataaaaacatttgagtttttaataagtctttttacataaaatgtggacagatgaaatatatattgtttatttacaaaatattatttagaatttgtgtgctttttctctaaaacagttaatctctaagcctgtacattctgcaacaaagatttacaatccttttcttttttgttaggaggaataaacatggtgtgtctcgaaagaagattgctcagatgttggatcgttatgaatatcaaatgtccatttctattgtaatgaattcagtggaaccatcacacaaaagcacacaaagacctcctcctccacaggggagacagaggtggggaggctctcttggctcacataatcgtgtctgtgtcacaaataatcattaaattagctattttcagctaacacatttgttgttgcacttgaaaaagagttagtgagcctgtcttggagtttaagtagtttcaaataaaaaaaggctacagtgcctcacaaaggatgttcccagcaagttgtttaaattcccagcaagttgttaaagtgtaaataaaaatatatgaaattgtatttt

SEQ ID NO: 22155 - DNA, 1722 bp, Homo Sapiens
gcacgaggtgggcttttagtccctccagacctcggctttagtgctgtctccgcttttctttcaccttcacagaggttcgtgtcttcctaaaagaaggttttattgggaggtaaaggtcaatgcgtaggggtagagtaagatgtcttatggtgaaattgaaggtaaattcttgggacctagagaagaagtaacgagtgagccacgctgtaaaaaattgaagtcaaccacagagtcgtatgtttttcacaatcatagtaatgctgattttcacagaatccaagagaaaactggaaatgattgggtccctgtgaccatcattgatgtcagaggacatagttatttgcaggagaacaaaatcaaaactacagatttgcatagacctttgcatgatgagatgcctggtaatagaccagatgttattgaatccattgattcacaggttttacaggaagcacgtcctccattagtatccgcagacgatgagatatatagcacaagtaaagcatttataggacccatttacaaaccccctgagaaaaagaaacgtaatgaagggaggaatgaggcacatgttctaaatggtataaatgacagaggaggacaaaaagagaaacagaaatttaactctgaaaaatcagagattgacaatgaattattccagttttacaaagaaattgaagagcttgaaaaggaaaaagatggttttgagaacagttgtaaagaatctgaacccttctcaggaacaatttgttccattttatgagggtcataataatggtctcttaaaacctgatgaagaaaagaaagatcttagtaataaagctatgccatcacattgtgattatcagcagaacttggggaatgagccagacaaatatccctgtaatggacaagtaatacctacattttgtgacacttcatttacttctttcaggcctgaatggcagtcagtatatccttttatagtgccctatggtccccctcttcccagtttgaactatcatttaaacattcagagattcagtggtccaccaaatccaccatcaaatattttccaagcccaagatgactctcagatacaaaatggatattatgtaaataattgtcatgttaactggaattgcatgacttttgatcagaacaatgaatatactgactgtatggagaataggagtagtgttcatccctctggaaatggctgcagtatgcaagatcgatatgtgagtaatggtttctgtgaagtcagagaaagatgctggaaagatcattgtatggacaagcataatggaacagacaggtttgtgaaccagcagtttcaagaggaaaagttaaataaattgcagaagttacttattcttttaagaggtctgcctggttctgggaaaacaacattgtctcgaattctgcttggtcagaatcgtgatggcattgtgttcagcactgatgactattttcaccatcaagatgggtacaggtataatgttaatcaacttggtgatgcccatgactggaaccagaacagagcaaaacaagctatcgatcagggaagatctccagttataatagataacactaatatacaagcttggggaaatgaagccatatgtggaagtggccataggaaaaggatacagagtagagtttcatgaacctgaaacttggtggaaatttgatcctgaagaattagaaaagaggaataaacatggtgtgtcttcgaaagaa

SEQ ID NO: 22156 - DNA, 893 bp, Homo Sapiens
gcacgaggtgtagatttaagtgtaaagtgatttgaaatctgaaatctttgtaagattattcagctcttgtgctggtctgttcatgatatactttcaggtaagtatcagaaatccatttaataacctttcctgtgtgatttatttcacttggttatatttatttctgatggtttatttctgatggttatagattttgtaaatggcacctttatgatttcttttattaacagaattctgcttggtcagaatcgtgatggcattgtgttcagcactgatgactattttcaccatcaagatgggtacaggtataatgttaatcaacttggtgatgcccatgactggaaccagaacagaggtttgttttgggctaagtgtcccaggatagaatatttggctaggagtcaaaagacctagattttattttcagcttaggtttttaccagctgaatgactgtaggcaagccgtttaaatagctttgagacctaatttctccatctgttagaggtggtgataattatacttgccctacctgatcagggtttttgtgaaaagcagagaatttagataaaacgctttgtaaactgtaaatagtttatcagtataagctggtaaaataatagcagcatgggatattttaagaggctttattttatacttgatgagtaaattcagagaactttgaatctgtaccattgttatgtagtcccaaagttatttccccgagaatatgctaatgttttccaaggcttaatatactggttgtgaatattaaagtttttctcattgatattgctctacaagaaactacttaatacattttttagcggacatgggtcatttctgttatcattataggggttcttacctgggctaacttttgaatttcttgggg

SEQ ID NO: 22157 - DNA, 1231 bp, Homo Sapiens
gcacgagggctttcgggcaccccctattctccccccacatctcctccaggtcatcctgaacaaggacacggggatttcctgtgatccagctttgcttcctgagcccaatcacgtcatgctgaaccacctatacgcgctgtctatcaaggatggagtgatggtgctcagcgcaacccaccggtacaagaagaagtacgtcaccaccttgttatacaagcccatatgaagagctgggggcggatggtggcccaggagacagcacaccaccaggctccacacgtgcatgctttccccaagagggaatggactgtacattgctcatttcacactcttcagaagacatttcatacctgccctggtcctgcttgaaggtttgtccaggcagagcagctcctgcagcgcctcggtctgtgacagtcctcctagcacccccatggctttgagcctcggggactcatcaagtccaagaaaagagggaggggtggcagaggatctgcagccctggccccgcggtgcatgaggctgggtgcagttctaaacctacattctcgatttttcttaagccaaaaatgaatgctaactcctttgccagtaaaattctgggaaacagggactgaggccacacatcatttccagtcatctgtgtgtttttaaggccagccacttgtccctgttgaggcctggctatggaactaaatacagtgttggtcttgcctgtccttcaaaatcaacaacagattgtctctcggctccagggaggtgtcatttctatagaaattagaagctttctgatttctagatgaggttttacaattgtttcttacagtcatgtgcactaagtactctttttgtaagcagaggtggctggctctgcagccttaaggccattttttaagtcaccacgtctagaagtcacatgaactctgctcagcaataatctgttctcagaacagacttttcaacctgctgccggatttctccattcagctggatgatcctcaggactgaccagttagctggcaggttgtccagctttttattccagtcataataggtgacagtgttaaccgtgaaaacttgagaggcactctgccctcttccctataaaatcacacagcgtgattttacaaggtcccgtggcaccttgctcagacctctgcccctagttagcaagactgcagcagttgctgttgcttattctgaaaggaatgtagaacttgacagcagccct

SEQ ID NO: 22158 - DNA, 413 bp, Homo Sapiens
aatcccccgggctgcaggaattcggcacgaggccttgctcaggacctctgcccctagttagcaagactgcagcagttgctgttgcttattctgaaaggaatgtagaacttgacagcagccttctgagtctgggtcaggaagatgtcctttggaccaaagcagacttctttatacgcagctcagtttcccgggagtcgccacagatgtacccactagcccaggttgctgtgagtcagcggaagctcccgttatgccctttgctcctggtgggagagggaggagtgagctccctgggttccagtatttacttggtatacctgagtttgggggtacccttttttgtgacttttcaaaacagtgaattactgtcaccttgatggacaagtttcaataaaactttgtaaaaataaaaa

SEQ ID NO: 22159 - DNA, 767 bp, Homo Sapiens
gcacgagggagaagacggccgagcacttccaggaggccatggaggagagcaagacacacttccgcgccgtggaccctgacggggacggtcacgtgtcttgggacgagtataaggtgaagtttttggcgagtaaaggccatagcgagaaggaggttgccgacgccatcaggctcaacgaggaactcaaagtggacgaggaaacacaggaagtcctggagaacctgaaggaccgctggtaccaggcggacagcccccctgccgcccgccaccggccgaccgaccgcggctgccccagttgatgagcggcgtgtcccctctgcagcgcgcaccccggcggggctttggctgtgacgcggtcggggcgcggggctgggctgtggccccgcggcgccgcctcctccctggtccctcgaaatcgtggcatctcacttctgagaacgaaatctcgcttcagtcactctgccgaaggcgctgacggcatcgcggccggaacctctgggcccggcccctcccagggccgccgctccgtgggaaaaaacagctcctccatttccttgaaaactgaacgattattaaaaatagattaaacttcgctggaaatgagtagccaggaagttcaggggagggtgccgggtccttcccgggcctggcgtgtcggagccacccaggtcccgcagctgccgctgagaaaatgcaatatttgttgtgacaagaatcacatacatttactttaaatatagttgccttttttggtcagcttcaaaaaa

SEQ ID NO: 22160 - DNA, 879 bp, Homo Sapiens
ggctgcaggaattcggcacgaggtttccctctttttttgaccaaaaaaggcaactatatttaaagtaaatgtatgtgattcttgtcacaacaaatatttgcattttctcagcggcagctgcgggacctgggtggctccgacacgccaggcccgggaaggacccggcaccctcccctgaacttcctggctactcatttccagcgaagtttaatctatttttaataatcgttcagttttcaaggaaatggaggagctgttttttcccacggagcggcggccctgggaggggccgggcccagaggttccggccgcgatgccgtcagcgccttcggcagagtgactgaagcgagatttcgttctcaaaagtgagatgccacgatttcgagggaccagggaggaggcggcgccgcggggccacagcccagccccgcgccccgaccgcgtcacagccaaagccccgccggggtgcgcgctgcagaggggacacgccgctcatcaactggggcagccgcggtcggtcggccggtggcgggcggcagggaagaggtggggtccgggacagccacggagcccggagtcacccgcgaggccgccccggtggtgcgtggggggcggcgcggggcgcggccgggcgctcaaaactcctcgtgcacgctgcgcgcgtagtccaccagcttgctgcccgtgaagaactcgctgtacttgagcacctcctcgggctccaggtggtggttctggttctcgtcggcgacagcgatcatctgcttggcctcgttcagcgcggtgtactcgttcatggggtccatgtagctctccagctcctccggcgtcacgatgccgtcgtggttgaagtcaatgagctcctcaaacttctttttt

SEQ ID NO: 22161 - DNA, 685 bp, Homo Sapiens
gcacgagggcaagtcccatgaagctgaggtcttgaagcagctggctgagaaacgagagcacgagaaagaagtgcttcagaaggcaatagaagagaacaacaacttcagtaaaatggcagaagagaaactgacccacaaaatggaagctaataaagagaaccgagaggcacaaatggctgccaaactggaacgtttgcgagagaaggataagcacattgaagaagtgcggaagaacaaagaatccaaagaccctgctgactttctccccatccccttcctaaatatccaaagactgtactggccagtgtcattttattttttccctcctgacaaatattttagaagctaatgtaggactgtataggtagatccagatccagactgtaagatgttgttttaggggctaaaggggagaaactgaaagtgttttactctttttctaaagtgttggtctttctaatgtagctatttttcttgttgcatcttttctacttcagtacacttggtgtactgggttaatggctagtactgtattggctctgtgaaaacatatttgtgaaaagagtatgtagtggcttcttttgaactgttagatgctgaatatctgttcacttttcaatcccaattctgtcccaatcttaccagatgctactggacttgaatggttaataaaactgcacagtgc

SEQ ID NO: 22162 - DNA, 824 bp, Homo Sapiens
gcacgagggcggctcggactgagcaggactttccttatcccagttgattgtgcagaatacactgcctgtcgcttgtcttctattcaccatggcttcttctgatatccaggtgaaagaactggagaagcgtgcctcaggccaggcttttgagctgattctcagccctcggtcaaaagaatctgttccagaattccccctttcccctccaaagaagaaggatctttccctggaggaaattcagaagaaattagaagctgcagaagaaagacgcaagtcccatgaagctgaggtcttgaagcagctggctgagaaacgagagcacgagaaagaagtgcttcagaaggcaatagaagagaacaacaacttcagtaaaatggcagaagagaaactgacccacaaaatggaagctaataaagagaaccgagaggcacaaatggctgccaaactggaacgtttgcgagagaaggataagcacattgaagaagtgcggaagaacaaagaatccaaagaccctgctgacgagactgaagctgactaatttgttctgagaaactgaaagtgttttactctttttctaaagtgttggtctttctaatgtagctatttttcttgttgcatcttttctacttcagtacacttggtgtactgggttaatggctagtactgtattggctctgtgaaaacatatttgtgaaaagagtatgtagtggcttcttttgaactgttagatgctgaatatctgttcacttttcaatcccaattctgtcccaatcttaccagatgctactggacttgaatggttaataaaactgcacagtgctgtt

SEQ ID NO: 22163 - DNA, 1401 bp, Homo Sapiens
  misc_feature (1168)..(1176): n is a, c, g, or t
cccacaaatgtagggattttattgacaagtgatattttcttacagaaataaatataatgcagtcttcttaaaattcagtttggagttgaaaaggcagtgtacccttgatggaaacagtcaaacgggtggtaccatcttcttcaaaactgcatctaaaaggctgtgctggctgggaatcatacagctgtgggcaacaactgcatcacccccaaggtttccctccaaaccaaaaggtgattcatggcccctggttaatatcaccctaggttctcccctgtcccagttttaacataatatttcataaaaatactagtgccataaaaagtcaatatttcaaatataaaaattattttatacaaatgtaattcataatcattcttttaaaatacagcattgttatatatgtttgaaacattattaaaataaatatttcctaaagaaaaaatttggctcccaaattgggcttcttcagtgtgcctctcattctctcttagtgtagacgcatgaagtacatacatctagccttgaaaactaccaccatcaacctatacatctaaatgcttggacttcatgtgtgtctacccacagtgcccatggcctatctacttacacaccctctacctggagcttctgtggaaagaagggctgtcctgtgacaatttgcactaacatacttttccagctaaactctagttcaaaggtctgtgagcttgtcacttcttcatcaagggaaccatcctgtggtattctaatacttgcttggaaatgagatagttggaatgcttagcaaacaatatagttgtgtttctaaacatcatggggagaggagagaaaaaggaatacaagcttatataaaccgctgaagtttccagttatcattacttaatcataaccctaagaagtatgatttcagttcttctccaacactacaaattaacgagtttcactagacaataagctgatcaactaggctgattgacatttagagctgcctttccaattactagcacatggcaagggttttcaggaaaatctggcttgcaaaacacaagtggtaaatcttcaaggatttgaagtacctttcacacaatttgactattgccaggaagccatttatcaagacccatatcagtgtcctcaattccccttaccaaatgtttcttttttnnnnnnnnncttaattcatccttgttttctgaggcagaggtaactgttccacgagctccaattccatgaggtgactgtcccacgagctccaattccatgagcaaatgtcccatgtcaacatttatgctgctctctaaagccttgtatcttgcacctcttcttctgtctcctctttcagagcagcaatctggggcttagacttgcacttgcttgagttccggtggggcctcgtgc

SEQ ID NO: 22164 - DNA, 976 bp, Homo Sapiens
gcacgagggtcaaattgtgtgaaaggtacttcaaatccttgaagatttaccacttgtgttttgcaagccagattttcctgaaaacccttgccatgtgctagtaattggaaaggcagctctaaatgtcaatcagcctagttgatcagcttattgtctagtgaaactcgttaatttgtagtgttggagaagaactgaaatcatacttcttagggttatgattaagtaatgataactggaaacttcagcggtttatataagcttgtattcctttttctctcctctccccatgatgtttagaaacacaactatattgtttgctaagcattccaactatctcatttccaagcaagtattagaataccacaggaaccacaagactgcacatcaaaatatgccccattcaacatctagtgagcagtcaggaaagagaacttccagatcctggaaatcagggttagtattgtccaggtctaccaaaaatctcaatatttcagataatcacaatacatcccttacctgggaaagggctgttataatctttcacaggggacaggatggttcccttgatgaagaagttgatatgccttttcccaactccagaaagtgacaagctcacagacctttgaactagagtttagctggaaaagtatgttagtgcaaattgtcacaggacagcccttctttccacagaagctccaggtagagggtgtgtaagtagataggccatgggcactgtgggtagacacacatgaagtccaagcatttagatgtataggttgatggtggtatgttttcaggctagatgtatgtacttcatgctgtctacactaagagagaatgagagacacactgaagaagcaccaatcatgaattagttttatatgcttctgttttaattttgtgaagcaaattttttctctagggaaatatttattttaataatgtttcaaacatatatacatgctgtattttaaaa

SEQ ID NO: 22165 - DNA, 878 bp, Homo Sapiens
gcacgagggtaggttgtctgtttactctgtttaaatagtttctttagctatgcagaagctctttagtttaagtagatcccatttgtcaatttttgcttctgttgcaattgcttttagtgtcttcatcatgaaatctttgcccgtacctgtgtccagaatggtattggctagattttcttctagggtttttatagttttgggttttacatttaagtctttaatccatcttgagtttatttttgtatatagtttaaggaatgggtgcagtttcaattttctgcatatagctagccggttctcccagcaccatttattaaataggaaatcctttccccattgcttgtatttgtcaggtttgtcgaagatcagatagttgtaggtgtgcagttttatttctgggttctctattctgttccgttggtctatgtgtctgttttgtaccagtaccatgctgttttggttactgtagccctgtagtatagtttgaagtcaggtagtgtgatgcttagagggcacattttaaatagggtatttagagttatgatgtttcatttggtgctattgtcatgagaacattttctttaattgcatttcctaactgattattgcttgtacagaaaagctaaggtattcatgtgctaattttgtagccattcacattagtaaatgtcctggggaagtaccaatttgaaacattcctcagttaccaggtcataatgtgtttgtggtaaatttttactgtcttgtgacaaagtttcaatagtttactccaaacccaaatacaacagaaatagagaatctttcttttattgtatcattcaccaaagtgtctctgattcaacttagtaaatctactttatctttgtataaaacaaaga

SEQ ID NO: 22166 - DNA, 1066 bp, Homo Sapiens
gcacgagggtagccttgtagtatagtttgaagccaggtagcatgatgcctccagctttgttctttttgtttaggattgtcttggcaatgcgggctcttttttggttctatatgaactttaaagtggttttttccaactctgtgaagaaagtcattggtagcttgatggggatggcattgaatctgtaaattaccttgggcagtatggccattttcacgatattgattcttcctatccatgagcatggaatgttcttccatttgtttgtgtcctcttttatttccttgagcagtggtttgtagttctccttgaagaggtccttcacatcccttgtaagttggattcctaggtattttattcctttgtagcaattgagaatgggagttcactcatgatttggctctctgtttgtcttttactggtgtataagaatgcttgtgatttttgcactttgattttgtatcctgagactttgctgaaattgcttatcagcttaaggaaatttggggccgagatgatgtggttttctaaatatacaattatgtcatctgcaaacagggacggtttgactttctcttttcctaattgaataccctttatttccttctcctgcctaattgccctggccagaacttccaacactatgttgaatagatatggtgagagagggcgtccctgtcttgtgccggttttcaaagggaatgcttccagtttttgcccattcagtatgatattggctgggggtttgtcatagatagctctaagttcacttctttttaagagctccacaagtctgcttgtacgtagttatgtagatttacctgaatatttatcaattcatttgttttccattctttctcatgttatgtctcaggccttttataccagtttctttctgccacaaagacatccttagaatttagtttagtgatggtctggtgaagacaaattttctcattggttgtccaaaggaagattaattccaagtttgttcttgagaggtatttttgctggcatatgttcaatttgtcataatatttgtcaattgtaaactgttgtgcactta

SEQ ID NO: 22167 - DNA, 1101 bp, Homo Sapiens
cccgggctgcaggaattcggcacgaggggctctcctgtctctgcagctctacaggtgaggcccagcagagggagtagggctcgccatgtttctggtgagccaatttggctgatcttgggtgtctgaacagctattgggtccaccccagtccctttcagctgctgcttaatgccctgctctctccctggcccaccttatagagagcccaaagagctcctgtaagagggagaactctatctgtggtttataatcttgcacgaggcaccagagtctccctgggtcttgtgatgaactacatttatcccctttcctgccccaaccacaaactctttccttcaaagagggcctgcctggctccctccacccaactgcacccatgagactcggtccaagagtccattccccaggtgggagccaactgtcagggaggtctttcccaccaaacatctttcagctgctgggaggtgaccggctctgcttttaaagatatggctgcttcaaaggccagagtcacaggaaggacttcttccagggagattaatggtgatggagaggagagttaaaatgacctcatgtccttcttgtccacggttttgttgagttttcactcttctaatgcaagggtctcacactgtgaaccacttaggatgtgatcactttcaggtggccaggaatgttgaatgtctttggctcagttcatttaaaaaagatatctatttgaaagttctcacagttgtacatatgtttcacagtacaggatctgtacataaaagtttctttcctaaaccattcaccaagagccaatatctaggcattttcttggtagcacaaattttcttattgcttacaaaattgtcctccttgttatttctgtttgtaagacttaagtgagttaggtctttaaggaaagcaacgctcctctgaaatgcttgtcttttttctgttgccgaaatagctggtcctttttcgggagttagatgtatagagtgtttgtatgtaaacatttcttgtaggcatcaccatgaacaaagatatattttctatttatttattatatgtgcacttcaagaagtcactgtcagagaaataaagaattgtctt

SEQ ID NO: 22168 - DNA, 835 bp, Homo Sapiens
tcggcacgaggcccacgttgaaaagccccctgtcagggaggtctttcccaccaaacatctttcagctgctgggaggtgaccatagggctctgcttttaaagatatggctgcttcaaaggccagagtcacaggaaggacttcttccagggagattagtggtgatggagaggagagttaaaatgacctcatgtccttcttgtccacggttttgttgagttttcactcttctaatgcaagggtctcacactgtgaaccacttaggatgtgatcactttcaggtggccaggaatgttgaatgtctttggctcagttcatttaaaaaagatatctatttgaaagttctcagagttgtacatatgtttcacagtacaggatctgtacataaaagtttctttcctaaaccattcaccaagagccaatatctaggcattttcttggtagcacaaattttcttattgcttagaaaattgtcctccttgttatttctgtttgtaagacttaagtgagttaggtctttaaggaaagcaacgctcctctgaaatgcttgtcttttttctgttgccgaaatagctggtcctttttcgggagttagatgtatagagtgtttgtatgtaaacatttcttgtaggcatcaccatgaacaaagatatattttctatttatttattatatgtgcacttcaagaagtcactgtcagagaaataaagaattgtcttaaatgtcatgattggagatgtcctttgcattgcttggaaggggtgtacctagagccaaggaaattggctctggtttggaaaaattttgctgttattatagtaaacatacaaagggatgt

SEQ ID NO: 22169 - DNA, 395 bp, Homo Sapiens
gaattcggcacgagggacagctccagcaggggcacagaggattgggggcaggaggagtctggaacacagccttcatgccccctgaccccaggccgaccctccccacaccctagggtaccccagtcgtatcctctgtccgcatgtgtggccaggcctgacaaacacctgcagatggctgctgcccctggggtggtgtttctcctctagggtattgggatgcatgttctgcactgccagcagagagggtgtgtctgggggccaccacctatgggacacggggtcgaaggggcctgtacactctgtcatttcctttctagcccctgcatctccaacaagtccaaggtgacagctggtgctaggggcgtggggttaataaatggcttatccttctctcc

SEQ ID NO: 22170 - DNA, 823 bp, Homo Sapiens
gcacgaggcttgggtctgtcccgggtggacgacgccgtggctgccaagcacccgggactcggggagtatgccgcatgccagtcacacgccttcatgaagggcgttttcaccttcgtcacaggcaccggcatggcctttggcttgcagatgttcattcagaggaagtttccataccctttgcagtggagcctcctagtggccgtggttgcaggctctgtggtcagctacggggtgacgagagtggagtcggagaaatgcaacaacctctggctcttcctggagaccgggcagctccccaaagacaggagcacagatcagagaagctaggagagctccagcaggggcacagaggattgggggcaggaggagtctggaacacagccttcatgccccctgaccccaggccgaccctccccacaccctagggtaccccagtcgtatcctctgtccgcatgtgtggccaggcctgacaaacacctgcagatggctgctgccccaacctgggacctgcccaggaggttggagcagaaagggctctccctggggtggtgtttctcctctagggtattgggatgcatgttctgcactgccagcagagagggtgtgtctgggggccaccacctatgggacacggggtcgaaggggcctgtacactctgtcatttcctttctagcccctgcatctccaacaagtccaaggtgacagctggtgctaggggcgtggggttaataaatggcttatccttctctccacccaagtttccacctgaccaggtgaaaaacaaatcagaagggtaagatgatgataacataaaaacaaaaga

SEQ ID NO: 22171 - DNA, 976 bp, Homo Sapiens
gcacgagggtcctggtctgcgtggaggtcgacgactccgtcgcagactacggacctgtctgggtctcagccgccaaagaccccgtccggaagtactagccggacatcatgagtggctgtcgggtattcatcgggagactaaatccagcggccagggagaaggacgtggaaagattcttcaagggatatggacggataagagatattgatctgaaaagaggctttggttttgtggaatttgaggatccaagggatgcagatgatgctgtgtatgagcttgatggaaaagaactctgtagtgaaagggttactattgaacatgctagggctcggtcacgaggtggaagaggtagaggacgatactctgaccgttttagtagtcgcagacctcgaaatgatagacgaaatgctccacctgtaagaacagaaaatcgtcttatagttgagaatttatcctcaagagtcagctggcaggtttgttgaaatacagttttgagttattttgatgtggctttttaaaaaagttaatgggtagctaatgttgtattgttttattaaaagtagttttaaattaatggatttaatggaattgtaattttaaacatttaattaaatgtaatttgggggatattttgaactttaatattagtgatcaaatgtaaatgttttgaggatatttttcttgttttttaaaatcaatttttaaccaaatattaaaccctttatttgccagcctgtctgtgtcgttggccttatgacgaggagtgcctgtgggttatcctaatcgttgtcttggtcactcttggttgggcctggttgactttgccagtcagctcctacagtgatcagttggccacctctagatctgtgtttgccggtctagacgttatcggtgcacttccttgaagtgccaggttgcagcgatcccagagcgttgataacgtgatctgatccctaagttgagacctgtcttcctg

SEQ ID NO: 22172 - DNA, 992 bp, Homo Sapiens
gcacgagggtcagttgtggagtggcgtagacgagggttaagtcctggtctgcgtggaggtcgacgactccgtcgcagactacggacctgtctgggtctcagccgccaaagaccccgtccggtaggaagtactagccggacatcatgagtggctgtcgggtattcatcgggagactaaatccagcggccagggagaaggacgtggaaagattcttcaagggatatggacggataagagatattgatctgaaaagaggctttggttttgtggaatttgaggatccaagggatgcagatgatgctgtgtatgagcttgatggaaaagaactctgtagtgaaagggttactattgaacatgctagggctcggtcacgaggtggaagaggtagaggacgatactctgaccgttttagtagtcgcagacctcgaaatgatagacgaaatgctccacctgtaagaacagaaaatcgtcttatagttgagaatttatcctcaagagtcagctggcaggatctcaaagatttcatgagacaagctggggaagtaacgtttgcggatgcacaccgacctaaattaaatgaaggggtggttgagtttgcctcttatggtgacttaaagaatgctattgaaaaactttctggaaaggaaataaatgggagaaaaataaaattaattgaaggcagcaaaaggcacagtaggtcaagaagcaggtctcgatcccggaccagaagttcctctaggtctcgtagccgatcccgttcccgtagtcgcaaatcttacagccggtcaagaagcaggagcaggagccggagccggagcaagtcccgttctgttagtaggtctcccgtgcctgagaagagccagaaacgtgtttcttcagtagatctaatctccagcatctgtggatcgccagaggtcccggtcccgatcaggtcagatcagtgacagtgccattaaactgtaaataactggccctggggtccttttttaaaa

SEQ ID NO: 22173 - DNA, 465 bp, Homo Sapiens
gcacgaggtaacaacttccggcagcagatggagaattacccgaaaaacaaccacactgcttcgatcctggacaggatgcaggcagattttaagtgctgtggggctgctaactacacagattgggagaaaatcccttccatgtcgaagaaccgagtccccgactcctgctgcattaatgttactgtgggctgtgggattaatttcaacgagaaggcgatccataaggagggctgtgtggagaagattgggggctggctgaggaaaaatgtgctggtggtagctgcagcagcccttggaattgcttttgtcgaggttttgggaattgtctttgcctgctgcctcgtgaagagtatcagaagtggctacgaggtgatgtaggggtctggtctcctcagcctcctcatctgggggagtggaatagtatcctccaggtttttcaattaaacggattattttttcagaccg

SEQ ID NO: 22174 - DNA, 890 bp, Homo Sapiens
cggcacgaggcggcgggagaggaacgcgcagccagccttgggaagcccaggcccggcagccatggcggtggaaggaggaatgaaatgtgtgaagttcttgctctacgtcctcctgctggccttttgcgcctgtgcagtgggactgattgccgtgggtgtcggggcacagcttgtcctgagtcagaccataatccagggggctacccctggctctctgttgccagtggtcatcatcgcagtgggtgtcttcctcttcctggtggcttttgtgggctgctgcggggcctgcaaggagaactattgtcttatgatcacgtttgccatctttctgtctcttatcatgttggtggaggtggccgcagccattgctggctatgtgtttagagataaggtgatgtcagagtttaataacaacttccggcagcagatggagaattacccgaaaaacaaccacactgcttcgatcctggacaggatgcaggcagattttaagtgctgtggggctgctaactacacagattgggagaaaatcccttccatgtcgaagaaccgagtccccgactcctgctgcattaatgttactgtgggctgtgggattaatttcaacgagaaggcgatccataaggagggctgtgtggagaagattgggggctggctgaggaaaaatgtgctggtggtagctgcagcagcccttggaattgcttttgtcgaggttttgggaattgtctttgcctgctgcctcgtgaagagtatcagaagtggctacgaggtgatgtaggggtctggtctcctcagcctcctcatctgggggagtggaatagtatcctccaggtttttcaattaaacggattattttttcagaccgaaaagagatggtctgagtttgtctt

SEQ ID NO: 22175 - DNA, 1150 bp, Homo Sapiens
agtggtcgttgtctttctaggtctcagccggtcgtcgcgacgttcgcccgctcgctctgaggctccatcctcaagaaggtgttggaggcactcaaggacctcatcaacgaggcctgctgggatattagctccagcggtgtaaacctgcagagcatggactcgtcccacgtctctttggtgcagctcaccctgcggtctgagggcttcgacacctaccgctgcgaccgcaacctggccatgggcgtgaacctcaccagtatgtccaaaatactaaaatgcgccggcaatgaagatatcattacactaagggccgaagataacgcggataccttggcgctagtatttgaagcaccaaaccaggagaaagtttcagactatgaaatgaagttgatggatttagatgttgaacaacttggaattccagaacaggagtacagctgtgtagtaaagatgccttctggtgaatttgcacgtatatgccgagatctcagccatattggagatgctgttgtaatttcctgtgcaaaagacggagtgaaattttctgcaagtggagaacttggaaatggaaacattaaattgtcacagacaagtaatgtcgataaagaggaggaagctgttaccatagagatgaatgaaccagttcaactaacttttgcactgaggtacctgaacttctttacaaaagccactccactctcttcaacggtgacactcagtatgtctgcagatgtaccccttgttgtagagtataaaattgcggatatgggacacttaaaatactacttggctcccaagatcgaggatgaagaaggatcttaggcattcttaaaattcaagaaaataaaactaagctctttgagaactgcttctaagatgccagcatatactgaagtcttttctgtcaccaaatttgtacctctaagtacatatgtagatattgttttctgtaaataacctatttttttctctattctctgcaatttgtttaaagaataaagtccaaagtcagatctggtctagttaacctagaagtatttttgtctcttagaaatacttgtgatttttataatacaaaagggtcttgactctaaatgcagttttaagaattgtttttgaatttaaataaagttacttgaattcctcgtgc

SEQ ID NO: 22176 - DNA, 667 bp, Homo Sapiens
gcggttgactttaaatgctttataatgcccttgcgagaaatgtggcagcctgtcatcctacttagtggcaggagattgtttctatccagaagggacactgctggtggtattttagtataaatactgccagatgcgtcccaaaacgtctgcattaataatggcatcctccagcagtccgcttaccctccaccagttctgagacggcctgatgggtgagagtggtaaccccttctaaccgcgttcgaaatacagcccttcagcagacggcgttgattttaaagcatgtgtctcctgtcttctagtatgtccaaaatactaaaatgcgccggcaatgaagatatcattacactaagggccgaagataacgcggataccttggcgctagtatttgaagcaccaagtaagtcgtacctttttaccgagtcacgaagctacagaaaatcaaaactctgtgtcagtatttctcaaaagcatctgctttcttttggtagaccaggagaaagtttcagactatgaaatgaagttgatggatttagatgttgaacaacttggaattccagaacaggagtacagctgtgtagtaaagatgcccttctggtgattttgcacgtatatgccgagatctcagccatattggagatgctgtgtaattccctgtgcaaagacg

SEQ ID NO: 22177 - DNA, 1060 bp, Homo Sapiens
gcacgagggaggacctggtccagacaagatgtgaaatggagaagtatctgacacctcagcttcctccagttcctataattccagagcataaaaagtatagacgagacagtgcctcagtcgtagaccagttcttcactgacactgaagggttaccttacagtatcaacatgaacgtcttcctccctgacatcactcacctgagaactggcctctacaaatcccagagaccgtgcgtaacacacatcaagacagaacctgttgccattttcagccaccagagtgaaacgactgcccctcctccggccccgacccaggccctccctgagttcaccagtatattcagctcacaccagaccgcagctccagaggtgaacaatattttcatcaaacaagaacttcctacaccagatcttcatctttctgtccctacccagcagggccacctgtaccagctactgaatacaccggatctagatatgcccagttctacaaatcagacagcagcaatggacactcttaatgtttctatgtcagctgccatggcaggccttaacacacacacctctgctgttccgcagactgcagtgaaacaattccagggcatgcccccttgcacatacacaatgccaagtcagtttcttccacaacaggccacttactttcccccgtcaccaccaagctcagagcctggaagtccagatagacaagcagagatgctccagaatttaaccccacctccatcctatgctgctacaattgcttctaaactggcaattcacaatccaaatttacccaccaccctgccagttaactcacaaaaacatccacctgtcaaatacaatagaaggagtaaccccgatttggagaaacgacgcatccactactgcgattaccctggttgcacaaaagtttatacaaagtcttctcatttaaaagctcacctgaggactcacactggtgaaaagccatacaagtgtacctgggaaggctgcgactggaaggttcgcgcgatcggatgagctgacccgccactaccggaagcacacaggcgccaagccct

SEQ ID NO: 22178 - DNA, 405 bp, Homo Sapiens
  misc_feature (306)..(337): n is a, c, g, or t
aactcctttaaaaaccccgggctgcaggaattcggcacgaggtgaggactcacactggtgaaaagccatacaagtgtacctgggaaggctgcgactggaggttcgcgcgatcggatgagctgacccgccactaccggaagcacacaggcgccaagcccttccagtgcggggtgtgcaaccgcagcttctcgcgctctgaccacctggccctgcatatgaagaggcaccagaactgagcactgcccgtgtgacccgttccaggtcccctgggctccctcaaatgacagacctaactattcctgtgtnnnnnnnnnnnnnnnnnnnnnnnnnnnnnnnnccacaactaaaactggaaatgtatattttgtatatttgagaaaacagggaatacattgtattaatacc

SEQ ID NO: 22179 - DNA, 648 bp, Homo Sapiens
ccccgggctgcagggtgctgggtgcaccaaccccctcagcggacttggtggcacaaaatacatctcctttgaggaacggcagtggcataacgactgctttaactgtaagaagtgctccctctcactggtggggcgtggcttcctcacagagagggacgacatcctgtgccccgactgtgggaaagacatctgaattcaacacagagaagttgctgcttgtgatctcacacacagatttttatgttttctttctcacccaggcaatcttgccttctggtttcttccagccacattgagactttcttctagtgcttttcagtgatactcacgtttgcttaaaccctttagtgctttgtgatagttcagtcccagggaaagagaaaactcgccctaggccctaggtgggaagatggtttgaaatttttgtaatcgagtaaggcacacccaaatgtaaaaatccttttgaatgatgcctttataaatctttctctcactgtctatttaagtgcaattaacatatgtcacgaacttgaaagttttctaaactcaataaggtaatgaccagttgttatttacagctctgtaacctcccgttgcgtcaagtctaaaccaagattatgtgacttgcaataaagttattcagaacag

SEQ ID NO: 22180 - DNA, 950 bp, Homo Sapiens
gcacgaggccccggcccgctgcggtgccgtgagtacctccaaccccctgcgccccggagggaggccgaggggcttagccaccagggctcggaagtgggggccgaatccggtgcgagacccaaggagaggggagcagagccggagttggggagactgtggctgagaactgtgtcttcctggagactaggctggcattttgactttggggttgctgaaaagccaggagtcaaaatgactgagcgctttgactgccaccattgcaacgaatctctctttggcaagaagtacatcctgcgggaggagagcccctactgcgtggtgtgctttgagaccctgttcgccaacacctgcgaggagtgtgggaagcccatcggctgtgactgcaaggtacccgcaagatggagtacaagggcagcagctggcatgagacctgcttcatctgccaccgctgccagcagccaattggaaccaagagtttcatccccaaagacaatcagaatttctgtgtgccctgctatgagaaacaacatgccatgcagtgcgttcagtgcaaaaagcccatcaccacgggaggggtcacttaccgggagcagccctggcacaaggagtgcttcgtgtgcaccgcctgcaggaagcagctgtctgggcagcgcttcacagctcgcgatgactttgcctactgcctgaactgcttctgtgacttgtatgccaagaagtgtgctgggtgcaccaaccccatcagcggacttggtggcacaaaatacatctcctttgaggaacggcagtgggcataacgactgctttaactgtaagaagtgctccctctcactggtggggcgtggcttcctcacagagagggacgacatccttgtgccccgactgtgggaaagacatctgaatcaacacagagaagttgctgcttgtgatctcccacacgaatttttatgttt

SEQ ID NO: 22181 - DNA, 1168 bp, Homo Sapiens
atttataaccgtttttctttattctacttagtggggcacccagaaacttccctgggggaaatgcttgttcaaatagagaacacgcagaagatgcacttcaccggcctcctctggctgctgagcccgtactctctctttggctcaggctaggcctcttcttctccttggacttaacgtggcttaggtccctgagtcggccaagacctcccagaggagacctgcccagctgccaccaccaccattattgattggcttcccggtactggtgcagcaggtcactgacatctgtactttctactttcacccaaccatcttccttcatgtggtacatattgacaacgcctccagaatagctgtctctgtgagtggcataagcaatagccctgcggccaaggtcataggcctcttcagggctaagattaggccgatagccactgtccatgaccccgtaggcataagtgttcccactacccgtggagaacatatttcctgagagccgagtcccatgttcatccacgtagtagagtccaggacccttcttatcccagccacagatcatactgcccatagagaggcccatgccccggtactggcacatcatgttggacagcagcttggaggctgccgacactgaaatacgttctccatttcgcagatagtacagcctgcattccttggccagcaggcgctcccagtactgacagtctgctgcacagccagacatggtgccaagcaggtaagggttaatctcaatcaccttgttcacccgtaaggcactaatgtaggacccagctgaggcccgagaatccactgctgcaatcactccatgctggaacttgaaggcgagcgtggtggtgccatgggccatctcaatctgaacgttcctttctccgtccccacccagggactggaagaattctgtgggctccaggcccgggcatccgctggaaacaggggtgggtagggtcgtgtcatctaaaggcgcagcttcaaccagaagactagaagtcagccaggagctgggagtagtgtcacgcggggtgggggttcctatgagcatcactttacaaaaccaggagggacggaagtgcgagggggcagagtcttggaaacaggtcctgggccaactgcaacagaatatacccgccgcgtgtaggggaaggccgga

SEQ ID NO: 22182 - DNA, 918 bp, Homo Sapiens
cgcacgaggtctgggtgctgggcggtcatggcgctactagatgtatgcggagccccccgagggcagcggccggaatcggctctcccggttgcgggaagcgggcgtcgctcggacccaggacactacagtttctctatgcgatctccagagctcgctttaccccggggaatgcagcccacagaattcttccagtccctgggtggggacggagaaaggaacgttcagattgagatggcccatggcaccaccacgctcgccttcaagttccagcatggagtgattgcagcagtggattctcgggcctcagctgggtcctacattagtgccttacgggtgaacaaggtgattgagattaacccttacctgcttggcaccatgtctggctgtgcagcagactgtcagtactgggagcgcctgctggccaaggaatgcaggctgtactatctgcgaaatggagaacgtatttcagtgtcggcagcctccaagctgctgtccaacatgatgtgccagtaccggggcatgggcctctctatgggcagtatgatctgtggctgggataagaagggtcctggactctactacgtggatgaacatgggactcggctctcaggaaatatgttctccacgggtagtgggaacacttatgcctacggggtcatggacagtggctatcggcctaatcttagccctgaagaggcctatgaccttggccgcagggctattgcttatgccactcacagagacagctattctggaggcgttgtcaatatgtaccacatgaaggaagatggttgggtgaaagtaaaagtacagatgtcagtgacctgctgcacccgtaccgggaaccaatcaataatggtggtggtgggcagctgggcagtctcctctgggaggtcttggcccaactcagggacctaa

SEQ ID NO: 22183 - DNA, 1356 bp, Homo Sapiens
  misc_feature (339)..(350): n is a, c, g, or t
  misc_feature (1044)..(1070): n is a, c, g, or t
gactttgaaaaaatctgattttattttctcaatcaaaatgaagtacttcatgttaatttagactgtttagctttccactgatatctcaagatactttccagatattaacagtactcagaactgtgtaaaagttaaccaccaaaaccatgttttaaagaaaaaagtttaaatgtaagactaatgtcttggggactttactaaatgtatttctaaaaaaacccttctcaaatgtagaagtattggcaattctaatttaaaaattttaaatttttaattattggaaatttaagtagcaatagtttcaagagctaagaatcagattgctttttaaaacagaannnnnnnnnnnncctgagggactcatacttgacaactccagttaaacataatactccacccaaatcccaaatttaaatgcattatgtcaccctggaatagtaaaattataaaatggtatttctaaattataatatatatacataatgcaccattttaactgtcacatttaccagcagaattatgaaatcaaaaacaaattctacattcagggacaaacgataaatgctctttcattgttttaagagtccattccattctttgttgttttctactcccatattttaaaattatgaccaaaggagcctgaaggccaagtcaatcccatttccctgaacccaactgccagtaggtacgggccctacatacgcgtcctttaacaagccccgttctcaaaaggctgggggtatttatgtaagaacttattccaaagtgactctaagatccatgttcccaagatctagtacgggctattcatggttctgaggcatgtccagcatgcaggcaaacttatctgttcaaattgaggtaaaacagacaaaaaacacttaatattaacagaagctacataattaaaactaaccttctgctgcttatttaagctaatgatgtattcttaccaaacagagaccctcaagtcaatcatttcttttgattttagttaccacccccaaattaagcctcttctttcaaagccattattagttnnnnnnnnnnnnnnnnnnnnnnnnnnntattttttccagaacttgtattttgtaattagtgtgatgcaatttctttttatttttcaaacttagaaataactcatgtatggtactatttggtatttttttcagataccaaggaataccgacaggattcataaataggattttctgacactggcaggaaagtctgctaacgtttacaaaataccaaagactcttctttcaagcttcaaagatggctgagaattaacagttatgattagtttttcagtacaaataaaaaaattaaatcttgattttttcctcgtgc

SEQ ID NO: 22184 - DNA, 2215 bp, Homo Sapiens
  misc_feature (84)..(96): n is a, c, g, or t
  misc_feature (1891)..(1902): n is a, c, g, or t
gcacgaggcctattttcactttactgctctaatgctgctagtcgtagtctttagcacactaggtggtatgcctttattagcatnnnnnnnnnnnnnctttaacaggagcttttacatattactgggatggggggtggttcgggatgggtgggcagctgctgaaccctttagggcatttcctctgtaatgtggcgctttcaactgtactgctgcagctttaagtaccttaaagcttctcctgtgaacttcttagggaaatgttaggttcagaactaaagtgttttgggtgggttttgttgcgggggggagggtaacaatgggtggtcttctgatttttatttttgaggttttgtcaactggagtacgtagaggaactttatttacagtactttgatttggcaggttttcttctacttgtgctctgcctggagctgtttccatatgatataaaaagcaagtgtagtattccattactatgtggcttagggatttatttgttttttaaaatcaaccatgttagctgggattagactccctacagtccttcaatggaaaagtaacatttaaaaatcctttgggtaattcaaattacagatttaaaagagcttaagatctggtgttttgttaatgcttctgtttattccagaagcattaaggtaacccattgccaagtatcattcttgcaaattattcttttatataactgaccagtgcttaataaaacaagcaggtacttacaaataattactggcagtaggttataattggtggtttaaaaataacattggaatacaggacttgttgccaattgggtaattttcattagttgttttgtttgttttgatttgaaacctggaaatacagtaaaatttgactgtttaaaatgttggccaaaaaaatcaagatttaatttttttatttgtactgaaaaactaatcataactgttaattctcagccatctttgaagcttgaaagaagagtctttggtattttgtaaacgttagcagactttcctgccagtgtcagaaaatcctatttatgaatcctgtcggtattccttggtatctgaaaaaaataccaaatagtaccatacatgagttatttctaagtttgaaaagtaaaaagaaattgcatcacactaattacaaaatacaagttctggaaaaaatatttttcttcattttaaaacttttttaactaataatggctttgaaagaagaggcttaatttgggggtggtaactaaaatcaaaagaaatgattgacttgagggtctctgtttggtaagaatacatcattagcttaaataagcagcagaaggttagttttaattatgtagcttctgttaatattaagtgttttttgtctgttttacctcaatttgaacagataagtttgcctgcatgctggacatgcctcagaaccatgaatagcccgtactagatcttgggaacatggatcttagagtcactttggaataagttcttatataaatacccccagccttttgagaacggggcttgttaaaggacgcgtatgtagggcccgtacctactggcagttgggttcagggaaatgggattgacttggccttcaggctcctttggtcataattttaaaatatgggagtagaaaacaacaaagaatggaatggactcttaaaacaatgaaagagcatttatcgtttgtcccttgaatgtagaatttgtttttgatttcataattctgctggtaaatgtgacagttaaaatggtgcattatgtatatatattataatttagaaataccattttataattttactattccagggtgacataatgcatttaaatttgggatttgggtggagtattatgtttaactggagttgtcaagtatgagtccctcaggnnnnnnnnnnnnttctgttttaaaaagcaatctgattcttatctcttgaaactattgctacttaaatttccaataattaaaaatttaaaatttttaaattagaattgccaatacttctacatttgagaagggtttttttagaaatacatttagtaaagtccccaagacattagtcttacatttaaactttttttctttaaaacatggttttgggtggttaactttttacacaggtctgagtactgttaatatctggaaagtatctttgagatatcagtggaaagctaaacagtctaaattaacatgaaatacttcattttgattg

SEQ ID NO: 22185 - DNA, 921 bp, Homo Sapiens
gcacgaggcgcagccccagcgcggcggggccggcgtctcctggctgccgtcacttccggttctctgtcagtcgcgagcgaacgaccaagagggtgttcgactgctagagccgagcgaagcgatgcctaaatcaaaggaacttgtttcttcaagctcttctggcagtgattctgacagtgaggttgacaaaaagttaaagaggaaaaagcaagttgctccagaaaaacctgtaaagaaacaaaagacaggtgagacttcgagagccctgtcatcttctaaacagagcagcagcagcagagatgataacatgtttcagattgggaaaatgaggtacgttagtgttcgcgattttaaaggcaaagtgctaattgatattagagaatattggatggatcctgaaggtgaaatgaaaccaggaagaaaaggtatttctttaaatccagaacaatggagccagctgaaggaacagatttctgacattgatgatgcagtaagaaaactgtaaaattcgagccatataaataaaacctgtactgttctagttgttttaatctgtctttttacattggcttttgttttctaaatgttctccaagctattgtatgtttggattgcagaagaatttgtaagatgaatacttttttttaatgtgcattattaaaaatattgagtgaagctaattgtcaactttattaaggattactttgtctgcccaccacctagtgtaaaataaaatcaagtaatacaatcttaactgttgtggccttttttgatcataaaagttggtactgtttaaggccaaagtaacagtttttatagatcttttagtttcaactcagcttttacaataaaaggatttgtattgcattgagtttataaactttttggtttgtgaacttcatattttgatcttttctcttc

SEQ ID NO: 22186 - DNA, 972 bp, Homo Sapiens
  misc_feature (916)..(924): n is a, c, g, or t
gcacgagggtctcctggctgccgtcacttccggttctctgtcagtcgcgagcgaacgaccaagagggtgttcgactgctagagccgagcgaagcgatgcctaaatcaaaggaacttgtttcttcaagctcttctggcagtgattctgacagtgaggttgacaaaaagttaaagaggaaaaagcaagttgctccagaaaaacctgtaaagaaacaaaagacaggtgagacttcgagagccctgtcatcttctaaacagagcagcagcagcagagatgataacatgtttcagattgggaaaatgaggtacgttagtgttcgcgattttaaaggcaaagtgctaattgatattagagaatattggatggatcctgaaggtgaaatgaaaccaggaagaaaaggtatttctttaaatccagaacaatggcattctagacttgatgatactaagttttagcagacactagtaagtggtttgtatttaaccatactgatgaagcagacagattgaggcacagattttagtggctttgtggcaataaatagggcatggtgtgccttaggaaaagaatgtttataaagggaattataactgaaattaaaggaggcggcagtgaagaggaaataattctcttctatctaaatgatatacatatgatattttgagatttttataacagcagtggaacacaattctaggtagagtagaaaaaggaaagtttaaagacatataaaagattcttgttgacaaattatttttggtagcaaatctcaaatggttacctgctattaaggtctgccatattagagttttgcactattttgctaccaagtttgattcatacatctaaaacattttgtagttacttgtcaaggacttaatttgaaaatcatttgccaggccacatagtaatcaannnnnnnnnctatcagctattctgtggtatttctaaaacatttttaaaatgactttt

SEQ ID NO: 22187 - DNA, 812 bp, Homo Sapiens
gcacgaggcggcagaagagggggctagctagctgtctctgcggaccagggagacccccgcgcccccccggtgtgaggcggcctcacagggccgggtgggctggcgagccgacgcggcggcggaggaggctgtgaggagtgtgtggaacaggacccgggacagaggaaccatggctccgcagaacctgagcaccttttgcctgttgctgctatacctcatcggggcggtgattgccggacgagatttctataagatcttgggggtgcctcgaagtgcctctataaaggatattaaaaaggcctataggaaactagtgaatgaagaacgaacgctggaagtagaaatagagcctggggtgagagacggcatggagtacccctttattggagaaggtgagcctcacgtggatggggagcctggagatttacggttccgaatcaaagttgtcaagcacccaatatttgaaaggagaggagatgatttgtacacaaatgtgacaatctcattagttgagtcactggttggctttgagatggatattactcacttggatggtcacaaggtacatatttcccgggataagatcaccaggccaggagcgaagctatggaagaaaggggaagggctccccaactttgacaacaacaatatcaagggctctttgataatcacttttgatgtggattttccaaaagaacagttaacagaggaagcgagagaaggtatcaaacagctactgaaacaagggtcagtgcagaaggtatacaatggactgcaaggatattgagagtgaataaaattggactttgttt

SEQ ID NO: 22188 - DNA, 1131 bp, Homo Sapiens
gcacgaggagctagctgtctctgcggaccagggagacccccgcgcccccccggtgtgaggcggcctcacagggccgggtgggctggcgagccgacgcggcggcggaggaggctgtgaggagtgtgtggaacaggacccgggacagaggaaccatggctccgcagaacctgagcaccttttgcctgttgctgctatacctcatcggggcggtgattgccggacgagatttctataagatcttgggggtgcctcgaagtgcctctataaaggatattaaaaaggcctataggaaactagccctgcagcttcatcccgaccggaaccctgatgatccacaagcccaggagaaattccaggatctgggtgctgcttatgaggttctgtcagatagtgagaaacggaaacagtacgatacttatggtgaagaaggattaaaagatggtcatcagagctcccatggagacattttttcacacttctttggggattttggtttcatgtttggaggaacccctcgtcagcaagacagaaatattccaagaggaagtgatattattgtagatctagaagtcactttggaagaagtatatgcaggaaattttgtggaagtagttagaaacaaacctgtggcaaggcaggctcctggcaaacggaagtgcaattgtcggcaagagatgcggaccacccagctgggccctgggcgcttccaaatgacccaggaggtggtctgcgacgaatgccctaatgtcaactagtgaatgaagaacgaacgctggaagtagaaatagagcctggggtgagagacggcatggagtacccctttattggagaaggtgagcctcacgtggatggggagcctggagatttacggttccgaatcaagttgtcaagcacccaatatttgaaaggagaggagatgatttgtacacaaatgtgacaatctcattagttgagtcactggttggctttgagatggatattactcacttggatggtcacaaggtacatatttcccgggataagatcaccaggccaggagcgaagctatgggaagaaaggggaagggctctccaactttgacacaacaatatcaaggactctttgataatcacttttgatgtgatttccaaa

SEQ ID NO: 22189 - DNA, 1083 bp, Homo Sapiens
gcacgaggtcccgtgtggcccagggaagccaaaagattgcacacctctgttttagatgttcctcagttaattgtttaggcctcgggcttctaaagatctcagccaaaatacacagtaaacgccgttggggccaaataatgttaactgcattgttctagttgcttctgaggaggaaagctctactgaggagctgtcatggagttaggaataggaagactttggggagtggacacttagctgcagtccctttccccaaatctgttctttggagggaacaaaacaatcacaagagtatgttctaaatccaaaaaaactttaaatttttgtatgttgaaagaaggaaaatatgaccatttgtatatggcattttctgggtgctggctactgttgcaggtttatttcatatagttgataagttatgttaatatttaacagttataaagttagctttagttaactaaagttagcttttccagaatattttcttgaacttttacgttggagtcaggttttagtttaagccactgtgtattatttcaaagtgtaactacagtggtatttttgagtgaagatctgtaattctagtatgagtcgtatcacttagccacgaaatatatttttaatataattggatttgagtgaccatgtttcattagttgtagtgatttaaaagttaactgtttatgttgggtgaactagatatctttgctaataaacatccttccttttttaagggtggagagattcaaccagttagcgtgaaagttggagataaagttcttctcccagaatatggaggcaccaaagtagttctagatgacaaggtgtgtaaacttaataattctaaaaagaagtcagatatttgcaattagttgtcttaactaatggtttttttcacttgcaggattatttcctatttagagatggtgacattcttggaaagtacgtagactgaaataagtcactattgaaatggcatcaacatgatgctgcccattccactgaagttctgaaatctttcgtcatgtaaataatttccatatttctcttttataataaactaatgataagtaatcctcgtgc

SEQ ID NO: 22190 - DNA, 548 bp, Homo Sapiens
ctttgcggcgctacactagagcagagtacgagtctgaggcggagggagtaatggcaggacaagcgtttagaaagtttcttccactctttgaccgagtattggttgaaaggagtgctgctgaaactgtaaccaaaggaggcattatgcttccagaaaaatctcaaggaaaagtattgcaagcaacagtagtcgctgttggatcgggttctaaaggaaagggtggagagattcaaccagttagcgtgaaagttggagataaagttcttctcccagaatatggaggcaccaaagtagttctagatgacaaggattatttcctatttagagatggtgacattcttggaaagtacgtagactgaaataagtcactattgaaatggcatcaacatgatgctgcccattccactgaagttctgaaatctttcgtcatgtaaataatttccatatttctcttttataataaactaatgataactaatgacatccagtgtctccaaaattgtttccttgtactgatataaacacttccaaataaaaatatgtaaatg

SEQ ID NO: 22191 - DNA, 1176 bp, Homo Sapiens
aacttataaaggattttttattttagataagtgaagtccttctaatttatttaaccaagtattcactatacacatttagtaacatgcaatatagtatatgtattaaaagttggcatgtaaaataacatatctttttcggcaatttaactatatgtatcaacagtctcaaaaatattcatacattttcacccactaatcccatcctaaggtcataaccagcctggcagtatgatggcctagatgcagagaaaacagctccttggtgaattgataagtaaaggcagaaaagattatatgtcatacctccattggggaataagcataaccctgagattcttactactgatgagaacattatctgcatatgccaaaaaattttaagcaaatgaaagctaccaatttaaagttacggaatctaccattttaaagttaattgcttgtcaagctataaccacaaaaataatgaattgatgagaaatacaatgaagaggcaatgtccatctcaaaatactgcttttacaaaagcagaataaaagcgaaaagaaatgaaaatgttacactacattaatcctggaataaaagaagccgaaataaatgagagatgagttgggatcaagtggattgaggaggctgtgctgtgtgccaatgtttcgtttgcctcagacaggtatctcttcgttatcagaagagttgcttcatttcatctgggagcagaaaacagcaggcagctgttaacagataagtttaacttgcatctgcagtattgcatgttagggataagtgcttatttttaagagctgtggagttcttaaatatcaaccatggcactttctcctgaccccttccctaggggatttcaggattgagaaatttttccatcgagcctttttaaaattgtaggacttgttcctgtgggcttcagtgatgggatagtacacttcactcagaggcatttgcatctttaaataatttcttaaaagcctctaaagtgatcagtgccttgatgccaactaaggaaatttgtttagcattgaatctctgaaggctctatgaaaggaatagcatgatgtgctgttagaatcagatgttactgctaaaatttacatgttgtgatgtaaattgtgtagaaaaccattaaatcattcaaaataataaactatttttattagagaatgt

SEQ ID NO: 22192 - DNA, 475 bp, Homo Sapiens
atcccccgggctgcaggcagcaggcagctgttaacagataagtttaacttgcatctgcagtattgcatgttagggataagtgcttatttttaagagctgtggagttcttaaatatcaaccatggcactttctcctgaccccttccctaggggatttcaggattgagaaatttttccatcgagcctttttaaaattgtaggacttgttcctgtgggcttcagtgatgggatagtacacttcactcagaggcatttgcatctttaaataatttcttaaaagcctctaaagtgatcagtgccttgatgccaactaaggaaatttgtttagcattgaatctctgaaggctctatgaaaggaatagcatgatgtgctgttagaatcagatgttactgctaaaatttacatgttgtgatgtaaattgtgtagaaaaccattaaatcattcaaaataataaactatttttattagagaatgt

SEQ ID NO: 22193 - DNA, 888 bp, Homo Sapiens
gcacgaggagaaaacctaggttaggattttatttcccgtttgtgaccctgggcaagtcattagcctcctgggcctcgggttctcacttggagtatgaggataatgagggttactgcttctcagacttgtgacgatgcttactaatggccaacatgtgaatgcgcttttgtgaagtgccagcagagcatgaggggtggtcaggggcagcagttttaggggcctgggggaggctggggctttgggggcctggttctcagatgtacagctaatcctgtacccttcccgcagaccggcatgggctgcaggagccgcggcgggtggaggagctgcagaaccgcatcgccagctgcctgaaggagcacgtggcagctgtggcgggcgagccccagccagccagctgcctgtcacgtctgttgggcaaactgcccgagctgcggaccctgtgcacccagggcctgcagcgcatcttctacctcaagctggaggacttggtgccccctccacccatcattgacaagatcttcatggacacgctgcccttctgacccctgcctgggaacacgtgtgcacatgcgcactctcatatgccaccccatgtgcctttagtccacggacccccagagcacccccaagcctgggcttgagctgcagaatgactccaccttctcacctgctccaggaggtttgcagggagctcaagcccttggggagggggatgccttcatgggggtgaccccacgatttgtcttatcccccccagcctggccccggcctttatgttttttgtaagataaaccgtttttaacacatagcgccgtgctgtaaataacccagtgctgctgtaaatacaggaagaaagagcttgatgtgggaacggggctgggagaa

SEQ ID NO: 22194 - DNA, 357 bp, Homo Sapiens
ccgcaccttaaccaacctggccccggcctttatgttttttgtaagataaaccgtttttaacacatagcgccgtgctgtaaataagcccagtgctgctgtaaatacaggaagaaagagcttgaggtgggagcggggctgggaggaagggatgggccccgccttcctgggcagcctttccagcctcctgctggctctctcttcctaccctccttccacatgtacataaactgtcactctaggaagaagacaaatgacagattctgacatttatatttgtgtattttcctggatttatagtatgtgacttttctgattaatatatttaatatattgaataaaaaatagacatgtagttgg

SEQ ID NO: 22195 - DNA, 653 bp, Homo Sapiens
gcacgaggctctgcccggctgcagggatggcggggagggtaagctcatcgcagtgatcggagacgaggacacggtgactggtttcctgctgggcggcataggggagcttaacaagaaccgccatcccaatttcctggtggtggagaaggatacaaccatcaatgagatcgaagacactttccggcaatttctaaaccgggatgacattggcatcatcctcatcaaccagtacatcgcagagatggtgcggcatgccctggacgcccaccagcagtccatccccgctgtcctggagatcccctccaaggagcacccatatgacgccgccaaggactccatcctgcgcagggccaggggcatgttcactgccgaagacctgcgctaggggactcctcatagccctcagcccttccctcgtttccaggcctctccccaggcttgccatcagccttctttactttttgagcctctgatttccaattccctgctccttcccactccattaagaggctaggtgaggcgcttctaggttgctggggctctgctggttaaggaacaggaagcctgaccatctccctccactacctcttccctgtgctgttacacagtgtcattgttgatgttaaattaaagtcatattcttgcttctctcc

SEQ ID NO: 22196 - DNA, 1736 bp, Homo Sapiens
gcacgagggcgccgccgcgtcagctcagcgctgggtctctcggtcccgcagccgtgaggaggacggtctgcatactcgctgcccgccggctccctcccccgcgtccctgcgaccgccgcggcgaagatggcctcaggagtgcaagtagctgatgaagtatgtcgcattttttatgacatgaaagttcgtaaatgctccacaccagaagaaatcaagaaaagaaagaaggctgtcattttttgtctcagtgcagacaaaaagtgcatcattgtagaagaaggcaaagagatcttggttggagatgttggtgtaaccataactgatcctttcaagcattttgtgggaatgcttcctgaaaaagattgtcgctatgctttgtatgatgcaagctttgaaacaaaagaatccagaaaagaagagttgatgttttttttgtgggcaccagaactagcacctctgaaaagtaaaatgatctatgcaagctccaaggatgcaattaaaaagaaatttcaaggcataaaacatgaatgtcaagcaaatggaccagaagatctcaatcgggcttgtattgctgaaaagttaggtggatccttaattgtagcctttgaaggatgccctgtgtagattattcagtgccacaaattgaaagcttccatgtttaatgttatcctcttgctatataaataaagcaaatatatttaggccagggtctcactgagggggagctgtcttgtcatcttttagagtaaactattctataaacatatgcaaacagccctaaataaatctaaagtctaaagttttattgatgtgaaattaaattcttattggccaaatgcctgttttgatgagttgatttataaagatttttgttaagctcaggattttaaattacacagttcacaaacagtaaaggccatgtgaagagaattattacatctttattaacctcagcatttactttgtttcttttgcttaggaaattgctcataatctggttataattttggtccaaattctttattcttccttgagctaagcagaataatggaatataatatgtcttcataatataacaacactaatacactaatagtaagattaagttaggcagtcttctaccaaatgtgtaatggagattgcctcaaaattgtgtccacataatccacgctcatcttgcaaagcgctatttcaggcacatcattggaatacaggaagtagccctgcacctgccagtgagctcgccattcactgattggaaaagtgacctggcatcttggaaatcattgtgtgtcttcaggagaatgtgcagtgtcttgtaacaactaattataatgcaaattagggctacattgtaatctgctttgttaatgaaaatgataaaacagaatattgacaagctaggacacctgtggtatctttaattgtatctccttcacaagtttgcttcttatggtataataaagtatggaagaattcactgccaaaaacctgcgctaagggactcctcatagccctcagcccttccctcgtttccaggcctctcccggggggggccatcaaccttctttactttttgagcctctgatttccaattccctgctccttcccattccattaagaggctaggtgaggcgcttctaggttgctggggctctgctggttaaggaacaggaagtctgaccatctccctacactacctctaccctgtgctgatacacccttgtcattgttga

SEQ ID NO: 22197 - DNA, 1139 bp, Homo Sapiens
gcacgaggcttctccgcaccagggaagccccacccaccagaagccaagatgtccagcaagcgggccaaagccaagaccaccaagaagcggccacagcgggccacatccaatgtcttcgcaatgtttgaccagtcccagatccaggagtttaaggaggctttcaacatgattgaccagaaccgtgatggcttcattgacaaggaggacctgcacgacatgctggcctcgctggggaagaaccccacagacgaatacctggagggcatgatgagcgaggccccggggcccatcaacttcaccatgttcctcaccatgtttggggagaagctgaacggcacggaccccgaggatgtgattcgcaacgcctttgcctgcttcgacgaggaagcctcaggtttcatccatgaggaccacctccgggagctgctcaccaccatgggtgaccgcttcacagatgaggaagtggacgagatgtaccgggaggcacccattgataagaaaggcaacttcaactacgtggagttcacccgcatcctcaaacatggcgccaaggataaagacgactaggccaccccagccccctgacaccccagcccccgccagtcacccctccccgcacacacccgtccataccagctccctgcccatgaccctcgctcagggatccccctttgaggggttagggtcccagttcccagtggaagaaacaggccaggagaagtgcgtgccgagctgaggcagatgttcccacagtgaccccagagccctgggctatagtctctgacccctccaaggaaagaccaccttctggggacatgggctggagggcaggacctagaggcaccaagggaaggccccattccggggctgttccccgaggaggaagggaaggggctctgtgtgccccccaggaggaagaggccctgagtcctgggatcagacaccccttcacgtgtatccccacacaaatgcaagctcaccaaggtcccctctcagtccccttccctacaccctgaccggccactgccgcacacccacccagagcacgccacccgccatgggagtgtgctcaggagtcgcgggcagcgtggacatctgtcccagagggggcagaatctccaatagaggactgagcactg

SEQ ID NO: 22198 - DNA, 828 bp, Homo Sapiens
  misc_feature (510)..(564): n is a, c, g, or t
gcacgaggctctattggagattctgccccctctgggacagatgtccacgctgcccgcgactcctgagcacactcccatggcgggtggcgtgctctgggtgggtgtgcagcagtggccggtcagggtgtagggaaggggactgagaggggaccttggtgagcttgcatttgtgtggggatacacgtgaaggggtgtctgatcccaggactcagggcctcttcctcctggggggcacacagagccccttcccttcctcctcggggaacagccccggaatggggccttcccttggtgcctctaggtcctgccctccagcccatgtccccagaaggtggtctttccttggaggggtcagagactatagcccagggctctggggtcactgtgggaacatctgcctcagctcggcacgcacttctcctggcctgtttcttccactgggaactgggaccctaacccctcaaagggggatccctgagcgagggtcatgggcagggagctggtatggannnnnnnnnnnnnnnnnnnnnnnnnnnnnnnnnnnnnnnnnnnnnnnnnnnnnnntggcctagtcgtctttatccttggcgccatgtttgaggatgcgggtgaactccacgtatttgaagttgcctttcttatcatgggtgcctcccggtacatctcgtccacttcctcatctgtgaagcggtcacccatggtggtgagcagctcccggaggtggtcctcatgggatgaaacctgaggctttcctcgtcgaagcaggcaagggcgttgcgaatcacatcctcgggggtgcgtgccgttcagcttcttccccaaacatgg

SEQ ID NO: 22199 - DNA, 1175 bp, Homo Sapiens
gcacgaggtttttttgttctgcatcagtaattttaataaagaaaagcatgctctgagagaaagctcgctccttggtctgcagtcctttaaacaaagcagtgcagttcttagccaagggtaagtactgcaactgtcgagagcatcttgtcttccacacagttgggtgactctccgttttgacacaaagataagccttgcccttgtttccttttgggagggatatatccactgagatgagaggccaaactccgtttttcacgagattttttgactttgagcttcattttcttcttgtcaggatcatgtacaacagcatgcctagtgagactttgtttcattgcaaatgttttgccacagccagcatgttcacacacaaaagggcggctttcctcatggaaggagaggatatggctttggagattaaacacagttgtataggttcttccacagccttctcttggacagcgacatacatccctttctggggcatgagttttcatgtgttgcttaaggtaatctttgcgtttaaatgttttccggcatacttcacatagtatttcctctttatgggtttctctcacatgtttcagaagttccgtccatgtttttgccacaaaggaacatcctttttgacatacatagccctcgtgggccttggcatgtcgtttcagcttgctgggtgatgcaaagtgtttcccacatccttcctgggtacacttgaatagaggttcattggtatgctggcactgatggattttcagctgctgatgtttcttaaaggtcttcttacagtcttcaaaactgcatatatattgtttttgttgattttcatgtttgcgttcaaaatgtttcttcaagtttgattttgtgttgaatttttgatcacagccattggctgcacaaacaaacggcttttctcctgtgtgcttgcacaggtgcgcgtcaagcttccaggctttgctgtaattggcgctgcagtcagggaaggagcagatgaacctcctgggaagcgcggggcgcggcggggtcggagctgagctctcgccggctgcaatgaacgcgtcggcgatggtcaaggacgacaccgactcggcgaccacggccggcggatccagggcgccggcgcctccaagcccagggccaggcgcgctgccacgtgcccctgcagcccgggg

SEQ ID NO: 22200 - DNA, 978 bp, Homo Sapiens
caaaaaaatcccccgggctgcaggaattcggcacgagggccgcgcgaaggttcagcagggagccgtgggccgggcgcgccggttcccggcacgtgtctcggcacgtggcagcgcgcctggccctgggcttggaggcgccggcgccctggatccgccggccgtggtcgccgagtcggtgtcgtccttgaccatcgccgacgcgttcattgcagccggcgagagctcagctccgaccccgccgcgccccgcgcttcccaggaggttcatctgctccttccctgactgcagcgccaattacagcaaagcctggaagcttgacgcgcacctgtgcaagcacacgggggagagaccatttgtttgtgactatgaagggtgtggcaaggccttcatcagggactaccatctgagccgccacattctgactcacacaggagaaaagccgtttgtttgtgcagccaatggctgtgatcaaaaattcaacacaaaatcaaacttgaagaaacattttgaacgcaaacatgaaaatcaacaaaaacaatatatatgcagttttgaagactgtaagaagacctttaagaaacatcagcagctgaaaatccatcagtgccagcataccaatgaacctctattcaagtgtacccaggaaggatgtgggaaacactttgcatcacccagcaagctgaaacgacatgccaaggcccacgagggctatgtatgtcaaaaaggatgttcctttgtggcaaaaacatggacggaacttctgaaacatgtgagagaaacccataaagaggaaatactatgtgaagtatgccggaaaacattttaaacgcaaagattaccttaagcaacacatgaaaactcatgccccagaaagggatgtatgtcgctgtccaagagaaagctgtggaagacctatacaactgtggtttatctccaaagccatatccctcttcttccatgaggaaaggccgccctttt

SEQ ID NO: 22201 - DNA, 500 bp, Homo Sapiens
  misc_feature (436)..(444): n is a, c, g, or t
gcacgagggtggctaccaacctatttggccgaggcatggacatcgagcgggtgaacattgcttttaattatgacatgcctgaggattctgacacctacctgcatcgggtggccagagcaggccggtttggcaccaagggcttggctatcacatttgtgtccgatgagaatgatgccaagatcctcaatgatgtgcaggatcgctttgaggtcaatattagtgagctgcctgatgagatagacatctcctcctacattgaacagacacggtagaagactcgcccattttggaatgtgaccgtctgtccttcaggagaggacaccagggtgggggtgaaggagacactactgcccccacccctgacagcccccaccccatggcttccatcttttgcatcaccaccactcctgaacccccatttctgatttgtcagaannnnnnnnnaacaaaactaaaaatgaaacacatgtgtctgtggtatctataaaaaaacctcgtgc

SEQ ID NO: 22202 - DNA, 1237 bp, Homo Sapiens
cccgggctgcaggaattcggcacgaggaaagacagcagtgtttgtcttggccacactgcaacagctggagccagttactgggcaggtgtctgtactggtgatgtgtcacactcgggagttggcttttcagatcagcaaggaatatgagcgcttctctaaatacatgcccaatgtcaaggttgctgttttttttggtggtctgtctatcaagaaggatgaagaggtgctgaagaagaactgcccgcatatcgtcgtggggactccaggccgtatcctagccctggctcgaaataagagcctcaacctcaaacacattaaacactttattttggatgaatgtgataagatgcttgaacagctcgacatgcgtcgggatgtccaggaaatttttcgcatgaccccccacgagaagcaggtcatgatgttcagtgctaccttgagcaaagagatccgtccagtctgccgcaagttcatgcaagatccaatggagatcttcgtggatgatgagacgaagttgacgctgcatgggttgcagcagtactacgtgaaactgaaggacaacgagaagaaccggaagctctttgaccttctggatgtccttgagttcaaccaggtggtgatctttgtgaagtctgtgcagcggtgcattgccttggcccagctactagtggagcagaacttcccagccattgccatccaccgtgggatgccccaggaggagaggctttctcggtatcagcagtttaaagattttcaacgacgaattcttgtggctaccaacctatttggccgaggcatggacatcgagcgggtgaacattgcttttaattatgacatgcctgaggattctgacacctacctgcatcgggtggccagagcaggccggtttggcaccaagggcttggctatcacatttgtgtccgatgagaatgatgccaagatcctcaatgatgtgcaggatcgctttgaggtcaatattagtgagctgcctgatgagatagacatctcctcctacattgaacagacacggtagaagactcgcccattttggaatgtgaccgtctgtccttcaggagaggacaccagggtgggggtgaaggagacactactgcccccacccctgacagcccccaccccatggcttccatcttttgcatcaccaccactcctgaaccccatttctgatttgtcaaaattttttttaacaaactaaaatgaaacacatgtgtctgtggta

SEQ ID NO: 22203 - DNA, 1110 bp, Homo Sapiens
  misc_feature (796)..(812): n is a, c, g, or t
gcacgaggtacaagcccaacctggacctgctggagcagcagcaccagctcatccaggaggccctcatcttcgacaacaagcacaccaactataccatggagcacatccgcgtgggctgggagcagctgctcaccaccattgcccgcaccatcaacgaagtggagaaccagatcctcacccgcgacgccaagggcatcagccaggagcagatgcaggagttccgggcgtccttcaaccacttcgacaaggatcatggcggggcgctggggcccgaggagttcaaggcctgcctcatcagcctgggctacgacgtggagaacgaccggcagggtgaggccgagttcaaccgcatcatgagcctggtcgaccccaaccatagcggccttgtgaccttccaagccttcatcgacttcatgtcgcgggagaccaccgacacggacacggctgaccaggtcatcgcttccttcaaggtcttagcaggggacaagaacttcatcacagctgaggagctgcggagagagctgccccccgaccaggccgagtactgcatcgcccgcatggcgccataccagggccctgacgccgtgcccggtgccctcgactacaagtccttctccacggccttgtatggcgagagcgacctgtgaggccccagagacctgacccaacacccccgacggcctccaggaggggcctgggcagccccacagtcccattcctccactctgtatctatgcaaagcactctctgcagtcctccggggtgggtgggtgggcagggaggggctggggcaggnnnnnnnnnnnnnnnnnttgtgggttggccaggaggttcccccgaccaggttggggagacttggggccagcgcttctggtctggtaaatatgtatgatgtgttgtgcttttttaaccaaggaggggccagtggattcccacagcacaaccggtcccttccatgccctgggatgcctcaccacacccaggtctcttcctttgctctgaggtctcttcaaggcctccccaatccaggccaaagccccatgtgccttgtccaggaactgcctgggccatgcgaggggccagcagaagggcgccaccacaacctgacgg

SEQ ID NO: 22204 - DNA, 583 bp, Homo Sapiens
  misc_feature (494)..(510): n is a, c, g, or t
ggttcttagaaaatctgagacacgtgaggccagacaaagcaaggccggggctggtgggatggggtgcggttcaggggggcccggtctgccaactcagctcctctgctgcaaaagcggggtgcttgttggggccatctcctggcaatggcaagtgagtctggagcagagaggggagaggggctgggtgggtccccagccgtcaggtggtggtggcgccctctgctggcccctcgcatggcccaggcagttcctggacaaggcacatggggctttggcctggattggggaggccttgaagggacctcagagcaaaggaagagacctgggtgtggtgaggcatcccagggcatggaagggaccggttgtgctgtgggaatccactggcccctccttggttaaaaaagcacaacacatcatacatatttaccagacccgaagcgctggccccaagtctccccaacctggtcgggggaacctcctggccaacccacaannnnnnnnnnnnnnnnncctgccccagcccctccctgcccacccacccaccccggaggactcctcgtgccgaattcctgcagcccggggg

SEQ ID NO: 22205 - DNA, 968 bp, Homo Sapiens
gcacgaggcaggcctccatgaagcaggtgcaccagtgcatcgagcgctgccatgtgcctctggctcaagcccaggctttggtcaccagtgagctggagaagttccaggaccgcctggcccggtgcaccatgcattgcaacgacaaagccaaagattcaatagatgctgggagtaaggagcttcaggtgaagcagcagctggacagttgtgtgaccaagtgtgtggatgaccacatgcacctcatcccaactatgaccaagaagatgaaggaggctctcttatcaattggaaaataaaagtatttgccagtggccatcagggctgagggcaagaatatattttttataaggaattgggaattttagtcttttaagcaaagtttacgaatgaagaaatgaaggatggccacaagcgtaaggcatatgtcacttgcctctggacactggttattttatgtttcagtccctaaaaaatgaaatggaaaaaagtggtgctaaatcgagtcagagatattacaggagagttttagagcttattatttcctgtggccagtgcttgtcctggcagtaaggctctcccctgtaacaagccagagccctccaaggtaccagactcttcttactacacaggtactaacaggctggcaggttagagttggtggagtctgaggagagatattttctctttgttgccaacatcctgtttaccaaaagtgtcaccccaccatcttccataagctgtgaatcaaaatcaatgaggtcactaacttagaagggaaagaaagttttctgggtctttgttttcttgatttggggtaatttatacaagggcatacagttgattttaagatgtggaactgggaggtagactagtttggataagaactttgaaatgttccttgtggatcccatttctggtcatcaagatgtggaatgtacattcttaaattattacatgctgcatctttc

SEQ ID NO: 22206 - DNA, 871 bp, Homo Sapiens
cccgggctgcaggaattcggcacgaggctaacttaaaagggaaagaaagttttctgggtctttgttttcttgatttggggtaatttatacaagggcatacaagttgattttaagatgtggaactgggaggtagactagtttggataagaactttgaaatgttccttgtggatccccatttctggtcatcaagatgtggatgtacatttcttaaaattattacatgctgcatctttcagcctggagactgtgcagaaacatgagaggtgatgacacactaattatgggaagcagaattactggctgatggcccctgaggctgtgtgtaacaaaatgacaggacaatcttgcagtaacactttccccttgaagagaagggggttttgattgtgatatatactagtatctaggaatgaacagtaaaagaggagcagttggctacttgattacaacagagtaaatgaagtactggatttgggaaaacctggttttattagaacatatggaatgaaagcctacacctagcattgcctacttagccccctgaattaacagagcccaattgagacaaacccctggcaacaggaaattcaagggagaaaaagtaagcaacttgggctaggatgagctgactcccttagagcaaaggagagacagcccccattaccaaataccatttttgcctggggcttgtgcagctggcagtgttcctgccccagcatggcaccttattgttttgatagcaacttcgttgaattttcaccaacttattacttgaaattataatatagcctgtccgtttgctgtttcaggctgtgatatattttcctagtggtttgactttaaaaataaataaggtttattttctcccc

SEQ ID NO: 22207 - DNA, 556 bp, Homo Sapiens
ccacgcgtccgctgctcagcctggtgaaccacacaggccagcgctctgacatgcagaaggtgaccctgggcctgcttgtgttcctggcaggctttcctgtcctggacgccaatgacctagaagataaaaacagtcctttctactatgactggcacagcctccaggttggcgggctcatctgcgctggggttctgtgcgccatgggcatcatcatcgtcatgagtgagtggaggagctcgggggagcaggcgggccggggctggggctcccctcccctgaccactcagctctccccaacaggtgcaaaatgcaaatgcaagtttggccagaagtccggtcaccatccaggggagactccacctctcatcaccccaggctcagcccaaagctgatgaggacagaccagctgaaattgggtggaggaccgttctctgtccccaggtcctgtctctgcacagaaacttgaactccaggatggaattcttcctcctctgctgggactcctttgcatggcagggcctcatctcacctctcgcaagagggtctctttgttcaa

SEQ ID NO: 22208 - DNA, 550 bp, Homo Sapiens
ccggataaacgcaggactccgcctggcagccctatttctcccggaacctctgctcagcctggtgaaccacacaggccagcgctctgacatgcagaaggtgaccctgggcctgcttgtgttcctggcaggctttcctgtcctggacgccaatgacctagaagataaaaacagtcctttctactatgactggcacagcctccaggttggcgggctcatctgcgctggggttctgtgcgccatgggcatcatcatcgtcatgagtgcaaaatgcaaatgcaagtttggccagaagtccggtcaccatccaggggagactccacctctcatcaccccaggctcagcccaaagctgatgaggacagaccagctgaaattgggtggaggaccgttctctgtccccaggtcctgtctctgcacagaaacttgaactccaggatggaattcttcctcctctgctgggactcctttgcatggcagggcctcatctcacctctcgcaagagggtctctttgttcaattttttttaatctaaaatgattgtgcctctgccc

SEQ ID NO: 22209 - DNA, 1151 bp, Homo Sapiens
  misc_feature (1106)..(1121): n is a, c, g, or t
gcacgaggggatcttccagatgacttgattggatactttagtctattcttagttcgagaaaaagaggatggagccttttcttttgtacggaagttgcaagagttttgatgcctgtgtggctgacttcccagaaaaggactgtcctgtggtggtgagcgcgggcaacagtgagctcagcctgcagctccgcctgcctggccagcaactccgagaaggctccttccgggtcacccgcatgcgatgctggcgggtcacctcctctgtaccattgcccagtggaagcacgagcagcccaggccggggccggggtgaggtgcgcctggaactggcttttgaatacctcatgagcaaggaccggctacagtgggtcaccatcactagcccccaggctatcatgatgagcatctgcttgcagtccatggttgatgaactgatggtgaagaaatctggcggcagtatcaggaagatgctgcgccggcgggtggggggtactctgagacgctcagacagccagcaagcagtgaagtccccaccactgcttgagtcacctgatgccacccgggagtctatggtcaaactctcaagtaagctgagtgccgtgagcttgcggggaattggcagtcccagcacagatgccagtgccagtgatgtccacggcaatttcgccttcgagggcattggagatgaggatctgtaatctccactgcttggatgtctgccctctaccccagaggaatttacagaaacttgccctgtgcctgtgtcccccatgctaggggcggaggggtcttttccttcttctttcctacctaccccttttctcttggccaggggcctcgtatcctacctttccttgtcccctgggctggctgcacagaggattgccccttctcttttcagaactggccctcgatgccaaattagcatttagtattttgcacaaagtctaagggaccatggctgcctgccttggggaggaaccatatctccctctgggccgcttctggcctcttggagccatgggccaaaggccaaggggatgggcagaggtctgtgtttggtctggcccagttccccatcattaaactcagcctgactgctgcctnnnnnnnnnnnnnnnncctcgtgccgaattcctgcagcccggggga

SEQ ID NO: 22210 - DNA, 898 bp, Homo Sapiens
gcacgaggcttcaagcccttccctacacgtggacatcagtgtctccctttacccgctcttcttgttcccgtaggctgtagttcccctttaatcactgccacaggttcggcaagacccattgcttgggagcagcgagactttcaacagtttcctgcgtcgggcacaacaggagacacagcaggtccccacagaggaagtgtccttggaagtgctgctcagcaacgggcagaaagttctggtcaacgtgctaacttcagatcagactgaggatgtcctggaggctgtagctgcaaagctggatcttccagatgacttgattggatactttagtctattcttagttcgagaaaaagaggatggagccttttcttttgtacggaagttgcaagagtttgagctgccttatgtgtctgtcaccagccttcggagtcaagagtataagattgtgctaaggaagagttattgggactctgcctatgatgacgatgtcatggagaaccgggttggcctgaacctgctttatgctcagacggtatcagatattgagcgtgggtggatcttggtcaccaaggaacagcaccggcaactcaaatctctgcaagagaaagtctccaagaaggagttcctgagactggcccagacgctgcggcactatggctacttgcgctttgatgcctgtgtggctgacttcccagaaaaggactgtcctgtggtggtgagcgcgggcaacagtgagctcagcctgcagctccgcctgcctggccagcaactccgagaaggctccttccgggtcacccgcatgcgatgctggcgggtcacctcctctgtaccattgcccagtggaagcacgagcagcccaggccggggccggggtgaggtgcgcctggaactggctttt

SEQ ID NO: 22211 - DNA, 1416 bp, Homo Sapiens
  misc_feature (287)..(296): n is a, c, g, or t
cccccacgcgtccgagaaaggcaagaaaatatctaagaagactgtttaaatgcactgttctggttcctaacttgaagcagttgtccttgtgagaaccggtctttgcctttagctcatgtcgtgtttcacagcaaagagggtacagaaccatcactggtccaggttaatgtacaaaattttctggcaatgcctgattaaaaaaataaaattggcttgttgagaacagctgttttcgatttctaatgtgaagcaagacagagcactgctgtaaatgtctagcagcagannnnnnnnnnattggtacatattatccttcaaatctgagaatttggactaactgcaccaaagaaccctctaatttggtccctggcacatgcatacttgtcaatgtttttattcttttacaagacctgcattttatttgaattacccgaatagcaatatgtaaaatacaagtgacaaaatgtgatgagagcttcttgaaccggtaaactagtacaggtctgagaaagacatattagaagaatcattatacttccttgaattatatttattttcatgtttctctaatgcaaagaatgtttcatcaaatgtatattttctgttgcttactgtttgctctgagaagaagctgctgtttcaaagatggacctctgagtagctaattgattcaagtagtttttttatgttgacacattattactgctgttagcagtcgttttcaccaggtacttacagagcagatttcatacatcattcattcaagggctaaatttatattttttggaaatcatggcaactacacaggatgttgcttaccaggacggagttttggtatcttagtactgaagttagcactatgtttacatgcaaaagattaaggaaaaaacccttaaagtggacaggtatccaaagttcattttctgtgactcatcaaagtgacaaaagacttgtaacaactttgcctggacttttttcattttacaacagttcatccattcacaatgattttgttctctgctccatattttttaatcccttaagcatttgatgaaacactctttagtgctatatgcattttcttacttttgttaaaaatgtgacaattgtcaaaaaatgcactaaaatgtaaatggagattgaacaagttcactttccagcttataggcaactttatacagacttgaacattttctccagttgtttagtaaaagtgaaagagaaagggtttttcctgccacaggatataacttttttttatatacaagcataacacaccactgcttttggtggaaaagtgcagaatagtatgtaccttttatgaagaaaaatgtaatttacatattcagtgagatgtactgctgatttccttttcaaagtgtagaatattctttgatttatagaattcattttgac

SEQ ID NO: 22212 - DNA, 996 bp, Homo Sapiens
  misc_feature (317)..(326): n is a, c, g, or t
gcacgaggggaagcgtggctacattaaaaataagctggtttttaagaaaggcaagaaaatatctaagaagactgtttaaatgcactgttctggttcctaacttgaagcagttgtccttgtgagaaccggtctttgcctttagctcatgtcgtgtttcacagcaaagagggtacagaaccatcactggtccaggttaatgtacaaaattttctggcaatgcctgattaaaaaaataaaattggcttgttgagaacagctgttttcgatttctaatgtgaagcaagacagagcactgctgtaaatgtctagcagcagannnnnnnnnnattggtacatattatccttcaaatctgagaatttggactaactgcaccaaagaaccctctaatttggtccctggcacatgcatacttgtcaatgtttttattcttttacaagacctgcattttatttgaattacccgaatagcaatatgtaaaatgtgacagttgtcaaaaaatgcactaaaatgtaaatggagattgaacaagttcactttccagcttataggcaactttatacagacttgaacattttctccagttgtttagtaaaagtgaaagagaaagggtttttcctgccacaggatataacttttttttatataacaagcataacacaccactgcttttggtggaaaagtgcagaatagtatgtaccttttatgaagaaaaatgtaatttacaatattcagtgagaatgttactgctgattttcttttccaaggtgtagaatattctttgatttatagaattcatttttgacccagatgatggttcctttacagaacaataaaatggctgaacattttcacaaatagagtgtaacgaagtctggatttctgataccttgtcatttgggggattttattttactttgttgctttaaaattcaatgcagagaagttgttgactgtaggggaaataaagttaattcaaatttaagggttcctcgtgc

SEQ ID NO: 22213 - DNA, 1492 bp, Homo Sapiens
  misc_feature (147)..(183): n is a, c, g, or t
gcacgagggctagcgctcgctctactctctctaacgggaaagcagcggaatacaagagactgaactgtatctgcctctatttccaaaagactcacgttcaactttcgctcacacaaagccgggaaaattttattagtcctttttttnnnnnnnnnnnnnnnnnnnnnnnnnnnnnnnnnnnnnggaacctgaactttagtaacacagctggaacaatccgcagcggcggcggcagcggcgggagaagaggtttaatttagttgattttctgtggttgttggttgttcgctagtctcacggtgatggaagctgcacattttttcgaagggaccgagaagctgctggaggtttggttctcccggcagcagcccgacgcaaaccaaggatctggggatcttcgcactatcccaagatctgagtgggacatacttttgaaggatgtgcaatgttcaatcataagtgtgacaaaaactgacaagcaggaagcttatgtactcagtgagagtagcatgtttgtctccaagagacgtttcattttgaagacatgtggtaccaccctcttgctgaaagcactggttcccctgttgaagcttgctagggattacagtgggtttgactcaattcaaagcttcttttattctcgtaagaatttcatgaagccttctcaccaagggtacccacaccggaatttccaggaagaaatagagtttcttaatgcaattttcccaaatggagcagcatattgtatgggacgtatgaattctgactgttggtacttatatactctggatttcccagagagtcgggtaatcagtcagccagatcaaaccttggaaattctgatgagtgagcttgacccagcagttatggaccagttctacatgaaagatggtgttactgcaaaggatgtcactcgtgagagtggaattcgtgacctgataccaggttctgtcattgatgccacaatgttcaatccttgtgggtattcgatgaatggaatgaaatcggatgtgagtagttatatattgcttcaataattatttaaatgtgaatagtctttccattcttaacactgtgaactttttctctcagggaacttattggactattcacatcactccagaaccagaattttcttatgttagctttgaaacaaacttaagtcagacctcctatgatgacctgatcaggaaagttgtagaagtcttcaagccaggaaaatttgtgaccaccttgtttgttaatcaggtaattttatattttattattaatcaggttatttgatttttaaaatcttaaaggaaatgagacagtgaggcctaagatgtattctgagatagcacatataccagccactcagatatccagaagtaatattgtttgaggttactggtagctgagaagctttgtttcattagacctgtgtcagtccttgttttctgtctagccaaactgatgggttcctcctgtcttgctattgacaggcctctgg

SEQ ID NO: 22214 - DNA, 675 bp, Homo Sapiens
gcacgaggtgatgccacaatgttcaatccttgtgggtattcgatgaatggaatgaaatcggatggaacttattggactattcacatcactccagaaccagaattttcttatgttagctttgaaacaaacttaagtcagacctcctatgatgacctgatcaggaaagttgtagaagtcttcaagccaggaaaatttgtgaccaccttgtttgttaatcagagttctaaatgtcgcacagtgcttgcttcgccccagaagattgaaggttttaagcgtcttgattgccagagtgctatgttcaatgattacaattttgtttttaccagttttgctaagaagcagcaacaacagcagagttgattaagaaaaatgaagaaaaaacgcaaaaagagaacacatgtagaaggtggtggatgctttctagatgtcgatgctgggggcagtgctttccataaccaccactgtgtagttgcagaaagccctagatgtaatgatagtgtaatcattttgaattgtatgcattattatatcaaggagttagaattaaattgctgccagaattttacatccagttacctccactttctagaacatattctttactaatgttattgaaaccaatttctacttcatactgatgtttttggaaacagcaattaaagtttttcttccatg

SEQ ID NO: 22215 - DNA, 846 bp, Homo Sapiens
gcacgagggaggaagagaggagagatccaagaatcaacactcctcctgctgctccatccatcactgcccctcaccttctgtgaagggccccaacacaagccctgcttcataccctcttcaatcaggactcaagtcacagaaaggttacctgattcttttatttaagaaaagtgaaatacatggacctgaagtgagacagcagagggagggagtaagagcggccagggcaaggcagcttggctggccagcccccaaccctctgactgaaaagccagcagcaggctgcatctctgagggccatacctgctttgtacccaccttggggcctcagagctagctactctagaggaccacagggtgcagagagggtgtcctgagggtccttcctaagagggattcctgaggagggagctgagaccctaagggcagcagcaatcttctggttaaactgctccccttcactgtcccacctaggggtggggaagagccaggagcaatggggaatgctgtgagggctgtgggggtggggggacccagcagacctgggggccgggttgaatgtcagctgcttgaagagaggtccatggtgctggcactgaggccccgggagacctgaaacagacaacactaccccatcagctcagggacctcggcctcccaaagactggctcctagagtccatccatcccatggtcacagtgtatctctggacctaggatcacatctgtctctggaccagtctatctctggacctgggactttgtttagcctctgctaggttttccagaagccacatctggtggagaagctacctggaaaaaccacatgaatactggcatatacttg

SEQ ID NO: 22216 - DNA, 851 bp, Homo Sapiens
gcacgagggcttcctgttacctgaaacagggcaaatatgctgaggctgagacactatacaaagagatcctgacccgtgcccatgtacaggagtttgggtctgtggatgatgaccacaagcccatctggatgcatgcagaggagcgggaggaaatgagcaaaagccggcaccatgagggtgggacaccctatgctgagtatggaggctggtacaaggcctgcaaagtgagcagccccacagtgaacactactctgagaaacctgggagctctgtataggcgccagggaaagctggaggctgctgagaccctggaggaatgtgccctgcggtcccggagacagggcactgaccctatcagccagacgaaggtggcagagctgcttggggagagtgatggtagaaggacctcccaggagggccctggagacagtgtgaaattcgagggaggtgaagatgcttctgtggctgtggagtggtccggggatggcagtgggaccctgcagaggagtggctctcttggcaagatccgggatgtgctccgcagaagcagtgaactcttggtgaggaagctccaggggactgagcctcggccctccagcagcaacatgaagcgagcagcctccttgaactatctgaaccaacctagtgcagcacccctccaggtctcccggggcctcagtgccagcaccatggacctctcttcaagcagctgacattcaacccggcccccaggtctgctgggtctccccactcccacagccctcacagcatttccccattgctcctggctcttccccacccctaggtgggacagtgaaggggagcagtttaaccaaagattgctgctgccc

SEQ ID NO: 22217 - DNA, 1176 bp, Homo Sapiens
gcacgaggggaatgcagacacagaattaccccaaaggcggcctcctggacagcatgtgtccggcctccacacccagcgtactcagctctgagcaggagtttcagatgttccccaagtctcggctcagctccgtcagcgtcacctactgctctgtcagtcaggacttcccaggcagcaacttgaatttgctcaccaacaattctgggacgcccaaagaccacgactcccctgagaacggtgcggacagcttcgagagctcagactccctcctccagtcctggaacagccagtcgtccttgctggatgtgcaacgggttccttccttcgagagcttcgaagatgactgcagccagtctctctgcctcaataagccaaccatgtctttcaaggattacatccaagagaggagtgacccggtggagcaaggcaaaccagttatacctgcagctgtgctggccggcttcacaggaagtggacctattcagctgtggcagtttctcctggagctgctatcagacaaatcctgccagtcattcatcagctggactggagacggatgggagtttaagctcgccgaccccgatgaggtggcccgccggtggggaaagaggaaaaataagcccaagatgaactacgagaagctgagccggggcttacgctactattacgacaagaacatcatccacaagacgtcggggaagcgctacgtgtaccgcttcgtgtgcgacctccagaacttgctggggttcacgcccgaggaactgcacgccatcctgggcgtccagcccgacacggaggactgaggtcgccgggaccaccctgagccggccccaggctcgtggactgagtgggaagcccatcctgaccagctgctccgaggacccaggaaaggcaggattgaaaatgtccaggaaagtggccaagaagcagtggccttattgcatcccaaaccacgcctcttgaccggctgcctctcttgtggcagcaacggcacagctaattctactcacagtgcttttaagtgaaaatggtcgagaaagaggcaccaggaagccgtcctggcgcctggcagtccgtgggacgggatgggttctggctgtttgagattctcaaaggagcgagcatgtcgtggacacacacagactatttttagattttcttttggcttttgcaacc

SEQ ID NO: 22218 - DNA, 1024 bp, Homo Sapiens
tcccccgggctgcaggaattcggcacgaggcattcatcagctggactggagacggatgggagtttaagctcgccgaccccgatgaggtggcccgccggtggggaaagaggaaaaataagcccaagatgaactacgagaagctgagccggggcttacgctactattacgacaagaacatcatccacaagacgtcggggaagcgctacgtgtaccgcttcgtgtgcgacctccagaacttgctggggttcacgcccgaggaactgcacgccatcctgggcgtccagcccgacacggaggactgaggtcgccgggaccaccctgagccggccccaggctcgtggactgagtgggaagcccatcctgaccagctgctccgaggacccaggaaaggcaggattgaaaatgtccaggaaagtggccaagaagcagtggccttattgcatcccaaaccacgcctcttgaccaggctgcctcccttgtggcagcaacggcacagctaattctactcacagtgcttttaagtgaaaatggtcgagaaagaggcaccgggaagccgtcctggcgcctggcagtccgtgggacgggatggttctggctgtttgagattctcaaaggagcgagcatgtcgtggacacacacagactatttttagattttcttttgccttttgcaaccaggaacagcaaatgcaaaaactctttgagagggtaggagggtgggaaggaaacaaccatgtcatttcagaagttagtttgtatatattataataatcttataattgttctcagaatcccttaacagttgtatttaacagaaattgtatattgtaatttaaaataattatataactgtatttgaaataagaattcagacatctgaggttttatttcatttttcaatagcacatatggaattttgcaaagatttaatctgccaaggggccgactaagagacgttgtaaagtatgtattattcacatttaatagacttacagggataacgcctgttggggggtaatccctgc

SEQ ID NO: 22219 - DNA, 841 bp, Homo Sapiens
aatcccccgggctgcaggaattcggcacgagggggaccttcagttggagctgaactcggaatccgaagttggaacccccgggggccgagggctgccggtccgggctccgctcagcaccctcaacggcgagatcagcgccctgacggccgaggtgagatccagatccgaccactagatcatccttataccgacggggaaacggaggccagagagggcgtgggcgcttgcaccacttccgtcccatccttgcgggtacctggctatgcgggggtgcctaaggagcctggaaaaagcgctcccccgtcgtgcttcctggggaagggggcgttcgctgcgctcggagcggcgtcccttccaacccgccggtctcatttcttctcgttttcacaggcggcatgcgttcctgcggacgatcgcatcttgtgtcgctgaagcgcctcccccagggaccggcggaccccagccatccagggggcaagaggaattacgtgctctgtgggtctcccccaacgcgcctcgccggatctgagggagaacaagaccgatcggcggccactgcgcccttagctgcatccagcctggggctgaggctgaggcactggcgaggagagggcgctcctctctgcacacctactagtcaccagagactttagggggtgggattccactcttgtgtttctattttttgaaaaacagacattttaaaaaatggtcacgtttggtgcttctcagatttctgaggaaattgctttgtattgtatattacatgatcaccgactgaaaatattgtttttagaatagtttctgtgggggctgttttttttgttatttaaactaataa

SEQ ID NO: 22220 - DNA, 971 bp, Homo Sapiens
gcacgaggtccgtatctgcttcgggcttccacctcatttttttcgctttgcccattctgtttcagccagtcgccaagaatcatgaaagtcgccagtggcagcaccgccaccgccgccgcgggccccagctgcgcgctgaaggccggcaagacagcgagcggtgcgggcgaggtggtgcgctgtctgtctgagcagagcgtggccatctcgcgctgcgccgggggcgccggggcgcgcctgcctgccctgctggacgagcagcaggtaaacgtgctgctctacgacatgaacggctgttactcacgcctcaaggagctggtgcccaccctgccccagaaccgcaaggtgagcaaggtggagattctccagcacgtcatcgactacatcagggaccttcagttggagctgaactcggaatccgaagttggaacccccgggggccgagggctgccggtccgggctccgctcagcaccctcaacggcgagatcagcgccctgacggccgaggcggcatgcgttcctgcggacgatcgcatcttgtgtcgctgaagcgcctcccccagggaccggcggaccccagccatccagggggcaagaggaattacgtgctctgtgggtctcccccaacgcgcctcgccggatctgagggagaacaagaccgatcggcggccactgcgcccttaactgcatccagcctggggctgaggctgaggcactggcgaggagagggcgctcctctctgcacacctactagtcaccagagactttagggggtgggattccactcgtgtgtttctattttttgaaaagcagacattttaaaaaatggtcacgtttggtgcttctcagatttctgaggaaattgctttgtattgtatattacaatgatcaccgactgaaaatattgttttacaatagttctgtggggctgtttttttgttattaaacaaataatttagatggtggtaaac

SEQ ID NO: 22221 - DNA, 1216 bp, Homo Sapiens
  misc_feature (81)..(102): n is a, c, g, or t
catcttttgctctttttatttatactttttcaaagggtatcagttttgggaaaatttatataccttaaatacaaatttggnnnnnnnnnnnnnnnnnnnnnnaaagaaataaaaggctgataggcagtaacccggggatctcaacaagttcagctgtgatgggaatagcatttacaagggaaaagtaaaatacaagcatcttcaacaggccccacccaggagcaaggctggtttgaggtttgtaaacatgtcattcttcggtgttcacttacacttcagacacaaaaatcaactcagtcttgatatatccagttcctttagggccaccaagttccattggctctggggcttcttttggcctggagtaatactttccaaaggcatggtctttgtcaatatttggatacagatacttcaggggattctcaggaatattttcagcacccatgactttgtaattgcgaatgatgtcgggaaagtaacagcagaaagttctttcttcgtgtagggttcaaccgcatggaagtcaggttcgcctccgttctgggaccgctccacccatgtgaatgtgatggccccttcccgggagctctcactgaaccgcagcaggaaggtccccggctgctggtccttcaacagggcacgctctcgctccttgctgatgaagcccatgatgcacctggatatcgaagagatggacggatgggcttttagttcaatcatgatttccattttcatgctaacttacaaaccaagaaaatggctggaatgtgagaaaaaaaacctacggtaaaaaacgtagactattttaaaatctgttcagttgacacttaaggaagcatttcacttatacatgtatatactaaggttttaaaaaaagcgatatgaacatggtgtcagtaggatgctacagatgctcaataacacgtgtgggattaatgagccttttattgttcctttattattttaaaggccataacaatgtctgaatgtatacatcttttttactggagaggaagacctaggcaatatattttcatattttagcccttctgatcaagttaaagcttctgttgaaatatcagccgatcctggcaataagtcaagatagaaatgatttacccagttaaaagggtttttcttccttcctaggggccacatagtaggtgctcaaaaaatttttgttgagtgaatgaatgcatgaatggcactcaag

SEQ ID NO: 22222 - DNA, 786 bp, Homo Sapiens
gcacgagggcaccagagccaatggaacttgatggccctaaaggaactggatatatcaagactgagttgatttctgtgtctgaagttcacccttctagacttcagaccacagacaacctgctccccatgtctcctgaggagtttgacgaggtgtctcggatagtgggctctgtagaattcgacagtatgatgaacacagtatagagcatgaatttttttcatcttctctggcgacagttttccttctcatctgtgattccctcctgctactctgttccttcacatcctgtgtttctagggaaatgaaagaaaggccagcaaattcgctgcaacctgttgatagcaagtgaatttttctctaactcagaaacatcagttactctgaagggcatcatgcatcttactgaaggtaaaattgaaaggcattctctgaagagtgggtttcacaagtgaaaaacatccagatacacccaaagtatcaggacgagaatgagggtcctttgggaaaggagaagttaagcaacatctagcaaatgttatgcataaagtcagtgcccaactgttataggttgttggataaatcagtggttatttagggaactgcttgacgtaggaacggtaaatttctgtgggagaattcttacatgttttctttgctttaagtgtaactggcagttttccattggtttacctgtgaaatagttcaaagcctagtttatatacaattatatcagtcctctttcaagggtagccctcatggatctggtagggggaaaatgtgtatttt

SEQ ID NO: 22223 - DNA, 1088 bp, Homo Sapiens
gcacgaggggggtcataaaggaaaagctgaatctcagttgtatccatagtcctgttgttaatgaacttatgagaggaattcgttcacaaatggatggattaatccctggggtagaaccacgtgaaatggcagctatgtgtcttggattggctcacagcctgtctcgatatagattgaagtttagcgctgataaagtagacacaatgattgttcaggcaatttccttgttagatgacttggataaagaactaaacaactacattatgcgatgtagagaatggtatggctggcatttccctgaattaggaaaaattatttcagataatttaacatactgcaagtgtttacagaaagttggcgataggaagaactatgcctctgccaagctttctgagttgctgccagaagaagttgaagcagaagtgaaagcagctgcagagatatcaatgggaacagaggtttcagaagaagatatttgcaatattctgcatctttgcacccaggtgattgaaatctctgaatatcgaacccagctctatgaatatctacaaaatcgaatgatggccattgcacccaatgttacagtcatggttggggaattagttggagcacggcttattgctcatgcaggttctcttttaaatttggccaagcatgcagcttctaccgttcagattcttggagctgaaaaggcacttttcagagccctcaaatctagacgggatacccctaagtatggtctcatttatcatgcttcactcgtgggccagacaagtcccaaacacaaaggaaagatttctcgaatgctggcagccaaaaccgttttggctatccgttatgatgcttttggtgaggattcaagttctgcaatgggagttgagaacagagccaaattagaggccaggttgagaactttggaagacagagggataagaaaaataagtggaacaggaaaagcattagcaaaaacagaaaaatatgaacacaaaagtgaagtgaagacttacgatccttctggtgactccacacttccaacctgttctaaaaaacgcaaaatagaacaggtagataaagaggatgaaattact

SEQ ID NO: 22224 - DNA, 1342 bp, Homo Sapiens
  misc_feature (409)..(426): n is a, c, g, or t
  misc_feature (924)..(1013): n is a, c, g, or t
  misc_feature (1076)..(1110): n is a, c, g, or t
gcacgaggatacattctgcaatatttatagtctataacttattatctctagttgacaaacatggttctttgtttcttaaattataaatgtctttaacctaaaaaaattaaatagtcattcagcttacaggtctgcttaaaaaacagaacattttttagcttgttttgaaccaatttttttaatgttcctgtgcaattagtactttttactttaaacatatgcacttaaagcatccattcacattttaggcactcatttcagtattttctttctgcttacattagaacaaaagcaaatgttgggttctatggaatcttttccatgtgcatgtatttgtatcctttcttgttcttgtgatcttgtgatgaagacttctatactaagcttggtttagattttttgttctgcnnnnnnnnnnnnnnnnnncccccattgagcagtgttctgaaagttggatggttcagttttcactttctagttaggtgtgaagacgttttctcctttcatttcccccatgctgattgagtgttttcctgtaccatagtaactacattgattactaaatcagaattcatttagctcaccacatctcttgaatgtgattgacctacttgaaaaatattaatacctttaacttttggaaactattagtcttcataaactaccccaaagccactaaaatgaaacaacattgtgtgcttatgtaagtattatctaatggcattttctttatctcttgagaattatttcaattccagatacttgttagagattttctaaaactttttgggtctttcagtgaagtgaagacttacgatccttctggtgactccacacttccaacctgttctaaaaaacgcaaaatagaacaggtagataaagaggatgaaattactgaaaagaaagccaaaaaagccaagattnnnnnnnnnnnnnnnnnnnnnnnnnnnnnnnnnnnnnnnnnnnnnnnnnnnnnnnnnnnnnnnnnnnnnnnnnnnnnnnnnnnnnnnnnncacattaaggaagaaccactttctgaggaagaaccatgtaccagcacagcaattgctagtccnnnnnnnnnnnnnnnnnnnnnnnnnnnnnnnnnnnacgaggattaacagaaaggaattacgattatatcacccggacacacatcatgcttaagattcaactgggagcataccagggatgctctctaacgtaatcaagggaaggttcagtaagacaaagtgatttatcatctataacttcaacctatttgtcttgacatcaactctgttaaccttatgtcatcatttcttagagtctttgatatacaataaaattttctttgtatttt

SEQ ID NO: 22225 - DNA, 959 bp, Homo Sapiens
  misc_feature (774)..(822): n is a, c, g, or t
gcacgagggtcgcgggtgcgcgcaggccgtgagtgtgcgcttttgagagtcgcggcggaaggagcccggccgccgcccgccggcatgagctacgaccgcgccatcaccgtcttctcgcccgacggccacctcttccaagtggagtacgcgcaggaggccgtcaagaagggctcgaccgcggttggtgttcgaggaagagacattgttgttcttggtgtggagaagaagtcagtggccaaactgcaggatgaaagaacagtgcggaagatctgtgctttggatgacaacgtctgcatggcctttgcaggcctcaccgccgatgcaaggatagtcatcaacagggcccgggtggagtgccagagccaccggctgactgtggaggacccggtcactgtggagtacatcacccgctacatcgccagtctgaagcagcgttatacgcagagcaatgggcgcaggccgtttggcatctctgccctcatcgtgggtttcgactttgatggcactcctaggctctatcagactgacccctcgggcacataccatgcctggaaggccaatgccataggccggggtgccaagtcagtgcgtgagttcctggagaagaactatactgacgaagccattgaaacagatgatctgaccattaagctggtgatcaaggcactcctggaagtggttcagtcaggtggcaaaaacattgaacttgctgtcatgaggcgagatcaatccctcaagattttaaatcctgaagaaattgagaagtatgttgcnnnnnnnnnnnnnnnnnnnnnnnnnnnnnnnnnnnnnnnnnnnnnnnnngcatcatgatgaataaaatgtctttgcttgtaatttttaaattcatatcaatcatggatgagtctcgatgtgtaggcctttccattccatttattcacactgagtgtcctacaataaacttccgtatttttaaaaaa

SEQ ID NO: 22226 - DNA, 733 bp, Homo Sapiens
  misc_feature (549)..(597): n is a, c, g, or t
gcacgagggccaaactgcaggatgaaagaacagtgcggaagatctgtgctttggatgacaacgtctgcatggcctttgcaggcctcaccgccgatgcaaggatagtcatcaacagggcccgggtggagtgccagagccaccggctgactgtggaggacccggtcactgtggagtacatcacccgctacatcgccagtctgaagcagcgttatacgcagagcaatgggcgcaggccgtttggcatctctgccctcatcgtgggtttcgactttgatggcactcctaggctctatcagactgacccctcgggcacataccatgcctggaaggccaatgccataggtcggggtgccaagtcagtgcgcgagttcctggagaagaactatactgacgaagccattgaaacagatgatctgaccattaagctggtgatcaaggcactcctggaagtggttcagtcaggtggcaaaaacattgaacttgctgtcatgaggcgagatcaatccctcaagattttaaatcctgaagaaattgagaagtatgttgctnnnnnnnnnnnnnnnnnnnnnnnnnnnnnnnnnnnnnnnnnnnnnnnnncatcatgatgaataaaatgtctttgcttgtaatttttaaattcatatcaatcatggatgagtctcgatgtgtaggcctttccattccatttattcacactgagtgtcctacaataaacttccgtatttttaaaaaa

SEQ ID NO: 22227 - DNA, 545 bp, Homo Sapiens
agcacgagggctctgaggcattttattataaaaacttagtactcatatacataaactaatacgaacttaaaattcatcatacatttacttcattttttagcttgaccttctagtaaatctttagcttcattgattttggctgctatataaggagatcctcctttgtcaggatgatttaaaagcataattcgtcgatgagcatctcttattttccctttattggcagtagggcttacacctagtattaatgctgcttcccgttttgtcattttgggttcaaacccacctctataatagccaccactgaaggcagattttggtaggctttgaaaaacttgttttacttgaggctccatatgcttcatggcttgcaaaacgtaacggcctgcaaatcctgcagcagcaatggtcagtccaactgctaccactgtactggccatggctccggctgggctcccttgcttccaccgggagcacggctcatcccagctcagaggccgcggccaacacctgcacgcctttaccagagagcgacgcaaccccca

SEQ ID NO: 22228 - DNA, 879 bp, Homo Sapiens
  misc_feature (796)..(811): n is a, c, g, or t
ggctgcaggaattcggcacgagggtttttcaaagcctaccaaaatctgccttcagtggtggctattatagaggtgggtttgaacccaaaatgacaaaacgggaagcagcattaatactaggtgtaagccctactgccaataaagggaaaataagagatgctcatcgacgaattatgcttttaaatcatcctgacaaaggaggatctccttatatagcagccaaaatcaatgaagctaaagatttactagaaggtcaagctaaaaaatgaagtaaatgtatgatgaattttaagttcgtattagtttatgtatatgagtactaagtttttataataaaatgcctcagagctacaattttaaaaaatgatttagcacaagctaaatctcaaagccttggtataattttcttgtttaaatttggggattttaaatcagattatagtttagaatatttgcgtattaattatgggcaagcacacaccttctgaatagaaatattgttcattactcatttagcagataatttgggacctatgtctacttttcaaggcaaagtgaagatgacagtccttgctctcagggagcccccactttaatgggagactgataaactggtaattagactgtgataaatagtatgatggaaattagcttaagctgtttaagtagggactcttcttattcggtggaaaggctgttccaggtacaggcaactggcctggcacttggatacttggaaccttgtatttaaaagtgaatttaaccacaactgagacctaagaaattgacctagggnnnnnnnnnnnnnnnnattctatgtacatataaaccatttttatttcatgcattaaaaatagtatgataaagatttcagagtac

SEQ ID NO: 22229 - DNA, 561 bp, Homo Sapiens
ccacgcgtccgtgagcgctgagaccaagggctaaagctgggagactgaaaaaatgcagaccgccggggcattattcatttctccagctctgatccgctgttgtaccaggggtctaatcaggcctgtgtctgcctccttcttgaatagcccagtgaattcatctaaacagccttcctacagcaacttcccactccaggtggccagacgggagttccagaccagtgttgtctcccgggacattgacacagcagccaagtttattggtgctggggcagccacagttggtgtggctggttcaggggctggcattggaaccgtgtttggcagcttgatcattggctatgccaggaacccgtctctcaagcagcagctcttctcctatgccattcttggctttgccctctctgaggccatggggcttttctgtttgatggtcgccttcctcatcctcttcgccatgtgaggctccatggggggtcaccggcctgttgctactgcaactccacaccattcttggtgctggggtgtgttaagctttaccattaaacacaacgtttctct

SEQ ID NO: 22230 - DNA, 625 bp, Homo Sapiens
ccggtcttctctgcagtgggagcagctctcctgccacagctcctcaccccctgaaaatgttcgcctgctccaagtttgtctccactccctccttggtcaagagcacctcacagctgctgagccgtccgctatctgcagtggtgctgaaacgaccggagatactgacagatgagagcctcagcagcttggcagtctcatgtccccttacctcacttgtctctagccgcagcttccaaaccagcgccatttcaagggacatcgacacagcagccaagttcattggagctggggctgccacagttggggtggctggttctggggctgggattggaactgtgtttgggagcctcatcattggttatgccaggaacccttctctgaagcaacagctcttctcctacgccattctgggctttgccctctcggaggccatggggctcttttgtctgatggtagcctttctcatcctctttgccatgtgaaggagccgtctccacctcccatagttctcccgcgtctggttggccccgtgtgttccttttcctatacctccccaggcagcctggggaacgtggttggctcagggtttgacagagaaaagacaaataaatactgtattaataag

SEQ ID NO: 22231 - DNA, 1215 bp, Homo Sapiens
  misc_feature (1076)..(1084): n is a, c, g, or t
acaaacatagactttattaaatgctgctcaatcccccaatgaagatctttcattacaaaacagttttccacacaactgcaagttaagagattggaatggtactctgataacaaaagatgtgagaaatacttgaccaagtaaaaacatacaagacctctatatagtcaaccttttcagagctctacagaggaagcctactgcagttcctttaaataaagccaggcagtgacaactagtgctctgtatcaccacactgtgggactcaaagcctccatccctgggtcaggagggactaggtgaaggacaggttgtgaggactggaaaggccctgccttcagcctttgagaggaagaggaggaatgaattgagaggcaagctgggtaattcacctgagctgcctctacccatctgttaccactctggagaattgcagaggaagggggatattcatgaggaacaatctgaagaattttggtttactttcccagcttttatttatattttgtgctttaaaaagcctggagatttaaggttttgcctaaattccagagtacagtaatgtatttattgagggaggggttagggcaggtaattccccccatcatatttctgggtgagacaaagagaagggtaaggatgataccttagttttattttaggaagtattttttcctaggatgtaactaaggtttgcagcagtgtgaaaagcacattataaaagggaaaaatatacagagcagactaccgtatctatgtgcaacacaatcaaagaagaattcaagtcataattcttaccactcccataattatctcactcatatcatagatgataaaattcattcatttctgtgaaacttcagaagtgacacaataaatccaatgattagacaaaggttacaatataatatggccatgatacagcacagggctacgtttagtccatatatttttccatttacagttgccagaaaaaattggccttttaattatattatactgatgaggtttgttttgtaatttttacatatttcaaaaaagcatacaaaactctgcctatccggcagaggtgggaggcnnnnnnnnnattcggcacttgtattgctgagaatactgtgcatgttgtaagcactattctgtttttctagagctttctttagctttagctcctctaattttttccataattcttcacgttccaattccttctcctcgtgc

SEQ ID NO: 22232 - DNA, 1533 bp, Homo Sapiens
  misc_feature (1241)..(1249): n is a, c, g, or t
ccacgcgtccgaatataaaggcagagaaattgagaaatactgagatgacagttttaagtataattaagcaatttgcttacaaaattacccaaagcaaatttttcttattttaaagtatttagttgttaagtaagaccaattatttaatttctatatctacacttacagtttaagatacacactttcctcatattatagtccaggtcttgacctaattatgtgactttgaataaatcccacatatctacagaatgtttcttccagctgcaataacctagacctagttagagagattttggtctcttctattaatatttagagaataatatatcagcataggtgtacatgtagaaacatgctgaaaaactaaattgttagctctagtcttatttcagttaactttatagtcagaaattactactaaaaatgttttttaaacttgaagttactttcaaggctaaaaagttacacaattgtgagtatagtttcacgattgaggtatttcacaatttcattcacagttgtgagtatatttttatatattggaataatttatcaaaatgaggtagtctaaaaaatattggctaaatataaaaatcctacattattaaatgttatctcactaatatttataaactgtcccttaccttttagctagcatattgtgttgtacagttcctggagaaagatacaacactaacagagccagtgatcagaggactgctgaaattttggccaaaaacctgcagtcagaaagaggtgatgtttttaggagaaattgaagaaatcttagatgtcattgaaccaacacagttcaaaaaaattgaagagccacttttcaagcagatatccaagtgtgtatccagttctcattttcaggttgcagaaagggcattgtacttctggaataacgaatatattcttagtttgattgaggagaacattgataaaattctgccaattatgtttgccagtttgtacaaaatttccaaagaacactggaatccgaccattgtagcactggtatacaatgtgctgaaaaccctaatggaaatgaatggcaagcttttcgatgaccttactagctcatacaaagctgaaagacagagagagaaaaagaaggaattggaacgtgaagaattatggaaaaaattagaggagctaaagctaaagaaagctctagaaaaacagaatagtgcttacaacatgcacagtattctcagcaatacaagtgccgaatnnnnnnnnngcctcccacctctgccggataggcagagttttgtatgcttttttgaaatatgtaaaaattacaaaacaaacctcatcagtataatataattaaaaggccaatttttttctggcaactgtaaatggaaaaatatatggactaaacgtagccctgtgctgtatcatgggcatagtatattgtaaccttttgtctaatcattggatttattgtgtcacttctgaagtttcacagaaatgaatgaattttatcatctatgataagagtgagataatttatgggagtgg

SEQ ID NO: 22233 - DNA, 908 bp, Homo Sapiens
gcacgagggatgctgggatccgggaagctaaagccaagcaggaaaaggtgtctgctcagtacctgagtgagatcgagatggccaaggcacagagagattacgaactgaagaaggccgcctatgacatcgaggtcaacacccgccgagcacaggctgacctggcctatcagcttcaggtggccaagactaagcagcagattgaggagcagcgggtgcaggtgcaggtggtggagcgggcccagcaggtggcagtgcaggagcaggagatcgcccggcgggagaaggagctggaggcccgggtgcggaagccagcggaagcggagcgctacaagctggagcgcctagccgaggcagagaagtcccaactaattatgcaggcggaggcagaagccgcgtctgtgcggatgcgtggggaagctgaggcctttgccataggggcccgagcccgagccgaggctgagcagatggccaagaaggcagaagccttccagctgtaccaagaggctgctcagctggacatgctgctagagaagctgccccaggtggcagaggagatcagtggtcccttgacttcagccaataagatcacactggtgtccagcggcagtgggaccatgggggcagccaaagtgactggggaagtactggacattctaactcgcctgccagagagtgtggaaagactcacaggcgtgagcatctcccaggtgaatcacaagcctttgagaacagcctgagccttcagccctcacagatgcccagcctcatagctgaagttgcctgaatgatcctcctgttgcatgtaacccactggcctccctgagcatgtccattgacagtgaggtcccacccttcatctctccttgccaaatagttgtgccttgtcttgaggggggttgctccccttg

SEQ ID NO: 22234 - DNA, 934 bp, Homo Sapiens
gcacgaggatcagcttcaggtggccaagactaagcagcagattgaggagcagcgggtgcaggtgcaggtggtggagcgggcccagcaggtggcagtgcaggagcaggagatcgcccggcgggagaaggagctggaggcccgggtgcggaagccagcggaagcggagcgctacaagctggagcgcctagccgaggcagagaagtaaatgtcccctccctgaccctgcctagctcacttgccacctaggcaccccaagatggagtgctgaagccttcaccacctggactcctatggatttcaggtttcaggagcgtctgcctctgcagcactgggcttttctcctgggagtaagggctgctgggctccaccctccacttcccttctgtccacaggtcccaactaattatgcaggcggaggcagaagccgcgtctgtgcggatgcgtggggaagctgaggcctttgccataggggcccgagcccgagccgaggctgagcagatggccaagaaggcagaagccttccagctgtaccaagaggctgctcagctggacatgctgctagagaagctgccccaggtggcagaggagatcagtggtcccttgacttcagccaataagatcacactggtgtccagcggcagtgggaccatgggggcagccaaagtgactggggaagtactggacattctaactcgcctgccagagagtgtggaaagactcacaggcgtgagcatctcccaggtgaatcacaagcctttgagaacagcctgagccttcagccctcacagatgcccagcctcatagctgaagttgcctgaatgatcctcctgttgcatgtaacccactgggcctccctgagcatgtccattgacagtgaggtcccacccctcatctctcctgccaaatagtttgtgccttggtcttgaaaggggtt

SEQ ID NO: 22235 - DNA, 806 bp, Homo Sapiens
gggtaccgggccccccccaacctccgacaaaggtcggtctacgcccttggacgagtcttctcgggagatggtctccactagccggaaggtcaggatcatggagcccaactatacccctgggaagaagagagaacctctacctgaagccaatccagagaacaatcttggatgatgggccgatacgtggagcccatcgaggatgtgccttgtaggaacattgtgagcctcgtgggcgtggaccagttcctggtgaagacgggcaccatcaccaccttcgagcacgcgcacaacttcctggacaaattgtaggcggcccttcctgcagcgcctgccgccccggggactcgcagcacccacagcaccacgtcctcgaattctcagacgacacctggagactgtcccgacacagcgacgctcccctgagaggtttctggggcccgctgcgtgccatcactcaaccataacacttgatgccgtttctttcaatatttatttccagagtccggaggcagcagacacgccctcttagtagggacttaatgggccggtcggggagggggaggcgggatgggacacccaacactttttccatttcttcagagggaaactcagatgtccaaactaattttaacaaacgcattaagaggtttatttgggtacatggcccgcagtggcttttgccccagaaaggggaaaggaacacgcgggtagatgatttctagcaggcaggaagtcctgtgcggtgtcaccatgagcacctccagctgtactagtgccattggaataataaatttgataaggtggtg

SEQ ID NO: 22236 - DNA, 1411 bp, Homo Sapiens
gcacgaggcctgggaagaaggaggacctctacctgaagccaatccagagaacaatcttgatgatgggccgctacgtggagcccatcgaggatgtgccttgtgggaacattgtgggcctcgtgggcgtggaccagttcctggtgaagacgggcaccatcaccaccttcgagcacgcgcacaacatgcgggtgatgaagttcagcgtcagccctgttgtcagagtggccgtggaggccaagaacccggctgacctgcccaagctggtggaggggctgaagcggctggccaagtccgaccccatggtgcagtgcatcatcgaggagtcgggagagcacatcatcgcgggcgccggcgagctgcacctggagatctgcctgaaggacctggaggaggaccacgcctgcatccccatcaagaaatctgacccggtcgtctcgtaccgcgagacggtcagtgaagagtcgaacgtgctctgcctctccaagtcccccaacaagcacaaccggctgtacatgaaggcgcggcccttccccgacggcctggccgaggacatcgataaaggcgaggtgtccgcccgtcaggagctcaagcagcgggcgcgctacctggccgagaagtacgagtgggacgtggctgaggcccgcaagatctggtgctttgggcccgacggcaccggccccaacatcctcaccgacatcaccaagggtgtgcagtacctcaacgagatcaaggacagtgtggtggccggcttccagtgggccaccaaggagggcgcactgtgtgaggagaacatgcggggtgtgcgcttcgacgtccacgacgtcaccctgcacgccgacgccatccaccgcggagggggccagatcatccccacagcacggcgctgcctctacgccagtgtgctgaccgcccagccacgcctcatggagcccatctaccttgtggagatccagtgtccagagcaggtggtcggtggcatctacggggttttgaacaggaagcggggccacgtgttcgaggagtcccaggtggccggcacccccatgtttgtggtcaaggcctatctgcccgtcaacgagtcctttggcttcaccgctgacctgaggtccaacacgggcggccaggcgttcccccagtgtgtgtttgaccactggcagatcctgcccggagaccccttcgacaacagcagccgccccagccaggtggtggcggagacccgcaagcgcaagggcctgaaagaaggcattcctgccctggacaacttcctggacaaatttgtaggcggcccttcctgcagcgcctgccgcccccggggactcgcagcactcacggcaccacgttctcgaattctcagacgacacctggagactgtcccgaaacagcgacgctcccctgagagtttctggggccc

SEQ ID NO: 22237 - DNA, 902 bp, Homo Sapiens
gcacgaggcaaccaccatgaacagcaaaggtcaatatccaacacagccaacctaccctgtgcagcctcctgggaatccagtataccctcagaccttgcatcttcctcaggctccaccctataccgatgctccacctgcctactcagagctctatcgtccgagctttgtgcacccaggggctgccacagtccccaccatgtcagccgcatttcctggagcctctctgtatcttcccatggcccagtctgtggctgttgggcctttaggttccacaatccccatggcttattatccagtcggtcccatctatccacctggctccacagtgctggtggaaggagggtatgatgcaggtgccagatttggagctggggctactgctggcaacattcctcctccacctcctggatgccctcccaatgctgctcagcttgcagtcatgcagggagccaacgtcctcgtaactcagcggaaggggaacttcttcatgggtggttcagatggtggctacaccatctggtgaggaaccaaggccacctttgtgccgggaaagacatcacataccttcagcacttctcacaatgtaactgctttagtcatattaacctgaagttgcagtttagacacatgttgttggggtgtctttctggtgcccaaactttcaggcacttttcaaatttaataaggaaccatgtaatggtagcagtacctccctaaagcattttgaggtaggggaggtatccattcataaaatgaatgtgggtgaagcccccctaagattttcctttatttctctggagtaatactgtaccatactggtctttgcttttataataaaacatcaattaggtttggagggattagagagtgactccttaacgagtttggggttttcctttggg

SEQ ID NO: 22238 - DNA, 1138 bp, Homo Sapiens
atcccccgggctgcaggaattcggcacgaggctccccttggagagctgttggtacctggagcctgaggagatattcagggaaaccagaagaggacaagaggaaaaggggaagggacttgggagaacctggcaccagaggctttcctgggacttccaggactcaaagccataggggcccacccgctacattcctgtctttgcccctcttcctacagatctgcctcttctccaagaaactcaaccactagtgacaatgaccagcctcctgactactccttctccaagagaagaactgatgaccaccccaattttacagcccactgaggccctgtccccttttatggagccagcacagcactcattgcagttgttatcaccgttgtcttcctcaccctgctctcggtcgtgatcttgatcttcttttacctgtacaagaacaaaggcagctacgtcacctatgaacctacagaaggtgagcccagtgccatcgtccagatggagagtgacttggccaagggcagcgagaaagaggaatatttcatctaatgactcccaggccccaaggagcttattcctggctccatcgctaacacgttgactgcttattatgggaaagttttctctgaagccagggagaagcattgattgatgtgggcaaatccaagctccagccaggtcgcagtcccaaatgccgacatcactgactccagggaccagggacatggagaaagctgtttatgatatctttaaccaggccctcttactagagctggtgtttgtgactggccaacaagatgtggctatgccaggggacatctgagtatgtgcccagtcatcttttttcacaggttgaagggagagaaaagattttgagttaaggtcattggctgctctactctgtcccctacctggtcacctagtgatagccccagtggagatactgtccatacaaggtcttcccagaggctggataccacagtaaaaggccaggccaggaggggtaggagactatggagatcttacctcctgataaatgtgctacaccccctaatctgagcccttcctttccgtgttccccaacaacctcatgcttacgtgatttttattcaaattaaaaattttcattgctacagaaatc

SEQ ID NO: 22239 - DNA, 939 bp, Homo Sapiens
ttgccgctcccagtcccgcgctcggcacgacatgaaatcccccgacgaggtgctacgcgagggcgagttggagaagcgcagcgacagcctcttccagctatggaagaagaagcgcggggtgctcacctccgaccgcctgagcctgttccccgccagcccccgcgcgcgccccaaggagctgcgcttccactccatcctcaaggtggactgcgtggagcgcacgggcaagtacgtgtacttcaccatcgtcaccaccgaccacaaggagatcgacttccgctgcgcgggcgagagctgctggaacgcggccatcgcgctggcgctcatcgatttccagaaccgccgcgccctgcaggactttcgcagccgccaggaacgcaccgcacccgccgcacccgccgaggacgccgtggctgccgcggccgccgcaccctccgagccctcggagccctccaggccatccccgcagcccaaaccccgcacgccatgagcccgccgcggtgagtgactgcccgcgtcccggcgagccctgcgccctaacagccgggaccggggcctttgggaaaaaccacttcaaccccagacggcggggcgggggcgctgcacctccttgggggacccggcgccccgcaatcgcgctggccccctcgcgtcagggtctcggggcccctcaggctggacccggaccggccctggcacagctctctgacccagtcctttccccacagggccatacgctggacgagtcggaccgaggctaggacgtggccggcgctctccagccctgcagcagaagaacttcccgtgcgcgcggatcctcgctccgttgcacgggcgccttaagttattggactatctaatatctatgtatttatttcgctggttctttgtagtcacatattttatagtcttaatatcttgttttgcatcactgtgccc

SEQ ID NO: 22240 - DNA, 737 bp, Homo Sapiens
gcacgaggctcggcacgacatgaaatcccccgacgaggtgctacgcgagggcgagttggagaagcgcagcgacagcctcttccagctatggaagaagaagcgcggggtgctcacctccgaccgcctgagcctgttccccgccagcccccgcgcgcgccccaaggagctgcgcttccactccatcctcaaggtggactgcgtggagcgcacgggcaagtacgtgtacttcaccatcgtcaccaccgaccacaaggagatcgacttccgctgcgcgggcgagagctgctggaacgcggccatcgcgctggcgctcatcgatttccagaaccgccgcgccctgcaggactttcgcagccgccaggaacgcaccgcacccgccgcacccgccgaggacgccgtggctgccgcggccgccgcaccctccgagccctcggagccctccaggccatccccgcagcccaaaccccgcacgccatgagcccgccgcgggccatacgctggacgagtcggaccgaggctaggacgtggccggcgctctccagccctgcagcagaagaacttcccgtgcgcgcggatcctcgctccgttgcacgggcgccttaagttattggactatctaatatctatgtatttatttcgctggttctttgtagtcacatattttatagtcttaatatcttgtttttgcatcactgtgcccattgcaaataaatcacttggccagtttgcttttctac

SEQ ID NO: 22241 - DNA, 879 bp, Homo Sapiens
gcacgaggcaataattcagagcacattacctatctggaacataatccttatgaaaagttctccaaagaagagctgaaaaaggcccaggatgttttggtgcaggagatggaagtggttaaacaaggaatgagccatggagagctctcaagtgaagcttataaccaggtgtgggaagaatgctacagtcaagttttatatcttcctgggcagagccgctacacacgggccaatctggctagtaaaaaggacagaattgaatcacttgaaaagaggctcgagataaacaggggtcacatgacgacagaagccaagagggctgcaaagatggaaaagaagatgaaaattttgcttgggggttaccagtctcgtgctatggggctcatgaaacagttgaatgacttatgggaccaaattgaacaggctcacttggagttacgcacttttgaagaactcaagaaacatgaagattctgctattccccggaggctagagtgtctaaaagaagacgttcagcgacaacaagaaagagaaaaggaacttcaacatagatatgctgatttgctgctggagaaagagactttaaagtcaaaattctgaagtacagtttatattctgtcacaggattaattaattgccggttttcatactctagaaggctgaaactgatgtttatcttcattgacaaatttacccaccatctgtggtttttcagttgtttattttaaatgatatcgatcttacacattctgtgtataaagaccttaactccacaggacggacattttagagtttaaattattaaggctatcattctttagtaatgtcatatttgcaaacttttttagttttgggcttttaatttaaaaagcctaattttaa

SEQ ID NO: 22242 - DNA, 853 bp, Homo Sapiens
gcacgaggctcacctataaaaccctttaggtgcaagataaatccttcttaagcttgatattttgttacagtaattgagctataaggagttctagtgtatttttgctttgagacacatacatgaacgcatggtacctttttagccctgttatttaatagcctgcttttctcatgtatgctgatgtgatcttcccctgctctccagataaacaggggtcacatgacgacagaagccaagagggctgcaaagatggaaaagaagatgaaaattttgcttgggggttaccagtctcgtgctatggggctcatgaaacagttgaatgacttatgggaccaaattgaacaggctcacttggagttacgcacttttgaagaactcaagaaacatgaagattctgctattccccggaggctagagtgtctaaaagaagacgttcagcgacaacaagaaagagaaaaggaacttcaacatagatatgctgatttgctgctggagaaagagactttaaagtcaaaattctgaagtacagtttatattctgtcacaggattaattaattgccggttttcatactctagaaggctgaaactgatgtttatcttcattgacaaatttacccaccatctgtggtttttcagttgtttattttaaatgatatcgatcttacacattctgtgtataaagaccttaactccacaggacggacattttagagtttaaattattaaggctatcattcttttagtaatgtcatatttgcaaacttttttagttttggcctttaatttaaaaagccctaatttaaagtgctgcctgtgagtaactcttgaataaaaaccaaatataaaaaattg

SEQ ID NO: 22243 - DNA, 500 bp, Homo Sapiens
ccaaagaagccccattttattacagagaaaatacaaagccgtttcctcacagggaaaagtacagtttcccttctccagggtgacagatgagccttttccgaagttctcagctttctcttctatcgaaacttcccatgtcggttaaagtgtttgtagagatagcggatgcgtttattaaggttgtgcaggtcatcagcgaacattctacttccaaccattttcctctttcggatacaacgttgcaattcattccctttccaacctcgaagccatatgggccccctgatcagttctttggggtgcttttcaaagtttcccaggatcccgatgttgtcatacactccgaacatggcccttttctcgttccaacgatcaaccactttggggggcgggagagtgagccttataccgatcaatctaggcacacctcctttcctgggggtgactgaatgcccagccagggacgcgacgtctctggccagcagaaatacgcctcgtgc

SEQ ID NO: 22244 - DNA, 647 bp, Homo Sapiens
ccccgggctgcaggaattcggcacgaggagaagccccattttattacagagaaaatacaaagccgtttcctcacagggaaaagtacagtttcccttctccagggtgacagatgagccttttccgaagttctcagctttctcttctatcgaaacttcccatgtcggttaaagtgtttgtagagatagcggatgcgtttattaaggttgtgcaggtcatcagcgaacattctacttccaaccattttcctctttcggatacaacgttgcaattcattccctttccaacctcgaagccatatgggccccctgatcagttctttggggtgcttttcaaagtttcccaggatcccgatgttgtcatacactccgaacatggcccttttctcgttccaacgatcaaccactttggggggcgggagagtgagccttataccgatcaatctaggcacaccaagagagaagcttctgcacgccagaggcacccagtcccacaggcgcctacctgccccggataagaggttccctgccatttctctagtctccccccttcaacagcacaccaaataagcccaagaagatgacaggaaccgtccccgccaacttcacacgagtgctaaggcgaagacagccatcttgggccttcggac

SEQ ID NO: 22245 - DNA, 872 bp, Homo Sapiens
cattgttgaaagttgttcatattttattttctaattgcagtagtttgtatctgatttctttacatcattccatatgatgggaaaggaaacctctaaatcagttagtactaattagctgtcatgaatctatagtaaaaggaatcactgaagatttaaaaataaaatattatcaaaggtatcaatattaataactataatctttttctaaagaaatatagaacagttggtattttgtaaaatatcttcaagcaaatgaaagacttcatctgttagtcttatgccaaattaaatgagtttggtagcaatttcaaatactatgttgacatgaatgtacaaatatacattctacgtgttccttctattgtacgaatcaaagactgcacgcaaaagaaatgggaaatacagaatacagaaaacatgcaccttctatcttacatagtactggatatcaagtgaaaagagcaaacactgatctaagtacattacatgtataaacatctaaattatcaatcctcccaacaattctgcatgacaggtactgttttcatcatccccatcttagaggtgaagaacctgaagctgagacaagcaggagaatgtgccagtggtcacctgcaggtagagggccaagtaagggtgggggcaaaggccctttgaccccaggatccatgctctcccctctccagtacactgcctcacaagtacctagcaacttgcagggctaggaggggggaataagagaggacaaagtccaatacattctccaaattgctcagttcattctatacctgagagtcttgtgtcttttcacattttgctcttttctgaataggaagaaaaaaagcaaagataaaagggatggtagtttaggg

SEQ ID NO: 22246 - DNA, 574 bp, Homo Sapiens
ccccgggctgcaggaattcggcacgaggggatcatgaaaacagtacctgtcatgcagaattgttgggaggattgataatttagatgtttatacatgtaatgtacttagatcagtgtctgctcttttcacttgatatccagtactatgtaagatagaaggtgcatgtcttctgtattctgtatttcccatttcttttgcgtgcagtctttgattcgtacaatagaaggaacacgtagaatgtatatttgtacattcatgtcaacatagtatttgaaattgctaccaaactcatttaatttggcataagactaacagatgaagtctctcatttgcttgaagatattttacaaaataccaactgttctatatttctttagaaaaagattatagttattaatattgatacctctgataatattttattcttaaatcttcagtgattccttttactatagattcatgacagctaattagtactaactgatttagaggtttcctttcccatcatatggaatgatgtaaagaaatcagatacaaactactgcaattagaaaataaaatatgaacaactttc

SEQ ID NO: 22247 - DNA, 2058 bp, Homo Sapiens
gcacgaggaagccacagatctcttaagaactttctgtctccaaaccgtggctgctcgataaatcagacagaacagttaatcctcaatttaagcctgatctaacccctagaaacagatatagaacaatggaagtgacaacaagattgacatggaatgatgaaaatcatctgcgcaactgcttggaaatgtttctttgagtcttctctataagtctagtgttcatggaggtagcattgaagatatggttgaaagatgcagccgtcagggatgtactataacaatggcttacattgattacaatatgattgtagcctttatgcttggaaattatattaatttacgtgaaagttctacagagccaaatgattccctatggttttcacttcaaaagaaaaatgacaccactgaaatagaaactttactcttaaatacagcaccaaaaattattgatgagcaactggtgtgtcgtttatcgaaaacggatattttcattatatgtcgagataataaaatttatctagataaaatgataacaagaaacttgaaactaaggttttatggccaccgtcagtatttggaatgtgaagtttttcgagttgaaggaattaaggataacctagacgacataaagaggataattaaagccagagagcacagaaataggcttctagcagacatcagagactataggccctatgcagacttggtttcagaaattcgtattcttttggtgggtccagttgggtctggaaagtccagttttttcaattcagtcaagtctatttttcatggccatgtgactggccaagccgtagtggggtctgataccaccagcataaccgagcggtataggatatattctgttaaagatggaaaaaatggaaaatctctgccatttatgttgtgtgacactatggggctagatggggcagaaggagcaggactgtgcatggatgacattccccacatcttaaaaggttgtatgccagacagatatcagtttaattcccgtaaaccaattacacctgagcattctacttttatcacctctccatctctgaaggacaggattcactgtgtggcttatgtcttagacatcaactctattgacaatctctactctaaaatgttggcaaaagtgaagcaagttcacaaagaagtattaaactgtggtatagcatatgtggccttgcttactaaagtggatgattgcagtgaggttcttcaagacaactttttaaacatgagtagatctatgacttctcaaagccgggtcatgaatgtccataaaatgctaggcattcctatttccaatattttgatggttggaaattatgcttcagatttggaactggaccccatgaaggatattctcatcctctctgcactgaggcagatgctgcgggctgcagatgattttttagaagatttgcctcttgaggaaactggtgcaattgagagagcgttacagccctgcatttgagataagttgccttgattctgacatttggcccagcctgtactggtgtgccgcaatgagagtcaatctctattgacagcctgcttcagattttgcttttgttcgttttgccttctgtccttggaacagtcatatctcaagttcaaaggccaaaacctgagaagcggtgggctaagataggtcctactgcaaaccacccctccatatttccgtaccatttacaattcagtttctgtgacatctttttaaaccactggaggaaaaatgagatattctctaatttattcttctataacactctatatagagctatgtgagtactaatcacattgaataatagttataaaattattgtatagacatctgcttcttaaacagattgtgagttctttgagaaacagcgtggattttacttatctgtgtattcacagagcttagcacagtgcctggtaatgagcaagcatacttgccattacttttccttcccactctctccaacatcacattcactttaaatttttctgtatatagaaaggaaaactagcctgggcaacatgatgaaaccccatctccactgc

SEQ ID NO: 22248 - DNA, 1662 bp, Homo Sapiens
ccgagttacgagtcggcgaaagcggcgggaagttcgtactgggcagaacgcgacgggtctgcggcttaggtgaaaatgcctcgtgtaaaagcagctcaagctggaagacagagctctgcaaagagacatcttgcagaacaatttgcagttggagagataataactgacatggcaaaaaaggaatggaaagtaggattacccattggccaaggaggctttggctgtatatatcttgctgatatgaattcttcagagtcagttggcagtgatgcaccttgtgttgtaaaagtggaacccagtgacaatggacctctttttactgaattaaagttctaccaacgagctgcaaaaccagagcaaattcagaaatggattcgtacccgtaagctgaagtacctgggtgttcctaagtattgggggtctggtctacatgacaaaaatggaaaaagttacaggtttatgataatggatcgctttgggagtgaccttcagaaaatatatgaagcaaatgccaaaaggttttctcggaaaactgtcttgcagctaagcttaagaattctggatattctggaatatattcacgagcatgagtatgtgcatggagatatcaaggcctcaaatcttcttctgaactacaagaatcctgaccaggtgtacttggtagattatggccttgcttatcggtactgcccagaaggagttcataaagaatacaaagaagaccccaaaagatgtcacgatggcactattgaattcacgagcatcgatgcacacaatggtgtggccccatcaagacgtggtgatttggaaatacttggttattgcatgatccaatggcttactggccatcttccttgggaggataatttgaaagatcctaaatatgttagagattccaaaattagatacagagaaaatattgcaagtttgatggacaaatgttttcctgagaaaaacaaaccaggtgaaattgccaaatacatggaaacagtgaaattactagactacactgaaaaacctctttatgaaaatttacgtgacattcttttgcaaggactaaaagctataggaagtaaggatgatggcaaattggacctcagtgttgtggagaatggaggtttgaaagcaaaaacaataacaaagaagcgaaagaaagaaattgaagaaagcaaggaacctggtgttgaagatacggaatggtcaaacacacagacagaggaggccatacagacccgttcaagaaccagaaagagagtccagaagtaattcagatgctgtgaaccagatttccttttctttgttttcttttgacttttttctccttttctgttagaactgttttattttcctgtgagtcttgcgaggtggaattaatgattaaatactcatgtgttcagaaaacataaactttttttataaaaatattttgtacaattcattaaaggctaatttatgaaatttgaaaatcttcaggttatactccttaagttatcccaaagccgtgtgtttgtgatgttttggagtacatatatatgaaaattattatgacacgcacttttctaatcattgtacatttctcagagtggataaaaatgtttgacaaagtcctcacttttaaggaaatgcaaagcttaaaataaaactctcttttgtttgatgcag

SEQ ID NO: 22249 - DNA, 4710 bp, Homo Sapiens
cacaatgacatgcagacctgcatattggagctggacggagaaactgggctaatgtgacagacagcaacaagagtaaggcagttgcttcgctattgagagaaagaaccatatgaagaaatttcggcagaggcggaccgggaacctcagcagctgcagaactactggtcagaagtgcgctacacggtgcgctgcatctaccgccaggcaggaaccccgctggcagatgaccaggaccagtctctggtgcctgacaaggagggagtgaaggagctcgtggataggctctgcgagagggacccctaccagctgtaccagcgtctggaacagcaagctcgagagtatgtgctggagatgaaggtccgcctgctccggcagctgtcggctgcggccaaggtgaaggcaccatctggcctgcagggcccgccgcaagcgcaccagttcatctccctcctgcttgaggagtacggcgccctctgccaggccgcacgctccatcagcaccttccttggcactctggaaaatgaacacttgaaaaagttccaagtgacgtgggaactgcataataaacacctgtttgaaaatctggtcttttcggagccacttcttcagagcaacttgcccgcactggtgtcacagatcaggctaggaaccaccacacacgacacctgcagtgaggacacatacagtaccttgctgcagaggtaccagcgttccgaggaggagctgcgcagagtcgccgaggagtggctggagtgccagaagaggatcgacgcctatgtcgacgagcagatgacaatgaaaaccaagcagcgcatgttaacagaagactgggagctttttaaacaaagaagattcattgaagaacagttaaccaataagaaagcagttactggcgagaacaacttcacagacaccatgaggcacgtgttatcgtcccggctgagcatgcccgactgccccaactgcaactacaggagaagatgtgcttgcgatgactgcagtctctcacacatcctcacgtgtggtatcatggacccccccgtcactgatgacatccacattcaccagctcccacttcaagtggatcctgctcctgactatcttgctgagaggagcccgcccagtgtgtcatctgcaagctcggggtccggctccagctctcccatcacaattcagcagcaccccaggctcatcctcacagacagtggctcggcaccaactttttgtagtgatgatgaagatgttgcaccattgtcagccaaatttgctgatatttatccattgagtaattatgatgataccgaggtggtggccaacatgaatggaatccacagcgaattgaatggtggcggggaaaacatggccctgaaggatgagtctcctcagataagcagtaccagcagtagttcctcagaagctgatgatgaagaagcggacggcgagagtagtggggagcccccaggggccccgaaggaagatggagtgctgggaagcaggagccccaggacagaggagagcaaagcagacagtccacccccatcctacccaacacagcaggctgaacaagctccaaacacttgtgaatgtcatgtttgtaagcaagaagcttctggactgacaccatctgcaatgacagccggagcccttcctcctggccatcagttcttgagcccagagaagcccacacaccctgcactgcacctttaccctcacatccatggacatgtgcctttgcacactgttccacacctgccacgccctctcatccaccccaccttgtatgcaacgccccccttcacacacagtaaggctttaccgccagcacctgttcagaatcacacaaataagcatcaggtattcaatgcatctcttcaagaccatatttatccgagctgttttgggaatactccagagtggaatagttctaaatttataagtctttggggatcagaagtgatgaatgataagaactggaatcctggcactttcttgccagatacaatttctgggagtgaaatattagggccaacactctcagaaacaagaccggaagcccttccacctccatctagcaatgaaacacctgcagtctcggatagtaaagagaaaaagaatgctgcaaaaaagaaatgtttatacaatttccaagatgctttcatggaagcaaataaagttgtcatggccacgtcatcagccacgtcctctgtgtcctgcacagctaccacagtgcagtccagcaacagccagttcagagtgtcatccaagagacctccttcagtaggtgacgtgtttcatggcatcagcaaggaggaccacagacactcggccccagccgccccgaggaatagccccacgggcttggcccccctcccagcgctctcgcctgctgcgctgtcacctgctgcgctctcacctgcctccacacctcaccttgcaaatcttgcagccccatcattccccaaaacagcaaccacaactcctgggtttgtggacacacgcaagagtttctgtcctgcacccctacccccggccacagatggctccattagcgcccctccaagtgtctgcagtgaccctgactgcgaagggcaccgctgcgagaatggtgtctacgacccacagcaggatgatggggacgagagtgcagatgaggacagctgctctgagcacagctccagcacctcgacctccaccaaccagaaggagggcaagtactgcgactgctgctactgcgaattctttgggcacggcgggcctccagctgcaccaacaagtagaaattatgcagaaatgagggaaaagcttcgcttacggctgaccaagaggaaagaggagcaacctaaaaaaatggaccagatctcagaaagggaaagcgtcgttgaccatcggagggtggaggatttgttgcagtttataaatagctccgaaaccaaaccagtgagcagcacgcgtgcagcgaagcgagcaaggcataagcaaaggaagctggaggagaaagctcgcctagaagcagaggccagggcccgggagcacctgcacctccaggaggagcagaggcggcgggaggaggaggaggatgaggaagaagaggaggatcgtttcaaggaggaatttcagcggcttcaggagcttcagaagctaagagctgtaaaaaagaagaagaaggagaggccaagtaaagactgccccaagttggacatgctcactagaaatttccaggcagcaacagagtctgttcctaactctggaaacatccacaatggctcactagagcaaactgaagaaccagaaacctcttctcactccccatccaggcatatgaaccactcagagcccaggccagggctaggggctgatggggatgctgcagaccccgtcgacaccagagactccaaatttctcctccccaaggaggtgaatgggaagcagcatgagccactctcttttttcttcgacatcatgcagcaccataaagaaggaaatggcaagcagaagctgaggcagaccagcaaggccagcagcgagccagcgaggaggcccacagagccccccaaggccacagaggggcagtccaagccccgggcccagactgagtcaaaggctaaggtggtcgacctcatgtccatcacagagcagaaaagagaggagagaaaagtcaacagtaataacaataacaaaaagcagctgaaccacatcaaggacgaaaagtcaaacccaacccctatggagcccacctctcccggtgagcatcagcagaacagcaagctggtgctggcagagtcccctcagccaaagggcaagaacaagaaaaataagaagaagaaaggagacagagtcaacaattcaattgatgatgtctttctacctaaagatattgacctagacagtgtggatatggatgagacagagagggaagtggaatatttcaaaaggttctgcttggattctgctagacagacccgacaaagactgtctatcaactggtccaattttagcttgaaaaaagccacctttgctgcccactgaatgaggactccctggagagggacacgcgagaggcaggccaggctgcaccaccccaagagccacgcccctcgctggcgccccagagccgtggtgcttgccaagggctgtgcggagctggtgctgcctgaaaccccagaccgagaagttgatgctcggcccacgccgttagctcgtgtgcgtgtagtctgtgcgtgagactccttcgattgtagctctgtgctgtcggattggaacagtagttcccgccaagtcctcccaccaccgcggcctcggaggcctgggccgtggccagataggagtttgcatcatccacgtggctccgttgcctctgcattgcgccctgtcctgtcatgtgtcctcaccggggtatcggccgtcactcagctctcctgtgcccctgcgtctcaccctaggcgggctgggcggggcaggcctcctttgttctccacaatctactgtctccgagtgtacacgttgcgctgtttgtgtttgatccccctgacttgtagccagcttgtgtaagatcccttgcagaacgagaaagttaaaaacaagcccacccagtactcacaccatcaagtctgttatagagtgtacgactgtattaacacggaggcctgcctggctacttttttaacatattgttaagtaatattaaaatcatgtctttctttttgaaagatg

SEQ ID NO: 22250 - DNA, 4833 bp, Homo Sapiens
cacaatgacatgcagacctgcatattggagctggacggagaaactgggctaatgtgacagacagcaacaagagtaaggcagttgcttcgctattgagagaaagaaccatatgaagaaatttcggcagaggcggaccgggaacctcagcagctgcagaactactggtcagaagtgcgctacacggtgcgctgcatctaccgccaggcaggaaccccgctggcagatgaccaggaccagtctctggtgcctgacaaggagggagtgaaggagctcgtggataggctctgcgagagggacccctaccagctgtaccagcgtctggaacagcaagctcgagagtatgtgctggagatgaaggtccgcctgctccggcagctgtcggctgcggccaaggtgaaggcaccatctggcctgcagggcccgccgcaagcgcaccagttcatctccctcctgcttgaggagtacggcgccctctgccaggccgcacgctccatcagcaccttccttggcactctggaaaatgaacacttgaaaaagttccaagtgacgtgggaactgcataataaacacctgtttgaaaatctggtcttttcggagccacttcttcagagcaacttgcccgcactggtgtcacagatcaggctaggaaccaccacacacgacacctgcagtgaggacacatacagtaccttgctgcagaggtaccagcgttccgaggaggagctgcgcagagtcgccgaggagtggctggagtgccagaagaggatcgacgcctatgtcgacgagcagatgacaatgaaaaccaagcagcgcatgttaacagaagactgggagctttttaaacaaagaagattcattgaagaacagttaaccaataagaaagcagttactggcgagaacaacttcacagacaccatgaggcacgtgttatcgtcccggctgagcatgcccgactgccccaactgcaactacaggagaagatgtgcttgcgatgactgcagtctctcacacatcctcacgtgtggtatcatggacccccccgtcactgatgacatccacattcaccagctcccacttcaagtggatcctgctcctgactatcttgctgagaggagcccgcccagtgtgtcatctgcaagctcggggtccggctccagctctcccatcacaattcagcagcaccccaggctcatcctcacagacagtggctcggcaccaactttttgtagtgatgatgaagatgttgcaccattgtcagccaaatttgctgatatttatccattgagtaattatgatgataccgaggtggtggccaacatgaatggaatccacagcgaattgaatggtggcggggaaaacatggccctgaaggatgagtctcctcagataagcagtaccagcagtagttcctcagaagctgatgatgaagaagcggacggcgagagtagtggggagcccccaggggccccgaaggaagatggagtgctgggaagcaggagccccaggacagaggagagcaaagcagacagtccacccccatcctacccaacacagcaggctgaacaagctccaaacacttgtgaatgtcatgtttgtaagcaagaagcttctggactgacaccatctgcaatgacagccggagcccttcctcctggccatcagttcttgagcccagagaagcccacacaccctgcactgcacctttaccctcacatccatggacatgtgcctttgcacactgttccacacctgccacgccctctcatccaccccaccttgtatgcaacgccccccttcacacacagtaaggctttaccgccagcacctgttcagaatcacacaaataagcatcaggtattcaatgcatctcttcaagaccatatttatccgagctgttttgggaatactccagagtggaatagttctaaatttataagtctttggggatcagaagtgatgaatgataagaactggaatcctggcactttcttgccagatacaatttctgggagtgaaatattagggccaacactctcagaaacaagaccggaagcccttccacctccatctagcaatgaaacacctgcagtctcggatagtaaagagaaaaagaatgctgcaaaaaagaaatgtttatacaatttccaagatgctttcatggaagcaaataaagttgtcatggccacgtcatcagccacgtcctctgtgtcctgcacagctaccacagtgcagtccagcaacagccagttcagagtgtcatccaagagacctccttcagtaggtgacgtgtttcatggcatcagcaaggaggaccacagacactcggccccagccgccccgaggaatagccccacgggcttggcccccctcccagcgctctcgcctgctgcgctgtcacctgctgcgctctcacctgcctccacacctcaccttgcaaatcttgcagccccatcattccccaaaacagcaaccacaactcctgggtttgtggacacacgcaagagtttctgtcctgcacccctacccccggccacagatggctccattagcgcccctccaagtgtctgcagtgaccctgactgcgaagggcaccgctgcgagaatggtgtctacgacccacagcaggatgatggggacgagagtgcagatgaggacagctgctctgagcacagctccagcacctcgacctccaccaaccagaaggagggcaagtactgcgactgctgctactgcgaattctttgggcacggcgggcctccagctgcaccaacaagtagaaattatgcagaaatgagggaaaagcttcgcttacggctgaccaagaggaaagaggagcaacctaaaaaaatggaccagatctcagaaagggaaagcgtcgttgaccatcggagggtggaggatttgttgcagtttataaatagctccgaaaccaaaccagtgagcagcacgcgtgcagcgaagcgagcaaggcataagcaaaggaagctggaggagaaagctcgcctagaagcagaggccagggcccgggagcacctgcacctccaggaggagcagaggcggcgggaggaggaggaggatgaggaagaagaggaggatcgtttcaaggaggaatttcagcggcttcaggagcttcagaagctaagagctgtaaaaaagaagaagaaggagaggccaagtaaagactgccccaagttggacatgctcactagaaatttccaggcagcaacagagtctgttcctaactctggaaacatccacaatggctcactagagcaaactgaagaaccagaaacctcttctcactccccatccaggcatatgaaccactcagagcccaggccagggctaggggctgatggggatgctgcagaccccgtcgacaccagagactccaaatttctcctccccaaggaggtgaatgggaagcagcatgagccactctcttttttcttcgacatcatgcagcaccataaagaaggaaatggcaagcagaagctgaggcagaccagcaaggccagcagcgagccagcgaggaggcccacagagccccccaaggccacagaggggcagtccaagccccgggcccagactgagtcaaaggctaaggtggtcgacctcatgtccatcacagagcagaaaagagaggagagaaaagtcaacagtaataacaataacaaaaagcagctgaaccacatcaaggacgaaaagtcaaacccaacccctatggagcccacctctcccggtgagcatcagcagaacagcaagctggtgctggcagagtcccctcagccaaagggcaagaacaagaaaaataagaagaagaaaggagacagagtcaacaattcaattgatggagtttcgctcttgttgcccagtctggggtacaatggtgcaatcttggctcactgcaaccttcgcctcccaggttcaagcgattgtgctgcctcagcctcccaagtagttggaattacagatgatgtctttctacctaaagatattgacctagacagtgtggatatggatgagacagagagggaagtggaatatttcaaaaggttctgcttggattctgctagacagacccgacaaagactgtctatcaactggtccaattttagcttgaaaaaagccacctttgctgcccactgaatgaggactccctggagagggacacgcgagaggcaggccaggctgcaccaccccaagagccacgcccctcgctggcgccccagagccgtggtgcttgccaagggctgtgcggagctggtgctgcctgaaaccccagaccgagaagttgatgctcggcccacgccgttagctcgtgtgcgtgtagtctgtgcgtgagactccttcgattgtagctctgtgctgtcggattggaacagtagttcccgccaagtcctcccaccaccgcggcctcggaggcctgggccgtggccagataggagtttgcatcatccacgtggctccgttgcctctgcattgcgccctgtcctgtcatgtgtcctcaccggggtatcggccgtcactcagctctcctgtgcccctgcgtctcaccctaggcgggctgggcggggcaggcctcctttgttctccacaatctactgtctccgagtgtacacgttgcgctgtttgtgtttgatccccctgacttgtagccagcttgtgtaagatcccttgcagaacgagaaagttaaaaacaagcccacccagtactcacaccatcaagtctgttatagagtgtacgactgtattaacacggaggcctgcctggctacttttttaacatattgttaagtaatattaaaatcatgtctttctttttgaaagatg

SEQ ID NO: 22251 - DNA, 3006 bp, Homo Sapiens
gctgagggcctggctggagcacactcacggaaccacgccaacgcctggcctgtagccagctcccacctcccctcccaccttctaaaatgcttgcggatctcacgtggccgaccctaaccagatacacatggggaaaggaatcaggtggcacacataccgcctttactccatagagaacttccaattgtgggtaagaacaaagccccacctctgcctaatagatgcagttttccacctgcagccaaaaagacaacctgttattagcttttttcccagaggacaggcatctctatgaaactgccattgcaaaatttgccgacagtgagataaccagctccattttgcttctaacctccatgccctccttgtttactgctgcacgcaggttgaactgtgggaggaacttagtttaaaacaaagatgataacagccctttcccaaaggaaacctttcctggggattagcctgcttttgtgggaccaacagattagccacaagattagaaactacggttgaagagtcacgcagcgggaggctacaggattctgaccctccccaaactgctcctggcgataacatcaccatcgtaaagcctaagatcagcacttggtgggtcacctggcaccacccaggctcatctgatgttgtggcacccaggaactgactcagtgcgaaaacagcttcgactccctgtgatttcatctctgacctgaccaatgggtacttctgactcactggctgccccccacccaccagcttatctttaaaaactccaaaccccagatgctcagggagaccgagtaataataaaactccagtctcccacacagctagctctgcgtgaattaccttttctctgttgcaaatgccctttcttgataaattggctgtctaggtaacagggaaggtgaacccactgggcagttacacttttatccacccttccagctggatcacgcgccctcttcaatgacatgacacgcagctagagtgtatgagcttgctgccggcaccttccgtcctggatcgcatagcaaggcctcaatggacagccaggtgcctggtccggtcccacttttttttctgtcctgttctcgtttcctctttgcttggccaaagagggttgggccagggtcctgagtgcaagggcttggcttggtgaattaaagtggcagtagccgtgtggcagagaaaatttgtagatgggtgaaatcctgggcctacacagtgacaaagtgtatatagacagccagcctagttggtggatgtgacaaccccagactcttctagatttgtggatccgtgcacctgccagacctgtctctgagccatctggggaggctgggtcggcacagacgcaacccagtctcctcccacctccgagagtgcagtgtcctgaatggagaaccccagcacccagaagcatccactgaaggacgtgtgtcctggaaccctggctgcacccacagatacagccactcctgggcccatgtggatgtaaccttcgagtgccggaatgcctcgtctccatggagaccaaactcaagggcctgactggcccagtctaccgagaccatgagacctgctgtgcccctcggccaggccaacccaaattcttttaaataaaaggcacaagccacagccacaccagcaggaagtggatacaggataaggggcagggctcacatctcatcctcatcagcctttgaccaggcgacggagtctgtgatagctagcttatctgctctatgctccagggacctggccggaacgagccgagttgctgtcctcatggaactctcatcctagtggggcagagacaaggacggtgtaacgtgcccgggggtcagcaccacagacaaaacgcagggagcacggcacagtgtgggccagggaaggcctggcttcccaagggtgtgggcgcgagcagcatggctgtggggagttccaggtgcagagaactactccagagacgaagccaggcctgcgaggaggccggagcgcatgaggggaaggcacgaggcaaggctgccagggctgtgctggtggtgcgggacggtcctgtgggggtagctgcggagatggcactgatgccttcggctccagcagcatcctgggctggtgcgggccaataaggggcagggttggggcaggatgaaaggcacaagccacagccatgtcaagcaggaagtggatgcagggtacagcctgtcagggtcagggtgaaaggcagggaggcgggtaggccataggtgaatttggagcagcctgtagaggacaggatgtgccatcaaagacttgttcttgggtccagctgagactgtcccttggggcttcctgtcaccttgtgcaggatagtgagaccatccttggaaaacccatcgggactgcagagcgcggctcagagctgactgtccaggcctggcaggggctgacccctgggcgctggtgcaccctccgtgcggcctcttggaggaagcacacaaggcgacagttcccagctgccgcctgagatgcagcatctgctttactccagcccagcactgctcaccgtcactgcccactcttatgattttacttcccttcatatttgtgattttgcaaagatggtgttgacttacagctgcagcatcaaatgactgactgccaccagcttggccccagctcagggacatgtctgagcccaggcagagcaccctagtggccgggaagcctcacctggagctcctgcgggtggctgcagtccgccaggtgatccgtgaggagggcttggagaggccccatgatggcgtggaaggatggcagggacccgtacatgagcacgcagcgcttcagcagggccaggcccacagccaggcaggacagtctgtgagggcaggaggcaagaggaggtccaacttgttctgtttgtcactgacaaaaccaataacgtggcaaaaatgaacttccccacttccactaggctgaaaactccagtgtggccaccttggccggccagggttgggc

SEQ ID NO: 22252 - DNA, 2110 bp, Homo Sapiens
ggatccaagctattgtcctgcccatggcttcccatctcaggacgctctctggccgctatcatcccagcagtggagttcagcccactactctgaaccagccgcaggtggctgctatgggactgaagccatgaatggtgccggccctggccccgccgcagccgccccggtcccagtcccggtcccggtcccggactggcggcagttctgcgagctgcatgcgcaggcggccgccgtggactttgcgcacaagttctgccgtttcctgcgggacaacccagcttacgacacgcccgacgccggcgcctccttctcccgccacttcgccgccaacttcctggacgtcttcggcgaggaggtgcgccgcgtgctggtggctgggccgacgactcggggcgcggccgtgagcgcagaggccatggagccggagctcgcggacacctctgcactcaaggcggcgtcctacggccactcgcggagctcggaggacgtgtccacgcacgcggccaccaaggcccgcgttcgcaagggcttctcgctgcgcaacatgagcctgtgcgtggtggacggcgtgcgcgacatgtggcaccggcgcgcctcgcccgagcccgacgcggcagctgccccgcgcaccgccgagccccgcgacaagtggacgcggcgcctgaggctgtcgcggacgctggctgccaaggtggagctggtggacattcaacgcgagggggcgctgcgcttcatggtggccgacgacgcggccgcgggctccgggggctcggctcagtggcagaagtgccgcctgctcctgcgcagggctgtggccgaggaacgcttccgcctggagttcttcgtgccgcccaaagcctccaggcccaaggtcagcatcccactgtcagccatcattgaggtccgcaccaccatgcccctggaaatgccagagaaggataacacattcgtcctcaaggtagagaatggagccgaatacatcttggagaccatcgactctctgcagaagcactcgtgggtagctgacatccagggctgcgtggaccccggtgacagtgaggaagacaccgagctctcctgtacccgaggaggctgtctggccagccgcgtggcctcctgcagctgtgagctcctgactgatgcagtcgacctgccccgccccccagagacgacagccgtgggtgcagtggtgacagccccccacagccgaggtcgagatgccgtcagagaatccctgatccacgtcccgctagagacctttctgcagaccctggaatccccgggcggcagcggcagtgacagcaataacacaggggaacagggtgcagagacggatcccgaggctgaacccgagctggagctatccgactacccatggttccacgggacactgtcccgggtcaaggctgctcaactggttctggcaggggggccccggaaccacggcctcttcgtgatccgccaaagtgagactcggcctggggagtacgtgctgaccttcaacttccagggcaaggccaagcacctgcgcctgtccctgaacggccacggccagtgtcacgtacagcatctgtggttccagtctgtgcttgacatgctccgccacttccacacacaccccatcccactggagtcagggggctcggccgacatcacccttcgcagctatgtgcgggcccaggaccccccaccagagccgggccccacgccccctgccgcgcccgcgtccccggcctgctggagcgactcgcccggccagcactacttctccagcctcgccgcggccgcctgcccgcctgcctcgccctccgacgccgccggcgcctcctcgtcttccgcctcgtcgtcctctgccgcgtcggggcccgcccccccgcgccccgtcgagggccagctcagcgcgcggagccgcagcaacagcgccgagcgcctgctggaggccgtggccgccaccgccgccgaggagcccccggaggccgcgcccggccgcgcgcgcgccgtggagaaccagtactccttctactagcccgcggcgccgcccgggtgggacacgccaagctcttcagtgaagacacgatgttattaaaagcctgttttagggactgcaaaa

SEQ ID NO: 22253 - DNA, 2110 bp, Homo Sapiens; identical to SEQ ID NO: 22252

SEQ ID NO: 22254 - DNA, 2115 bp, Homo Sapiens
gaaatgaacctctcttattgatttttattggcctagagccaggagtactgcattcagttgactttcagggtaaaaagaaaacagtcctggttgttgtcatcataaacatatggaccagtgtgatggtgaaatgagatgaggctccgcaatggaactgtagccactgctttagcatttatcacttccttccttactttgtcttggtatactacatggcaaaatgggaaagaaaaactgattgcttatcaacgagaattccttgctttgaaagaacgtcttcgaatagctgaacacagaatctcacagcgctcttctgaattaaatacgattgtgcaacagttcaagcgtgtaggagcagaaacaaatggaagtaaggatgcgttgaataagttttcagataataccctaaagctgttaaaggagttaacaagcaaaaaatctcttcaagtgccaagtatttattatcatttgcctcatttattgaaaaatgaaggaagtcttcaacctgctgtacagattggcaacggaagaacaggagtttcaatagtcatgggcattcccacagtgaagagagaagttaaatcttacctcatagaaactcttcattcccttattgataacctgtatcctgaagagaagttggactgtgttatagtagtcttcataggagagacagatattgattatgtacatggtgttgtagccaacctggagaaagaattttctaaagaaatcagttctggcttggtggaagtcatatcaccccctgaaagctattatcctgacttgacaaacctaaaggagacatttggagactccaaagaaagagtaagatggagaacaaagcaaaacctagattactgttttctaatgatgtatgctcaagaaaagggcatatattacattcagcttgaagatgatattattgtcaaacaaaattattttaataccataaaaaattttgcacttcaactttcttctgaggaatggatgattctagagttttcccagctgggcttcattggtaaaatgtttcaagcgccggatcttactctgattgtagaattcatattcatgttttacaaggagaaacccattgattggctcctggaccatattctctgggtgaaagtctgcaaccctgaaaaagatgcaaaacattgtgatagacagaaagcaaatctgcgaattcgcttcagaccttcccttttccaacatgttggtctgcactcatcactatcaggaaaaatccaaaaactcacggataaagattatatgaaaccattacttcttaaaatccatgtaaacccacctgcggaggtatctacttccttgaaggtctaccaagggcatacgctggagaaaacttacatgggagaggatttcttctgggctatcacaccgatagctggagactacatcttgtttaaatttgataaaccagtcaatgtagaaagttatttgttccatagcggcaaccaagaacatcctggagatattctgctaaacacaactgtggaagttttgccttttaagagtgaaggtttggaaataagcaaagaaaccaaagacaaacgattagaagatggctatttcagaataggaaaatttgagaatggtgttgcagaaggaatggtggatccaagtctcaatcccatttcagcctttcgactttcagttattcagaattctgctgtttgggccattcttaatgagattcatattaaaaaagccaccaactgatcatctgagaaaccaacacattttttcctgtgaatttgttaattaaagatagttaagcatgtatcttttttttatttctacttgaacactacctcttgtgaagtctactgtagataagacgattgtcatttccacttggaaagtgaatctcccataataattgtatttgtttgaaactaagctgtcctcagattttaacttgactcaaacatttttcaattatgacagcctgttaatatgacttgtactattttggtattatactaatacataagagttgtacatattgttacattctttaaatttgagaaaaactaatgttacatacattttatgaagggggtacttttgaggttcacttattttactatt

SEQ ID NO: 22255 - DNA, 6866 bp, Homo Sapiens
gtgagggggctcctctcccaccctacaacacgcacacctctgcacacacgcccaggcggagagcagggatttgggacgtggacctgtgtgccctcgtgggtccctggtgccctctgggaggcacccccaactcaggacctccaggagaggagggtccctccctcggcagccaggacccccctccccagccagccgccctccttagctccctccccacttccttccaggtggatctgtttctagagctccaaccaccagctccctccccttctccaccccgggccaccaggtccttccttgtctccttcccctcagcagtttctatgaaccaccctggcagtaatggtgcagatggctcgcgcacagctggtggtgacccgactttcctgcctccaccctggggctcctcagaggcttcatggaacccaaactgctggtctcacctccgagccctgccctcgcccagggagggcggctccgtccctcctgcactccctaatcccgctctgaatcaccgcttctgttctgggtcggagaataaaggtggggtttccaagtgatggccctacgttattgtctgaagctcccttctcctccccagggtggaagtgataatgccgggaatccgggaatcccggggaggtgcaggaagacagcgagctcgaggcagtggggtgcgactgagccggatgtgctgagctgcccggggcacggggcggttggggtagagaaaggctttcagagctgggggacaggacggggccccgggtgagcggagagctgggttatttcacgggaacagctggtgacaaagccggaggggtgtgcggggccggcgagagactgggattgtgtcttaagaggcatagggagccctgaaggggctgcgagctgggaaggggcagggccggcgctgggtgtaggggacagaggggagaggaggaagccgggccgcaatagaaagacgtggacggggctggacgtggtggctgacgcctgtaatcccagcactttgggaggccgagacaggcggatcacttgaggtcaggagttcgagaccagtctggccaacatggagaaaccccgtctctactaaaaatacaaaattagccaggcgtggtggtgcatgcctgtaatcccagctactcgggaggctgaggcaggagaatcgtttgaacccgggaggcggaggttgtggtgagccgagattgtgccattgcactccagcctggggaacaagagcaaaactccgtctcaaaaaaaaaaaaaaaaaaaaaaaatctcagtaagatagaccaggtgtggtgtctcatgcctgtaatcccagcactttgggaggctgaggaaggagaacagaggacctcctgaggccaggagtttgagatcagtgtgggccacatagcaagaccccctccccaccatccctacaaaaaaagcaattcaaaaaaaataatgccttcaggcagaatgggagtggtgcttggttcaagcctgacataagtgtgagtttggggcacaaattctgctctgaataccagggacagcccatgtaatacagcatttccctttgtgcccacgcagccctaagggaggtgtggtttgttgttgttgttgtatctttttgagatggatttttgctcttgttgcccaggctggcatgcaatggtacaatctcggctcactgcaacctccgcctcccaggttcaagcgattctccttcctcagcctcccaagtagctgagattacagtcatgagccaccatgcctggctaattttttgtatttagtagaaatggggtttcaccatattagtcaggctggtctcgaactcctgacctcaggtgatccacccgcctcagcctaccaaagtgttgggattacaggcatgagccactgcactggctcttttttttttttttttttttttttgagacggagtctcactgtgttgtgcaggctggagtgcaatggtgtgatctcagctcactgaaacctctggggaggtgttgtttttatccctccccacaaccccctgttgatggacagacaaggacaatgaaacacagagaggattttgccctgggttaaagtcacacagcacataaaaggttcctgatcatgccgtgcagggcatctcgccaaacctcaaaaattcacaatctcatagcgcagcttgctctgtgaggcctccccacctcttccttctctccttccaggctccagtcaaggtcagtgcccagcttcctgctctgggccactcagcagccaccttcctccttcctgggtaaggaggtagggagctaccaaggaggcagggacatccgtgtagaacattctgcttttcttttttctttttttttaagatagagcctgactctgtcgcccaggctggagtgcagctgtagtgtaatggcacaatcgcagctcaccacaacctccatctcccaggttcaagtggttctcctgcctcagcctcctgagtagctgtgattacaggcatgtgccaccacgcctggctaatttttgtatttttagtagcgacggggtttctccatgttggtcaggctgctttcaaactcctgacctcaggtgatccgcccccgcttggcctcccaaagtgctggaattacaggcgtgagccactgcgcctggcctaattttctctaaaatagagacaagttctcactatgtggtccaggctgatctcgaactcctgaactcaagcaatcctcccagctcagcctcccaaagtgctagcattacatgtgtgagccatcatgcctggtccctgtctgtttcattctccctgtctctctagtcctgcctctctctgtgtcttctggtctttttctctatttgtctcttcctctgtcccttttatcatctctgtcccttccctccctccctccctccctcccttccttccttccttccataggtgagaaaaagtagcatcttttcctcacctatcacaaagtttgcagctggggcacctacagtaaaaggttaacagacacaagcataacaaatgtatttaaggcaagtgttgacatgggagccttcagaaatgaaggcctaaagaaacagggaaacctgggtgggttttttgttttgttttgtttttagatggagttttactctgtcgcccaggctggagtgcagtggcgcgatcttagcttactgactgcaatctctgccttccatgatcaagtgattctcctgcctcaacctccccagtagctgggattacaggtgcgcgccaccatgcccagctaatttttgtatttttagtagagaaggggtttcactatgttggccagactggtctcgaactgctgacctcaggtgatccacccactttggcttctggaagttctggcattacaggcgtgagccactgtgcccggctacctcccgttctatgatctatggtttaaacgctacatttgaccactatcaatactcccagtatcaaaactgggaaacctgggttcttcacccagagcctaaaacgaacagcattctttgccttgtgggtgacaatagcaaacatttaccgcctgtgtatatgtgccagacactgttttaatcctcagagaggtgatgtcacttgcccaaaatcacacagctcgtgactgtgagtctgaaattggccagagcttgtgcacctagccactggtggtgatgtgtctttgagtcatcgagtccagcattctgtgttggacttagtgaaaggatatacttttgtagtgatgagaaaggagctttatctagaatttgtgaggccaggcatggtggctcacgcctgtaatcccagcactttgggaggctgaggtgggtggatcacttgaggtcaggagtttgagaccagcctggtcaacatggtaaaaccccgtccgactaaaaatacaaaaattagccaggtgtggtggtgcacacctgtaatcccagctactcaggaggctgaggcaagagaattgcttgaacccaggaggcggaggttgcagtaagccaagatggcgccactgcactccagcctgggtgacagagcaagactccatctcaaaaaaaaaaaaaaaaaaaaaagaaaaggaaaagaagtgaactggttcaaagaccataatcatacatatcacacaagactgcaagcggaccagggtcagttaatttagcggctccacaaagtcatcagtcacctgagctccatccatcttcacatgctgtgctaccatttattttattttatttttttttttgagacggagtctcgctctgtctcccaggctggagtgcagtggcgcgatctcggctcaccgcaagttgcgcctcccaggttcatgccattctcctgcctcaacctcctgagtagctgggactataggcgcccaccaccacacccggctaatttttttatatatatttttagtagagacggggtttcaccgtgttagccaggatggtctcgatctcctgacctcatgatccgcccgccttggcctcccaaagtgctgggattacaggcgtgagccaccgcgcccagccagctaccatttcttagctgtatcatctcacggtcccaaaagggctgctacacatccagccatcacatgcagataatttctttcaaaaacagcagaaagaggctcgttcttgtcttggtcccttttgaagaatgaatgaaaccttcctaagccttccagcaactccccccacaactccgatgggtaggaattgtcacataaccatgtggcccgataggaggcaaaagaaatgagacttctgggattagtttagcctcagattctgcagctgagaagttgatcagccacctctgaaggacaagcagcttgcagaaaattagggtggtgttaccaaggagaaaaggggaaatggctttagagtagacaacagggatgccctgaggggttgtgtaggttgttcactgcacgaagtcccctggtcaagaaggtaagcggggtttaaacagacccacagtctactcatcaaaccaggtgtccttggcattgtgtccacccagagagctcactattttcttttcttttcttttctttttttgaaatggagtcttgctgtgtcccccaggctggagtgcagtggcatgatcttggctcactgcagcctccgcctcccgggttcaagcaattctcctgcctcagcctcccgagttcaagcaattctcctgcctcagcctcccgagtagctgggattacgggcgtccgccaccacacctggctaatttttgtatttttagtagagacagggccttgtcatgttggccaggttggtctccagctcctgacctcagctaatctgcccacctcggcctcccaaagtgctgggattacaggcgtgagccaccgcgcccggccacaactcatcttttagagccagcctacacttgtcataggccatggccgatgaatgggaagtccacggtggagctgggtgttcctctcaagttcaactggctgcggccaggagggcaggcaggccaggtggacaatttcccttcaaagtggatacaggcaggacatgcaaagatgaatatctctggcactggactctggcaagtaggaaaataaaaacaaaagatgaacatcttgggccgggcgcggtggctcacatctgtaatcccagcactttgcgaggctgaggcagaaagatcacgaggtcaggagttcgagactagcctgaccaacatggtgaaaccccgtctctactaaaaatacaaaagttagccaggcgtggtggcgggcgcctgtaatcccagctactcaggaggctgagacaggagtatagcttgaacctgggaggcagaggttgcagtgagcagagatcgtgccattgcactccagcctgggtgacagagattccatttcaaaaaaaaagaacatctctacaaactggatcaccagtaaataatagctacatatacttgtactcaccatatgtggacacccacatatgtacactcagtcgataaacacccacatttaaacataccatgtgggccaggtgcagtggctcacgcctataatctgagcactttgggaggccaaggtgggaagatcacttgggcctaggagtttgagaccagcctgaccaacatactgagaccttatctctacaaaagagaatttgtttttagttagctgggcgtggtgatgtgcacctgtagtcccaactactcgggaggctaaggcaggaggattgcttgagcctaggaggtcaaggctacagtgagccacgttctcaccactgcactccagcccaggtggcagagcaagatcctgtctcaaaaaataaataaaaaattaataaacaaaaaatgcatacaatgtatagatacacaaagtgtatatatatacatatatatgtatacacattcacatatacacacatgctgtgttcacaatcacctagatgacatatgtatgtgtatacatacttacacatatacccttacatgtacacgatatatctctacccatacactaccatgtacacatgtccatttgtacacagctgtatatgtacacacacaattttgcacacacctgtatatgtatacaatgtatggatccccatatccacattacacacaatgtgtacgcatctacctgtgtacacacacccacctatgaacacaatgtagacacatctgtataaacacacttgagatacatgcctgtgcacataggcaagtatgtgccaagtatttacacacctgaagtagaagcacacacacacccacactatgcctgcacaccaccgcatggccacgttcaccagcgccccgggcctccatctcccagctaacgtgtcccgttttcctcccctgacag

SEQ ID NO: 22256 - DNA, 4131 bp, Homo Sapiens
ctgggccaggcgccggggcaggaagggaggcggccgccgtggccattcttaaaggcgcccgagtgtaggcgacaggccgctgacggcgggaaggaaaatgagtgagtctttggttgtttgtgatgttgccgaagatttagtggaaaagctgagaaagtttcgttttcgcaaagaaacgaacaacgctgctattataatgaagattgacaaggataaacgcctggtggtactggatgaggagcttgagggcatttcaccagatgaacttaaagatgaactacctgaacgacaacctcgcttcattgtgtatagttataaatatcaacatgatgatggaagagtttcatatcctctgtgctttattttctccagtcctgttggatgtaagcctgaacaacagatgatgtatgctggaagtaagaataagctagtccagacagctgaactaaccaaggtatttgaaataagaaataccgaagacctaactgaagaatggttacgtgagaaacttggattttttcactaatgtgaacttctgtgtttctaaagtatttatgtattaacctgaccatactggaatcagacataaatacttatttatgcctaaaaatgcactgttacttacagtttgtttcctgcagtaaagaaaaattcttcatttgtgcaaaatttgaacaaagaggaaatcatcttcatagtaatgaaactttgtaaagtgtttccttatattggtaattgttaggtggactacttttctccagggactttttgcactcttgtgactaatttctataacttatggttcggaatttgttactatttacagacaccattggaaagtggatatattagattgtgagagacaacagttgcctccttttgacaaatactggatattagcagtttatttatgaaaatagcgtattatcacttgtcaaatcattgaaattcatttggggtcaaagacttgagtgacccagtattgagccatgaataatttagtgtaacctgtattacaagtacattgatgaattctgtatcttctttggtttcctgtatctttttaatcaagtctagaaactatgttcatcagtcactcatttttaaggtcgggagttagattttatgatagaattatgactgttagcttttctccttatagcatcttagtcttagaaattggtgggttgtaataatcaagggcttcattccttttatgtcatttctagacagttttgaatctaggttaataacactttatttataaagcacctcaatgtcctgtgaacactaattattttaaatgtgttaatactgtgcctttgatttgttagctttaaagttagtttaagacttttacactgccagtattccacatttggtgaaattaatacttttttaaagggtccaaataaaataattttctaatgtgtatatctgaaatttgtaataaaatcaacttcatattttaaaaattccaactatctgcttgcattggtgtaatatatggcagtcgagagttataattttgggtatacttgtggttagttttgtgccataggaaaaaattatcttaaaactttggccatagttaataacattaacacttcaatagcaatcacatcttatatcctaaatgtcagaagatattctgaactggatgcctgaatagttaactaaaccagtcttggttagatgatggtactcttggcataaagcgtaggattctgatatttggcatacttgtaaaaacaaatacataagtaaccattgaacattaatttgataataggtctagagactctaaaaactaaccaaacttggtgagtgtattcttatattaagaatatcttagtcatctcaaaactagcaaaatttaaattttggcatgttttccattcatatgttctttgcattttatttttgaggtttctgtgagaagtaaagatagttggaatttttgcgatattgaatagaacatcttctgttcccaacactgtttggcttcactaatttagaagtcaggaagcaatagaaagttggagatgaggaagtgctagagtaggtgtttgttttggttcttggagggaaaagattctttattccaatttccagagagaagagaaaactcacccaggaagtttaaaaattctttaaacaggtattttgatattggagaataacatgcatataattctgtaggaatgcacatgtaatccaagtgagtggagagtgtttttaatgtttttgaatgaaggaaatgaggttttgtttcacctgttttgcagcagtaagagaaactagtgctgcaagaatgtattttttaatgaagttccttattttgtcttgcatgttttagttttgcttatttttaaatttggaggtcctccataatgtcagataatattgacctgccatacgttagcactcttagttccgctactgtctttaacaggagcaaagagctgtgataaaccatgcttttttgagcttgtctgactcctaattaataacatgtttttggcaagacaacagattgaggttagaggatcagtaggacatttttattccatctgtcctatggggaaatttacaaatcccgtgctctaaaatgttctcaaacatttatatagatttccctttcatcttactaaattttgcattgttcttttcaagtatgtttcgtatttactgtctttttttctgccatttcccaaataataactccagatttcataattccagtttttacattccgttatctttctggtacaaccattcccattcagccttaaatctgagtcctttttagcagcaacttttttcctgggatcctccttcgtggtcttctaagtcagtgttagttttgaaatttttggccctgcataagttctgcatagcatctaatgtcaaaatagaaccaactggtaatcacagtattatttagtgtggtttccatgacaacaaaaatacatacgaagaaaacttctcaggttactatgctgaaattccaaaatgtctgagttttgaatagtgatcactttgttctggtattgacgcaattatattaggaaaaaagttggttgactgtttttgtttaattgacttctaaaatgttcaaattgtctagttctaaaagtttactaaatgcctagtgcagttaaacatactcttgtttaagtgtgtgttgctaaattttttactgtcattactaaataatctgtgtggcaaaatgtgtgtcagcacttttccctccttttttatctcctattttcaggagtcaaatgtagccataaactgtatccttgtctgacactttagctaaaaatttccagttaggggagtttattgccaaattaaatttggctgttccccccaacccatatagatattaaggaaggtgtacttaaaaaatgtttggactgcttttaaaacctgagcaatgtcattaatccatatgtggactagtgatgaatagatattttcataagagtttaaatgactgatatttggtggaagtagagagtaactcaatattctatcaattcaagtattcttactatggttgcctttccctatttgttcaatagactgataatactggtatttatagagtttgagccattacaacttttgtgaggatgtgtttcaaacatttctggacaaatcttattttgtatttctggaagaatgtagtaatcttctagaccgcttaaaaccaatgctcccaagctgaatattcttgagcaaatttgttttttattatgccatttgacatttcaaatcagtgctcatatacagtaaacttgtgatagaaattgtattttattgctttttggattataattcatataaatataattacttgaatattgtttgagatcattaacatgccagggcagttcccactgatttagatggtccaagataatctcattcaggaggcttgaaacattaatggtttagtcttgtgaattttaacagttctctgtcatcgtttaacaaaaccaacaactgacacaactccttaagctgtggtttcagtctctgctagttcatattgcatgtttattttggacagtcttttgttaagcatggtgcttgtactggtttaaataaaatgttaacatt

SEQ ID NO: 22257 - DNA, 2358 bp, Homo Sapiens
  misc_feature (2172)..(2172): n is a, c, g, or t
attcggggcagcaacgcgcagaaggtggtgggcgcctcgggctcggggggcgcgggcccccaacccgatccggcgggcccggggggcgtcccggcgctggcggccgccgtcctgggcgcctgcgagccccgctgcgccgcgccctgtcccctgcccgcgctcagccgctgtcggggcgcggggtcgcgggggtcgcggggcgggcggggggcggcggggtccggggacgccgccgccgccgccgagtggatccggaagggcagcttcatccacaaacccgcgcacggctggctacaccccgacgccagggtcctggggcccggggtctcctacgtcgtgcggtacatgggctgcatcgaggttctccgctctatgcgctccctggactttaacacgcgcacgcaggtgaccagggaagccatcaaccggctccatgaggccgtgcctggcgtccggggatcctggaagaaaaaggcccccaacaaggccctggcgtccgtcctgggcaagagcaaccttcgctttgccggcatgagcatctccatccacatctccactgatggcctcagcctctccgtgcctgccacgcgccaggtcatcgccaaccaccacatgccgtccatctccttcgcgtcaggcggagacacggacatgacggattacgtggcctacgtcgccaaggaccccatcaaccagagagcctgccacatcctggagtgctgtgagggcctggcacagagcatcatcagcaccgtgggccaagctttcgagctacgcttcaagcagtacctgcacagcccgcccaaggtggcgctgcccccagaaaggctggcagggccggaggagtcggcctggggggacgaggaggactctttggagcacaattactacaacagcatcccggggaaggagccgccgctgggcgggctagtggactccaggctggccctgacacagccctgcgccctcacggccctcgaccagggcccatctccttctctaagagatgcctgcagcctgccatgggacgtggggtccaccggtacagctccaccgggggacggctacgtgcaagcggacgcccggggccccccggaccacgaggagcacctgtatgtcaacacccagggtctggacgcccccgagccggaggacagccccaaaaaggatctgtttgacatgcgaccctttgaggatgccctgaagttgcatgagtgctcagtggcggcaggcgtgacagcagcccctcttcccttggaggaccagtggcccagcccccctacccgccgggcccctgtggcccccacggaggaacagctgcgtcaggagccctggtaccacggccggatgagccgccgggcggcagagaggatgcttcgagctgacggggacttccttgtgcgagacagcgtcaccaaccccgggcagtatgtcctcaccggcatgcacgccgggcagcccaagcacctgctgctcgtggaccccgagggcgtggtacggacgaaggacgtgctgtttgagagcatcagccacctgatcgaccaccacctgcagaacgggcagcccatcgtggccgccgagagtgagctgcacctgcgtggcgtggtctcacgggagccctgagccaggtgaccgttctcagccctggctcctgcctgttctcagccccagctcctgcctgtcatggccttggggctctcagccctcctcctggatcctggtcaggccgaaccaccgctgcctctccttcctccgcatgagcctctggcatggtccttcctccagctggccccgggctgggcagagcctcctcctgccggggcccctgcccaccccctcctttgcctggagtgagggtgttcataccaaagacggaaccatttcgcctttaaagaaaatatatccagaagcagccgctgcctcggagccctggcccgtgggtccccctctcgcctggctggttcggtctaacgccccggagagtcagagctcccaggaccctggggaggaggcggattccgggcctggctgggcttcctcttcccacctgaggactgggtgcacagttgtctttgaggggggacgcttaaggtgctttggggttctcaggccaggatacatgctggcgctgaagtgcaggcagccttgaggtcacctgggatctcggggtanccaggctgctccaagacagtggatatcgaggcagtcgtgaggcccctactccacctgggagcaggggaaggacgtggttgcctggcctgggctgcgcccagcagcttccccccaatcctgccctcccagctgtcgacccagatgggatgttcggatcggtttgtaattaaacctgggaatggccac

SEQ ID NO: 22258 - DNA, 3114 bp, Homo Sapiens
ctccaggcaacttggggcaagcgtctcagttctcgctctcccttcctcccagcggggtcgccgcagaccccagccctgggagcaccgctctgcagcgcggccggcgggtggagacggttggcccctaaactcgctcgtccagcccaaccgccccggcggcttctcccagccctcgaggctctcctgagcggcctggagaggcgtcgagcgcagcccagcgcccgcctgctcacccgccccggcccgggaagggaattttcggatcctgcgagcccggggcgcccccgcggcctagggcgggcagctcccggggcctggccgagccggtggcgcccgggaggccgcggggacagcacgcagcgcgcgcccttggatgccgtcccgcagcgacgccccggcccgccccgctcctcctcctgcctggctagcctgcctctcatttgggaagttttgtgggttttctttctcctcctccaaccttggcggaggccacgactcaggcgccacagctgggggctagaggccgcggaccatggtgcggggcagccaccgctgaagtcagcaaaaccgagcctggcctgaggcaggctgcgcgggaggccaaagccatggccattgccacgtcgacccagctggcccgggcactgtatgacaacaccgctgagtccccccaggagctgtccttccgccgaggggatgtcctacgggtcctgcagagagagggcgctggtggactggacggctggtgcctctgctccctacacggccagcagggcattgtgcccgccaacagggtgaagctcttgcctgctggcccagcacccaagcccagcctctctcctgcgtccccagcccagcctggctcaccatatccagccccagatcacagcaatgaggaccaggaggtgtatgtggtgccgcccccagctcggccctgtccaacctcaggacctccagctggaccttgcccaccctctcctgacctcatctacaaaatccccagagctagtgggacccagctggctgctcccagagatgccttggaggtctacgatgtgccccccaccgccctccgggtgccctccagtggcccctatgactgccctgcctccttttcccaccctctgacccgggttgccccgcagccccctggagaggatgatgctccctatgatgtgcctctgaccccaaagccacctgcagagctggaaccagatctggagtgggaaggaggccgggagccggggccccccatctatgctgccccctccaacctgaaacgagcgtcagccttactcaatttgtatgaagcacccgaggaactgctggcagacggggagggcgggggcactgatgaggggatctacgatgtgcctctgctggggccagaggctcccccttctccagagccccctggagccttggcctcccatgaccaggacaccctggcccagcttctggccagaagccccccacccccacacaggccccggctcccctcagctgagagcctgtcccgccgccctctgcctgccctgcctgtccctgaggcccccagcccctccccagtgccctctcctgccccaggccggaagggcagcatccaggaccggcctctgcccccacccccaccccgcctgcctggttatggaggccccaaggtcgagggggatccagagggcagggagatggaggatgacccagcaggacaccacaatgagtacgagggcattccgatggccgaggagtatgactatgtccacctgaagggcatggacaaagctcagggatctaggcccccggatcaggcctgcacaggggatcctgaactgcccgagagggggatgccggcgccgcaggaggccctgtccccaggggagccactggttgtgtccaccggagatctgcagctcctgtacttctatgctgggcaatgccagagccactactcagccctgcaggcagccgtggcagccctgatgtccagtacccaggctaatcagcccccgcgccttttcgtgccccacagcaagagggtggtggtggctgctcatcgcctggtgtttgttggggacaccctgggccggctggcagcctctgcccctctgagagcacaggtcagggctgcaggtacagcactgggccaggcattgcgggccactgtgctggctgtcaagggagctgccctgggctacccatccagccctgccatccaagagatggtgcagtgtgtaacagaactggcagggcaggccctgcaattcactaccctgctcactagcctggctccatgaaggtcctttggcacagctctgctcctcccctgcctgccaaagcccccctttaggccttgggtggctggaaggctttgttaagggactaggagaaatgggggtatctttcccctttcctgccctttctgctcatctcaacctctcacagaggtgtcttctccccctaacctacagctttttgtacaagccattttgtgtaaattatttatatttaatattattccctgctttgtcaggagcaggtactaggctctggggcagtgaggaactagatccttctctcctcagcctagggtggaggtcactgcactaccacccacctctggaagactggctgtgaaaagtcaggtggcagaaacctggggccacatagagcctctctcttttcctgtttcttggctctagaagatcagcactgcactgttagctgagagtgcgggcaagacataaactgtccagagtttgaaggttctcggaaagaccggagggcttctccccacagaaggcggagagagctggggctcagacatgggtgtgcaccttaataaaccctgctgtctgcctccctgactctgcttcttgggagcatggtgagcagccctggtgctcagcagccatacctatgggacacacactacgaaaaggatgcctttagggtttgggggagattttactcctttcttcaacaactattcactggacaagttctctgctcccatgacgcgccaggcacagttctgcaagtatattgtgaatgtattgttctagtgggatacacaaataagtcagttaaaatacataaataaaaacataaacctgc

SEQ ID NO: 22259 - DNA, 122638 bp, Homo Sapiens
aagcttgtcggggtgagggctgctaacttacacttcagaggcctgtgtcccaaaggcctggctgcgtttgccgtgctgtgcgaggacctgtgtacacaggcaggtgtgcgcctgcccgagcgcgagtagctcttgtgtagtggtgaaatgctgcaggcatctgtttattaaaattgctgctgtgaaagacagggataaaatatccacaatataagagaaagcgactccgtgcctccttctgtttcttcgtttccagtctgcatagatgtctccaaggggaaaccagggccaccaggcactcctgtcccatggggccacccaccttcagagcccactcccacgggctctgtttccttggaggccatcctgccgatggcacttttcaaggccctcccttccctacgagttgctttctgggaggggaaattgaaaaggagagcggtcacctggcaaaaacacaggggaaatcagccagtccacaaaaatacgcaaaatgacctgatgatgtccaaaaaagggttttaaaagcgatcaaggacaaaaggttttcctaagtggcatgtatacatccaaaactactctttttttgtaaaaacattcatctgtggagaaaaccaaggaacccctttctcttctttattaaaaagcaaaacaaaaactcttgttagaaccaaaagatattccgagttctcgtttcgtgtcttctaaaaataagctaagctgaagagtctgggtgtccacatgctcctgggaatggccctggcaaccttggtgacatgctctctgctccggggctgcctccttccctaatggcatcagtgagggtgacaggtccatgctggtgcttagcccagctcctgagaagctgggaaggcctggctcaaagtcctgcgtccagatgccatttattttttaaaatatatcctgaagtcagagcacccagaattttgcatgatgttctgttgttttctcgggagatgaaagtgaagtgcctggtgccacttggtatggggatgtcatgggtgggtcaggccttgccctctaacaagagggactgacttgcctgaaccccacttcgcctgtttgaacacaagtgctcacgggcactggggggcagccatgcagaccccttcggacttcatcacccccagcatcacaggcatctggctcacccaggagaggggccaaggttaaccatgaggcccattgcctgcctttattggcccagatcccacctccgcttcacccagaagctcagtacgtaggagtcagtccctgccacctgacattctgggacatgtgagtgtgtacacatgtgcatgcatgcacacaccatgtgtgtggggaccttcatagccatacgcatgcacacatgtacacacgtcccagcacacacacgggcacacctgaagaataaggggcagcgttaggaagtgggcttgggaaaccatcctcttcatgtctcttcttgtttgtttgtttgtttttgagacggagtttcgctctgtcacccaggctgtggagtacaatggtgtgatcttggatcaccgcaacctctgcttcccgggttcaagcgattctcctgcttcagcctcccaagtagctgggattacaggcacctgccaccatgcccagctaattatgtatttttggtagagacagggtttctccatgttggtcaggctggtctcgaactcctgacctcaggtgatccacctgcctcggcctccccaagtgcttggaatacaggcgtgagccaccacagctggccttcttcacgtctcttctgagcatagtgcctgagaacccggaattgtccaggtggctcacacagcagcagggttcatggagataaaagcccttcttgaagaaagtggccccccagggctaaggaacttgatgaagaaaccaaacagtcccgtgacgtcttagcaagctagcaacgtggcctgagctttgctttgctgttggatgtgagctcttccactgcaggcggcctgcacctgggctgggcaggaacaagtccaaccgcaggtaccctggacgtgagccttgatcgtcccacgtgtggccagggggcctgtgagggtgcacgtgcacacacatgcacacacagacacacacgtgcacgtacaccagcaggtgcatgccctgccgctgaacccctgggggagggacaggcccagtcacaggggcaggcaccagaggacaaggccacggagggctccgcatggcttcggctgctgccctgcagtcggtcccagcctcatagcacttgccaggtggagccgctccgaagtcttaggatccagggatgggaaatgccagcaaggtcacatgtgtgacctcacttcacagctgctggcgcagcctctgcttgaacccagccagatcccagcgtgcctctactgtctgaattggcccattccatcgatcacagatggggagcacaagtgtgtttccgtgggacagtgtgttacgggggaggcttggatttgggggtctggaggcctctagatgaaaacccaaaactcactccttaggacctgtgtggcccaggccaagaaggttcttagcctccatgcccttccgtgttctagcctgtaaggtggggatggtcatcaggacgatcagcgtacctcctgggcttaggccgtgacaggtgctcagcaagtggctactgtcccggcagacccgggggcatcccaaacctgcatctgtcctgggccctgcctgtgccagcatggaggggaggggctgtggtagtggcctttgcttcctctccccttggaacctttcatgagcccccagtgtctcctcctccccatcattcatcttttcctgtcacttctttcttttttttttttttttttttgagacggagtctcgctctgtcccccaggctggagtacagtggcgcaatctcggctcactgcaagctccacctcccgggttcaagccattctcctgtctcagcctcccgagtagctgggactacaggcgcctgccaccatgcccagctaattttttgtatttttagtagagacggggtttcaccatgttagccaggatggtttcaatctcctgacctcgtgatccacccacctcggcctcccaaagtgctgggattacaggcgtgagccactgcgcctggcctcctgtcacttcttaaatccttttggtctgggtgcagtggttcacacctgtaagcctcacactttgggaggccaaggcagaggatcacttgagcctaggagttcaagaccagtctgggcaacatagcaagaccccatttctaaaaaaaaaaaaaaaaattttttttttaattggccagaaactgtggctcatgcctgtaataccagcactttgggaggctgaggtgggaggatcacttgagcctaggatttcaagaccagcctgggcaacatagcaagaccccatctctacaaaacaaaaatttttttttaattggctgggcaccgtggctcatgcctgtaatcccagcactttgggaggccgagatgggaggatcacttgagctcaggagttcgagaccagctcaggcaacatggtgagaccccatctctactaaaaatatatatatatggctgggcatggtggctcatgcctgtaatcccagcattttgggagcagaggtggacaaatcacctgaggtcacgaatttgagaccagcctggccaacatggtgaaaccccatctctactgaaaatacaaaaattcgccaggcatggtggtgggagcctgtaattccagctactcgggaggctgaggcaggagaatcgcttgaacctgggaggtggaggttgcagtgagctgagattgcactactgcactccggcctgggcctcagaatgatacaccatctcaaaaataaataaattacatatatatatacatacatatatatacatatatacatatacatatatacatatatacacacatatatacatatatacacatatatacacatatatacatatatgtgtgtgtgtgtgtgtgtatgtatgtatatatatatatatatatatatatatatatatatatatataaaaaatagctgggcataatggtgcacacctatggtcccagctacttgggagaccgagatgggaggattacttgaacccagggggcggagtttgcagtaagccaagattgtgccgctgcacttcagcctgggtgacagagcaagatcctgtctcagaaacaaaaaatccaccaggtgtggtggcgtgcacctgtagtcccatctacttgagaggctgaggtgggaggatcacttgagcccaggaggttgaggctgcagtgagccatgatcgtgccactgcgctccagcctgggcaacacagtgaaattctatctcaaaaaaagaaaatcacccctttttgctgggctgggcctcctttgcgagtgcagtgcggttcatcccttagcatctctgaggtgtgtgccccgccgtgtccctccacaccgctgtgacactgctgctcttctgcagagttgatagcacggggcatggtgaccgacgtcatcccccccagtaaaggcgcacgaggagggcgggctcctgaccggcctcagcaggactgtgtccaccagagcaacacacccaaagccagggttctggctgcagctcctcagaccagtgggaggtcattagacccgcaggagcgcacgtgactccgggaagtgggatgggaccgtgttgccggaaaagccggatgagcaaaggcgggcaagcccaaggtgttcagacccggccggagaggtgggagacggggaacacggcagctgcacagctctcccggggagagtccgcgtgtggtgggagggacccagcccgactccctaggagctggttttcatgtttggggcccacgaagaccttgagctgccttcaggaaggattgtcacgcggggcagggtgtgtaagcagatgagctgcgctgtgccagcctgtgctcctctgcccacgcagcaggccgtacattccgcacccgggatgcctgggacgcccacaggccttggccaggctcggcttgtggagtgcagagcaagggctggtggagctcctcgggcgcttggagccagggagtgtgcgcagtggcaaggggggaccttagagacaagcaaatgctaaatgatctgaaatcgggattggagatggggcaggggagagtcggctctagacaggcatgtccagcctgtttgcaaaacccctgcaagatctaaggacatccaggggacagacatcgtgagcatggggttcggctcccatgtgcctcttgtcatggagggacttgaagtcctgagctatgccagaggtcagaggacctagaaggacccacggcatgtctgtcctgggtgcctgcagagctgggtgggccttgcccgcagtgtgtccgggaaggggctgcagaactgggtgggccttgcccgcagtgtgtctgggaaggggctgtacacctgtccccatggcttcccttcagcttctctgcgattctcagtcgcccgtcgggaccagaagggattctagagcatactttcccctcaagcagttgtttgtttgtttgttttttggagacagaatctcgctctgtctcccaggctggagtgcagtggcgtgatctcagctcactgcaacctccgcctcttgggttcaagcgattcttctgcctcagcctcccaagtagctaggattacaggcacgcaccaccatgcccgggtaatttttttttttagtagagacgggggtttcaccatgttggccaggctggtctcgaactcctgacccctcaggtgatccacccacctcggccttccaaagcgctgggattacaggcgtggtcaccgtgcctggctcaagcagcttttaaatgcaggacttccgcccccgaaattccaactcacacagctgtaattacatggtcagttccacctgcccaggactttatacgaaacctgacccccctcggccgggcgcggtggctcatgcctgtaatcccagcactttgggaggccaaggagggtggatcacgaggtcaggagattgagaccatcctggctaacacggtgaaatcccgtctctactaaaaatacaaaaaattagccgggcgtggtggcaggcgcctgtagtcccagctacttgggaggctgaggcaggagaatggtgtgaatgcgggaggcggagcttgcagtgagccgagatagcgccactgcaccccggcctgggcgaaagagtgagactccgtctcaaaaaaaaagaaacctgacccccctcaggctggtccaaagccatcggatgtaccctctcctcagaacaaacaggaaggtggctgccacttccagcggcttcacggcagagcttgtgcaatcgcaggacacagcctggatggccgaagacagcagggcagctgtgaacggtctatgccatgtctcctgcccaaacccttttctgctgctcccaaccagaaaataaggatggagacagcctgcagcccctcctttgccagtgaaagatctggtggggaggcgtggggtctctgggggtcggggggacaggtatgacgatgctggtgcccatctctctggggcattccgccccctttggacttcattgtccctgctgtgtcaccaggggccctgccacaccctgcctccgagtgtgtggggtctgtacctgctttgcccccactggccgctttctccaggacagccatgaacatctccagtgtcctcggagcaaggaaggaatgcttcctggagcagaagtggccacaatgacgctaggtcagcagatggccgcagaggcctgggcagtgaccggtcggagaacaaagcctgaggtgttcccaggccggtttccacgggagtcttggcagtgacccgtgcacggaggagacgcgtgccttcctggccccccagtttggattcctggtgcctctaaggtctgctgatggcagagctgcacccgggtgagcacaacccaggatggggtagggggtggctcttcacattccctgtcctcagtgacagaaactcacttttattatcctaaactctgtttttgcttagaatttggggcaacttgccctgaaataacccttcccttgtccttgggatgaggggactctgtcctcagggcataatcatgtagaaataggtcatcctgcaggtccccccaggaaattcctgagaggaaagagggaacccactttgagctgcctgggtcattcctccagcacgtcccctcccagccccagcctgcgctggagactggtctgagttcaaaggccgcgccttcttcagagaacagccactgctggcagagtcaggcgtcccatcccctccaagacagctgggttccctggggctgtgggaaggcgggtgtggggagatgaccagcggtttctggtcctgtgtgcccagcccctatcagcccacagagcctcaccgtggtgtctcccctgcccaccagcacacggagggagcaggaagggatgcctgccagaggcttcgcccttagtcggggaaggaagtgatcccattccatcttctggtccgaagccttttccttcttcagggtgggcctgtccacacccgcccccgaggtggctcttccgtctctcccgcaggtgcaggtgggacccacaggctgcagagtcagacctgagggaaaatcccgacttcagaagtcatttctcagcctcctcatcagaaaatgaaaacccaaaccaaaagctccccagaaggctgagggaaaggagccgggctcccatccgacaactcactgggccataagcacaacctggggtgtggggagaagccacagctctgccctgggggtctccagggtacctgggccagaagcctgcagtggcggcccggacagtgggggcccaggcagcggttcacgaggagaccttggatgagagcttgtcccttcctttctgcagcagccactaaggaaggcgcagagggactgggtatggtggctgacacctgtaatcccagcactttcggacgctgaggcaggaggatctcctgaggccaggagttcaagaccagcctgggcaacatggtgaaaccctgtctctacaaaaataaaaaaattggctgggcacagtgcctaatgcctgtaatcccagcactttgggaagctgaggcaggtggatcacctgaggtcaggagttcgagaccagcctgaccaacatggagaaaccctgtctctattaaaaatgcaaaatcggccaggcatggtggcacatgcctgtaatcccagctaattgggaggctgaggcaggagaatcgcttgaacccgggaggcaggggttgcggtgagccaagatcgtgccactgcactccagcctgggcaacaagagcgaaactctgtctcaaaaaaaaaaaaaaaaaaattagcctggcatggttgtgcatacctgtagtcccagctactcgggaggatgaagtgagaggatcgcttgagcccaggagttcaaggctgcatgaaccacaaatgtgccactgtaccccagcccacacaatggagtgagaccctgtcttaaaataagaatagcaataacaataaaaaggaacagagacaaagccacacggtgctctctgactgccgagtcccaggacttggtacaaaattgcgagggatctttgaaactcccaacagcagcccacatgctacccgatgaggaagccggggaccagaccaaggacactgaccatgcccaagccggggaccagaccaaggacactgaccatgcccaagccagggaccagaccaaggacactgaccatgcccaagccgtccagctagttcagagtcaagtggaaataaccagggcgggagcacagagagccacatcccagtggctccagatcctggtgtcggacagctgggtgcttggggaactgccgttcattcacagggctttgcggctgagctcagaacttgatcttgactttgatgggtggaaggaatgtgagtgcctggattaaagcggattgtcacgtaggccacaggattcacgtgggtagagacccctgggcagcaaggagcagcctccagcccaagttaaggcgtggagacagtgagctgggcgtgccatccgcgtgtgccatcctcaaaacccagcaagtgctccctcctgacctcaagtgatccactcgcttcggcctcccaaaatgctgggattacaggcgtgagccactaactaccctcagcaaggtttccagttttttgatgtatgcatttattgttattaacttacctcttaatgcgtctactgtgtcccagaagttttggcacattgtgtttctatttttgtttgtttcaaggaatttaatatttttaaaagttttttcattgttaaaaatatggatcacttcatgaatttgcacgtttccttgcaggggtcatgctaatcttctctatcatttccactttaggatattgccacggtttctacaggactgaacaaagggggaccaacgcagaaatgaaaacttaaaacaaaagtaagtattttaaaggaaggggccaggggaagaagaagagcactcgcagcttccggtgagcatgaacagcacctgagcttccacagcccttcctatttgttgagtagaatgagcagggaggaggaggtaatgattgctcagctgcttaattgatcacaggtgcatattattactaacagccttcagatgtgccctgtagctaatcacaagaaacacttgtgcctgggtcgtgactgcctcagtattccttctgggcggcagaagcagtttgtcagtttaccagtttgccaacgttctgcttttctgagaacagtttgctgtttacccacataccctccagtggtatactgagttgatcaccaccctcactttctgcagcagccactaaggaaggcgcagagggacttcctttcggcctgcaacagtatctgtgctgcccaagtgagtatggaattttaaattttcattcttagtctcttccttcatccactggtcattcaggagcatgttgtttaatttccatgtatttgtacagtttcaaatgttcctcttgttattgctttctggttttgttgcactgtggtcagataagatacctggtatcattttgatttttaaaacattgtagagacatgttttgtgtcttaacatattgtcaatcctggagaatctcccatgtgctgatgaaaagaatgtatttttcagctgttgagtgaaacgttctgtaaaggtctgtcaggtccatttggtctacggtgtagtttcaatccaatgtttctttgttaatcttctatctagatgatctttttaatgctgagagaggggttttagagtccaactattattctattggggtctatctctccctttagatctattaataataatatttgctttatatacctgggtaccctggtgttgggtgcatatatatttttaagtgttatattcccttgccaaattaacccccttattattatacagcgtctttgtctctttttatagcttttgaagtctgttttgtctaatataagtacagttactcctgctcacttttggtttccatttttgtggaatatttttttccatcccttcacttttagcctatatgtttcttcacacatgaggtgagtttcttgtaggcagcgtatagctgggtctttttaaaaatccattcatgccgggtgcagtggttcatgcctgtaattccagcattttggggggctgaggggggatgattgcttgagctcaggagttcaagaccagcctggacaacatagggagaccccatctctacaaaataatttaagaaattagctaggtgtggtggtgcatgcctgtgatcacagctagttgtgaggctgataagggagcatcacttgggcctgggaggttgagggtgcagtgagccatgattatgccattgcactccagcctgggtgaaagagtgagatcctatcttgaatgagtgaataaataaataaatccattcagccagtctatatcatttaaatgggggaatttaatccatttacatttagggttattactgataggtaaggatttactcctatcatgttgttgatgttttctgattattttctatatcagaaaataatcggaagtgcacaccttgtgctcctagaccagggcagtgctgctgtgtgaattcctggcagctctccaagctgggctcagggcttgcaaggactgtgggattctcctgtcgtaaggactgtaggtgttggtggtggcaatgggggctgatgaggatcttctacttacctttgccccgcaagggggtgtccctcttgactcccagcagattcaatccaggtggaggagatggagctgcagggccaggtgcctcgacactgccctccaatttgaagggcttccaatcaccaaaggtgtgtcttttctccctgctgcgcttcacattctccctctgacactccagtcaaatcttagctatttattcattgtcttggtcctttcttgtggaggacaagtgccaggggtctctagtcagccaccctgatgacattatgctctgtggttttaatttgaattttcctgcaatgcaaataattagtcatgcttagtgatgagtgtttttttatatgcctgttggtcagctgcatgtcttcttttgagaaatggctattccttttgcccatttttaagattgggttgtttcttgttgttcttttagttccatataaataaatatatatgtattatatatatatatatatttttttgagacagagcctcactgtgtcacccaggctggagagcagcaatgccatctcgactcactgcaatctccacctcctgggttcaagtgattctcctgccttagcctcccaagtagctgggactacaggcgcctgccaccaagccaggctaatttttttgtatttttggtagagacagggtttcgctatgttggccaggctggtcttgaactcctgacctcaggtgatccgcctgcctcggcctcccaaagtgctgggattataggcgtgagccactgcacccggccccttatatattttggatattaactctttatcggatgcatggtttgcaaatactttctcctattttgtaggctttctcctcactctgtcgattgtttccttcgctgtgcagaagccttttagtttgatgtaatcccatttgtctatttttgcttttgtttcctatgcttctgggtcatatccaaacaaatgattgcccagatcattgtcatggagcctttccctacgttttcttctagtggcttcacatgttcgggttttgtgttaagtctttaatccattttgagttgaattttgtacatggtatgagataagcgtccaatttcattctgcatgtggatatccaggtttcctggcaccactgattggagacactgtcctttttcggagtagtgaatacactcccatcgttcagacattgcagttatccagcccagtgcaaaggagaggcctccgtctccccagccctgtctgcctgtgtcctccacaggctggagcttggctggtgcggtgcccatgatacctactgtgagtggctgtcagtctgtttcaattggtcaattcctgtgctatattggccagcaagtatcgtaagtcttacccctgcttgtagatacatatttgtattagtgtatgtttccagtaattccttttttttttttttctgagacagggtctcattctgttgcccaggctgaagtgcagtggtcaacctttgctcactgcagcctcaacttgttgggctcaagcaatcctcccatctcagcctccccagtggctgggattacagatgtgtaccaccacacctggctaacttattttttggtagacatgggggtctctctatgttgcccaggctggtctcaaactcctggccccaaatgatcctcctgtctcagcctcccgaagtgctgagactacaggcgtgaacactgcacctggccttattctttcttttcaaaaaatggacatgcttggctgggtggctctctggaagcttccttggcagcttagtgtatgtcagtgtttagaaatgttccactgccatgtggtgccgcacccccattgctgggtcaggaacgtgtccctcatccaccttattgctgatgctgttggtgtctcagaagggtttactatttctgctcatgctgggttggactaagagagggaaaaccctcctatcactagcaggtgttggcctctccctctcctgacatgagaatgcatcttaaataaagacctgcctctttctcccatgcctgaaaagggccaagatgctctggctgaagttgccaggaggtcagcacctcttcctttcccctgcattctggggattgccccccgccactgtctctggttgaatgtgtctgtgcaaacctctgtagtgatctctgcaaagggaggaggggagtggggccgggactaagcctgggacagaggtgggagctgggccagggggagcctcccttggggccaggcagtggcaagagccacgtggaaaaaagcaagtccctttgatcagaaaacccactgctgtccctgcaccagcctgggccaggacgggacagatgggccttggcaagcctcccacggacaccacgcagcctcaccccacagcagtcagccgccttaggtctgcagctcacagcccatcctgccagggacagttggaagactgcctggaggaggcctttggttcccaaaaaagctgggctgaggccacaaggccccctgcagaccctcgtcctcagacttgtttccacatttatttaaaggatgcagggaggagctggttttatattaataacaattaagtactcttcatgttcaaaacagaacacttattacttgcaattttctgagtcagccaagttcccagccagtgtattaaacatgtaacgtttaggtaatgagatgaactcttgatttcagtaccaggccgtgggtgcatctctcctagaattccggcagccatcgggcccctctcagggctgggggctggacgacaggggagcaggagagatgcgtccatcacagagccatctgccttcgaggcagagtgtgcatggactggggtacaggtggtttatttgaggtgggcccagagagagggggaagggagtggggatggtggggtgtagaggatgggggtaagacagggactgtcactgagctagttcccatcatagttcgacctggccagggctgtgaacaaagtacctctgagcagagggaggtttgcatgaccacccacctaccccagggcggccatcgtggagacagggcctgctggtgtccattttccaacgcttcctggctgagcctgtttctgagcccatggagaaggttctaggcctgcggcagaaaagtggggcccccaactagtctcagaggagggaccctaactgtctggtgccacccagctgcacctgaaatcagagtgagctgaaggcatgtggcctggggcacccaatgcgtctgttagggtctgagtgcaccagggaggactgttctcttgtcaccactcaggccaccgtgactggacagttttcgcattgtaccatttacgtaggaagagatgtagaaactgggctagctgacaccaccctccaggctattcgagtgatgttttggaggttggcttactggcagctcagccctcaaccagctcttccctcttgccaccttcttctgtgcaagggggatgttatatcacccgctgttaggtgtgccaggggttggcgtgaaaggcattggtgctgctcctatgtctgagccaggccacagccggcttctgccatctgggcagtgggcggctccctggtccctgagaacagcaaggaaaaggtggggcacagatgagggcctccagcagggtggctgctcctgccccagtcccgaaccccaccgcgcagggacacaagcgggggacatgaggccaaggcacagacaggcctcttggggagtgacctctgcttggagagggagcacgagaatccagactgtcaggaagccaagaaagacccaactgagttcaaaataggagcacgggccaggcacggtggctcacgcctgtaatcccagcactttgggaggctgaggcgggcagatcacgaggtcaggagattgagaccatcctggctaacacggtgaaaccccgtctctactaaaaaaaataaaaataaaaaaaattagccgggcgtggtggcgggcacctgtagtcccagctactcgggaggctgaggcaggagaatggcgtgaacccgggagaggtggagcttgcagtgagccgagattgcgccattgcactccagcctaggcgacagagtgagactccgtctcaaaaaaaaaaaaaaaaaaaaatagcatggggcatagtgtttggagcagccgtccacagcgccaggcttgattccatcagcgctacttatttacatcacactatacagcctaaaacctgggaagagcgtattgtttctgcacaagctcaggtgggagcaggttctttctgaagacaccacacagtgacagcagcagttgacagtgtgccatgcacaagattgagactcagcaagaggagaggcgccaggctaaaggccgggcatacccttgctgtgccaggggacctgccattgcctcttgtacgaaatggggtgatggctgcagtcctggcaactgtgttccgggcgcggccaagccccagtgggcctgatctctgagctgccatggggcgagccctgggcctctgtctgtctctcctctgcgacatggagctaggatacctcctcccaggctttttgtaggcattaaaataattcaaggccaggcatcggtggctcacgcctataatctcagcattttgggaggcccaggcaggtggatcacctgagatcaggagttcgagatcagcccgggcaacatggtgaaaccccgtctctactaaaaatacaaaaattagctgggcgtgatggcgtgtgcctgtaatcccagctcctcgggaggctgaggcaggggaattgcttgaacctgggaggcggaggttgcagtgagctgagattgcaccactgcactccagcctgggcaacagagccagactctgtctcaaaaaaaaaaatatatatataacataaaaaaataaataaatccaggtgtgttgactgcatagaatacatgttttaaaggggggaaattctatcataatccctgttttcagatgagacaacagatgcaggagacatgaagagtaattgagaatccatgtggccctgctccaggatctgctgcttaaccacagtgtggctccactttttacaaacagggaagctccctatggactgcgtgggctgggtgtggtggcatgcgcctgttatcccagcactttgggaggccaaggtgggaggatcacttgaaccaaggagatggaggctgcagtgagctatgaatgtaccaccacactccagagtgagtgacagagcaactgtgtctcaaaaaaaaaaaaaaaagatggaaaatgcagatatgtgggtaaaagggggaagaaactgcagagtctgtgacccaatcatagtcactgatactgttttgatgaatttccttccaatctcttttgtaatgatagtggggtggagttttttgcttttatgtagttgttattatatcacatcacttttctttttttgagacagggtcttgctctgttgcccaggctggagttcagtagtgcagtctaggctcactgcagcctccacctcccaggctcaggatcctcccacctcagcctcccgagtagctgggaacacagatgcagccaccacacccggctaatttttgtattttttgtagagacagggtcttgctatgtggcccaggctggtctcaaactcctgggctcaagtgattctcccaccttggactcccaaagtgctgggactacaggtgtgagccaccgtgcctggccttcactttcaagatttttataaactgacgttttaagtatttcccagattatcataagcccctctaaaaagtgtttatagatggagagggtccaagtgcagctctgttatgtggatatattgtatactggtgagctctggcatctagtgcacccgtcacccacgtagcaaacatcgtgctcaacaagtaattccacaaacattcacaagcctgttctaaacaccattttgacagtgacacaatagttcatcaaatggacaaagcatggttcatgtgacacaggctgcgcctctggtcccagctaacagttgttgacgtgcaggttgtttccagttgtttgctcccgcaaagcaatgctgcaacatgtgtttttacccataaaggtttgggagagattttgcttcctcaaagagctctagaagtggaattgctggctcaaaggacgaaaggttggaactgctttttaaaaaaccaacacctggccaggcgcagtggctcacgcctgtaatcccagcactttgaaaggccgaggcaggcagatcacttcaggccaggagttcgagatcagcctggccaacatggggactccatctgctgaaaatacaaaaattagctgggtgtggcggtgcatgcctgtaatcccaactacttgggaggctgaggcaggagaatcacttgaacccgggaggcggaggttgcagtgagcagagatcatgccactgcactccagcctgggcgacagagactccatctcaaaaacaaacaaacaaaggtgacaccttagagaatctcccaccgagccccaggaggcagtatcttcccttttttggactatttgctcacctgggatattatttatggagggattggttaaatggacggatgaaaatgcgcatcaaaaaatatctgcaccaaggttgggctcacacctgtcattccagcactttgggctgaggtgggaggactgcttgagctcagagttcaagaccagcctgggcaacatggtgagaccccatctctacaaaaaaatacaaaaattagctgagtgtggtggctgtgcctgtaatcccagctactcaggaggatgaggtaggagaatctcttgaacccaggaagcggaggttgcagtgagcatagatcacaccaccatagttcagcctgggcaacagtgagatcccgtctcaaaaaaaaccaaaaaccataaactgcaccggactcaggactggctttccctgcacccggagcggcttctagaacgcctggtgagcccaagaggaggaagcgcgcggtgaaacactgaaagccacacacagtgtgaaaactcacgtgattactttaaagttacctggctttctattaaaaatgtgaggctgggcgcggtggctcgtgcctgtaatctctgcactttgggaggctgaggtgggcagatcacctgaggtcaggagttcaagactagcctggccaacatggtgaaaccccatctctactaaaaatacaaaaaattatctgggcatggtggtgggtgcctgtaatcccagctactcaggagggtgaggcaggagaatcgcttgaacccaggaggcggaggttgcagtgagccgagatcatgctactgcactccagcctggacagcagagtgagacggcgtctcaaaaaagaacaattttgagatgacaatgggttgacgtgtggtataagaagtaatccagggaggtcttgtgcacctttcctgagtttccccagtggtgacgtttcgtaacattggatcacagtgtcacagccaggtattgacgtggacacagtccagatccagaacattctgtttccgcaggagccactctgttgccctcttctagccacaccctcctccctccttaccccacacccctgtggcccctggcaaacacttgtctgttctccatttctataattttgttatttcaagatgttggataaaagcaactgcacggcgtgtcaccttttggggctgaaggggctttgtgttttgtttctgagacaaggtctctctctgttgcccaggctggagtgcagtggcccaatcacagctcactgcaacctcggccgacctggctcaaacaatcctcccacctcagcctcccaagtagttgggactacaggcacatgccaccaggcccagctaggttttgtattttttgtagggacgagggtctccctatgttgctcaggctgttcttgaactcccgagttcaaacgatcctcctgcctgagcctcccacagtgctgggattccaggcacagcccccgcacctgacctggaaggtttttactcagcattattctctggaagttcctccaggcctttgtggggatggtttgttcctttctgctgctgagtagtattctgggtgtggatgggccacactgtttgatgattcagaggctgagggatgtctggattgtgtccggttctgggcagcttgctgtgaacattcactgactggcccttccttttgccctctgtgcagagggcccgagcagtccctctggttagataaggcagacacaatgtcccaatacataatttaacaggctctttgcagcctggagacgatgtaatgggttaccaggaaaaaccatttgagttcaagttccagcaacttttcaaaaacaataaaacaaaataaaaaacaccccaaatgctgcctcatgaaaaaaggtactaaaaaaaaaaaaaaaagaatgaacatcgattgacaggactagcatcatttcaccatgattcattaaaagaaagtgccaaaccagtgtttgtgctgaattcaagcattttctaaattcccaagtggaaaaaaaaaatctcttataggtctgctcagagggaaaataggcttgcagtccacttactgcccacgcaccaaaggctgcctggaccagagccggtgggattggaggaggggattctgcctttgcctcccttcctccagaaagaacactccctaacgtgggagcccatccagccgcacaacgctgtgtccacgtcttcgggaaggggaatggctagtgtctgtcttctcagagcagctggactcagttctctgtgagaacagtacaaagacatagatattcctcggcttggagtctacacttggtattgtcgggtttttattttttatttacttattttttgttttttgagacagagtctagctctgttccccaggctggagcgcagtggtgcaatctcggctcactgcaacctccgcctcccgggttcaagcgattctcctgcttcagcctcccaagtagctgggattacaggtgcacgccaccacgcctggctaattttttgtatttttagtagagacggggttttaccatgttggccaggctggtctcggactcctgactcctgaggcccacctcagcctcccaaagcactgggattacaggcatgagccaccgtgcctggcctcgtcagggtttttaattataaatttaaattttatcgatttgagtacatgtgaagtggcatctcattttcattttaacttgcatttccctgatgtctaatgagcgctgagtgtcttttcctgacataactggtcctttctgtctttctcctgttgttctttccctgacttcttttggattagtcagatattttctattatttctcttttctttattggcttcttagccaaaccccttttgttcattttttccctagtgctttttctcctgggcacagactacgtatgcctcacatatcaaatttaatgtagggtcaatattgtatcacttcagtcttccctcttcatacataaccctttgcatcttgcacctcacacctggagttccacacttcacagtgtgaggagcttatcagtgggttacctctcaccatccatccttcacactgtccttaccttttacttctacacacactgtagaagtatcacaagctattgtttgttttaaacagtcagtggtctcttaaagaaattatgagaagggccgggtgcagtggcttatgcctgtaacccagcactttgggaggccaaggtgggcagatcacctaaggtcaggagttcaaggccagcctggggaagaccccctgccgtctctacaaaaaattaaaaaattagctggcatggtggtacgtgcctgtggtcccagctacttgggaggctgtagtgggaggatggcttgaagccagaagactgaggctacagtgagccgtgactgtgcccctgcacgccagcctgggcgacagagcaagaccctgtccccccaccaaaacattttttttctcttgatctatttcaccagtttgagtatgatatgcctgcatgtaattttctttgtatgtgttctcttcaggttttgctgaatttcttgatctgtaaatcagtatttttcaccacgtgtttggatttggagccatcattttgcaaaaatgtttccttcctagactcatactctccttctggagctccgatcacacatgcttttggccatttcatactgtcccataggtctctgaggttctctccacttttcttcaacttttttctcttcttcagattaaataatttctatccatctgccttcaagatcccaaactcctgttttctccaatctgttaatccaattcagtgaaattttcatttctgttattgtacttttcagttctagacttttcttttgattcttttagatactttgttattctgctgtgaatttctgattctttactcattaagacaatattttcatttaatcctttggacatattatttttatttattttgagatggagtcttgctctgtcacccaggctggagtgcagtggcactatcttggctcactgtaacctccacctcccggattcaagcgattctcctgcttcagctttccgagtagctggggctacaggcgtgcgccaccacacccagctaatttttgtgtttttagtagagatggggtttcaccatgttggccaggctgatctcaaactcctgggctcaagtgatctgcccacctcggcctcccaaatttctgggattacaggtgtgagccaccgtgcccagcctcctttggacatatgtagagctgctttagaatctttgtaaatacagaatctggttcattgtagggggattggtttctgttaactgctttttttttttcttaactatggcttacgttttcctctttctttgtatgtttagtgatttttgtttttttagtgtatattcaacactgataaataacaaatgagggagactcagggtgctcttccactgaaaaatcctgactttcgttctagtttgtagttccattactggacgtaccatgctgggctgtgtaggcttagctttaggctctgtttactgagcaatgtcccaggtgtctcccaggcccctcttacttggcaggacttaacctccaaactctgaccgtcttgtggatcgggtcagggttttgctttagacgttgttaaggcgggcctggagtagtccttattctaggggagggactggcaacctctggctcacaagccacatgtgttgatggcctgtttttgtacagcacttaaagccaggaatggcttttatatttttaaagagttgtttaaaaaaaaaaaaaaaacaagcaaaaatatgaaacaaaaactgcatgtggcccacacaacctaaaatacttatctgggccctttataggtcgtttgctgacccctgggaatgtgattctcaatctagtgtctcagctcaatgtcctcagtgttaatggcattaaaaaggtcttgactgggcacggtggctcgtactcgtcatcccagcactttgggaggattaggcaggaggactgcttgaggccaggagttcaagaccagcctgggcaacagagtgggaccctctctctacaaaaaaagaaaaaattagccgggcgtggtggcactcacctgtggtcccaactacttgggaggctgaggtgggaggatcacttgagcccagaagttctaggctgcactgagataacgatcaaaccactgcaccccagcctaggtgacagaacaagactgtctgaaaagaaaacaaaacggaaagtcctttcctgtagcactactggacctctagtctttgtgccatcctcaactctgtaacagccgcttcctggtaaacccatagagtcgtcccacacgtgtagtccagcctaggccaaggactttcagggaaccctacatcgacttcggctccccactcttgctaagcttcttcccctccagtgccctgccttgccggcctgctgctttagctgcccagaagtctggtctcttgcctctcacaccattacagtgcaccacactacactatgttcacacatttagcagctgtgttcacacccaaactatctcatatatacattttgttaaaaaaaacttcaggactctctaaacttatgatgccaagggtgaagttaagccctggagactgagtcagtagcaagtttgcaattctgcttcttcgattacagtttaatgctcttcctccttgttcttgagcacaagtgtcttcctcattgtggctgctctgtaaatcagggctccccgaccgccagggccacagacacataccggtcaggccacacagcaggaggtgagcttcaggccagggagcaaagcttcatctgtatttacagctgctccccatcgctggcattaccgcctgagctccgcctcctgtcaggtcagcagcagcgctggattctcctaggagggtgaaccctgttgtgaactgcacattggaggggtctaggttgcgtgctccttatgagaatctcatccctaatgatgtgtccctggcttccatcatccctagatgtgaccgtccagttgcaggaaaacaagctcagggctcccactgattccacattatgggaagttgtattttattacatattacaacataaaaataataaagtgcacaataaatgaaatgtgtttgaatcgtcctgaaaccaccccaactttgtctgtggaaaaactgcattctatgaaactggtccctggtgccaaaaaggttggggactgctgctgttaatgactaagaaagaccaggtctcccccttcccatttggtgatttttgttacagattagctgtctccattgtcctgtacctgacttagaccagacagcacagagaccccaggactgtttcatcttcagtgggtccccaaagaaaaagaccacctcgactaaacagactgttgtaactatgcattaggccttatacagaaaagacgctgaaattcggttaggcttcccgagacgctggctatagaaacgaccccaaatttctacgtttgagaacactgacttccattctttataatgtttcctgggcgcctcaagcttcgcatttgactaaactctagattctgacccttttgattatttttggttgacagtttttgtcattttatggctgggagtgatggctcacacctgtaatctcaacactttgggaggccaaggctggaggatcacttgagcccaggagtttgaaaccagcctggaaaacatagtgagatcccgacaaaagaaaagaaaagaaaaaaattagctgggcgtggtggctgcccccgtggtcccagttactggcggagggggtggggcggggggaaacaaggcgggaggatcgcttgagcctggaaggtggaggctgcagtgagccgtgtcccgccactgcactccagcctgagccaactgaggaagaccctgctccaaagaaaaaaagaaaaagaaacacccgcgccccgccccccccgtttacgtgcacaagaagcccatatgcagttaagtgtgaggtttattttgtggcattccgaaatgccgagggccaggtccccacaaaaacatttgcggcgtgagggaaacgggaagagcccagcggtaggcggaaggcacgcgccggggacactcagcggcgagggcctgcgggagcccccagcgcgataaggagcccggccggggagcagcggcccgccgcgggacgcccgagctgcggggaacgcgagggcagcgaggccggcgtctctggtccgggagcgtccaggctcgctcaccgcgcgcgaggcccgcctgccgagtcctggcctcagctccggcgcagggcccagcggggcgcccactgccgagggaggaagatggacgtgtcccgggagccccgctccgcctcccacttcccacctcccggtcccgcgcggccggcccgggcgcacttccgtcggaggcgaagcgcggcgaagacccgccccgtgaagcctcgcgcgccccggaaatggtcatgcggcggcgccgaggccggaagtggctgaggccggcagcagcgggcggcagctgcggcgcaaccggctccggagctgcctggcgcggccgggcgggcggcgccgctcaggctcgggctccggctgggcccggcgcggcctcggggctgcccatggggcgcggggggccgggccggtgacgccggacgcccatggacgcctctgaggagccgctgccgccggtgatctacaccatggagaacaagcccatcgtcacctgtgagtgcccggaggcggggagggcgcggcggtcgttgggcgggcccgggccctggcgttatgcacccggcgcccccagaccttcagcccccggcgcgctccgggctgggccgcttcctggaggtgtgaccagggctgcggctgaggcggggccctctgacttttcggggacgccctctgaccttcccgccgggcgacctctgacccctggggggcgccctcgggccggctgcagttggagccggtggaacccggcggactctgcccgggactgggcgcgcgccggcgtcgagggcgaggagcgggggctgccaccgccccgtcccgcccccgttgagccgcgcgcccgggacctgggggccccggcctcttccgccgggcggttttgcccgcgggcgccctttccccgactacggggaagtccttgggggctcgcagagttgcaggcgttggcgaagtaggaacagtttgttgcggggtgaagcgtcaggcagagccgccgggactgctttcgctcctacacacttccccgccgcgcactcaaaccattttacggatgagaaagccgaggctcgggcgcttaggcgagcttgctccccatgaacagcctcccgctcgagtctacactacggacacctggtgcctcttgggtgtcgtgtcctccccgcacccctcctttaatgcatacacaaaggaactgtttttctgttacgggaaaaatgttccctaaattttagaagtgtgactctccagagttaaatacggttaagaacagtgagcttatgggaagtattgaaatgtttgttggttggcttttaggtgacttgcagagaggtgtttcagactgttacgatttttgacctttgacagtattctgtattttcatgcatgtatgcagttagtttttttctagttgtctttcgtgcttggaaaggaagcactctctgttgcaaaatctgggtgcccaggccacagtagactgtatgtcgtgagaactcctgtttccctctcactctgtcagcgggtgtgcacctgctgtgttccttcctgttagatccctgagaaactgtatattgaaggttgaattttgttgcttcagctttaggtgatagacttatttctttccttccttttgctttattttgtctcttctcctctcctcctctctcttttttttctacagagacctagacgagatgatagacttttcttagggaagtggactgtgtctcatttaaaattggagacttgcatagttcagcagtagctgtcttttttcctccccagaatatttgtcagctgaaagtcttttcctactctgcaccttcagccccagagggcagatgtgggtagagctggtctgcaggccctgcaatttcccaggggctttcccagtgctcagggaagatgaagccatgcgcagttcatgttaagttttactgtcttccagaggttgaacatttttctcctaaagtgctgtgcacgttgtgaatgctggatacacattcattgcctgtacggacatccacacatctaattttatcttctacctcctagcttgcttacatttcaatagcaatatgtatttataggcattatgtaaatacatttctgaggagaaagttcctaagctctattggattcaaccataactaaaggggtaaagtttgttatctggttgccagtgttggagatatttaatgtttagttttgtacatgcgtgcatcacggacagctgaaggatgcggttttctttcctacagatttattggattgtcatcttggtggtgggttttttcctgtgttttgagcagcagagtgaatttttttttttccttcttcttcttttttgagacggcgtctttctctgtcgcccaggctggagtgcagtggcatgatctcggccatgatcttggctcactgcaacctctgcctcccgggttcaagcgattctccttcctcggcctcccgagtagctgggattacaggcgcatgctgccatgcccggctaattttttgtttgtttgtttttgttttttttttttttcagtagagacagagtttcaccatgttggtgaggctggtctcgaactcctgaccttgggttgtccacctgcgcagcctcccgaagtgctgggattacaggcttgagcccccacccttggcctcaagcaacatagtgaatgttaatctctgcatggatggtacactgtcctagaaggtgcaaactttcattcattggagtctcagaagagaagggggcttcagtagactgtcaaagttaacttgaaaaatgatcactttaaaagtgaaggtaaaaagctgacttcatacttcccacttgaaattatgttgtggtatatctgggactgaagctttaggaagcacttggcctggtttcactttatgccttcatcttgctcctctctttcagctatacatgttttgaaaggagaaggtggtatgaacaattgctttaaaaaaatccacccagaggctaattaacccttaactttttaatattatgtacatagttctcttagtaggcaacatttttgttttcaaaaatcttttaaattcttacttgaaatggtattacctcagatctgttcattttaaaatgaaagtagagtttatgcatgttgtgaattttttttccatagaatgtataatattttacttcagtgaaaatgcattctgcttagacctttctgggaagaatatagaatgtaactggttcaggtgaatttaaaaactgtgtatatgtagggatagaagaatgaaaagttcccaaagattaagggtaattagaatagattattactttaaaacctagctgattatttcacttcattttattattattatttttttagagatggggtctcgctctgtcacctaggctagagtgcagtggcatggtcatagccgactgcagccttgctgggctcaagtgacccctcccttagcctgccaagtagccagcactacaggtatgacccacctcacctggcctgaattattttaataatattttgaagctctccaaattttttttttttttttctgtctgagacagagtcttgttctcttgcccaggctggagtgcagtggcgcgatctcggctcactgcaacttctgcctcccgggttcagtcgattctcctgcctcagcctcccaagtagctgggattacaggcgtacaccaccatgcccacctaatttttgtattttaatagagacacagtttcaccttgttggccaggcaggtctagaactcctgacctcaggtgacctgcccgcctcggcctcccaaagtgctgggattacaggcgtgagcccccgcacctggccctaaatgttttaatagactttagcccataattaaacctcctgcctaacgggctcctgtgaagagggactagcacagtaggggccttcttaaactcagaactagttacagcttgtaaatactgaagagtgtatgtgaaatgtgcagggatgggagctgaacagttagtggaactaatgctttgacggggttgggtgatgaatgaccgaatcatagcaataggaaaacttgtagtatattttattaatcatgaaaaatgcctggcgtaactgaaacaaatccagcagatccatttggtctaaatttaaattttagcgtagatttgtttttcagccacagggtcagttttctgttttgaaatagacttgggtttctgttccaagggtgtattaggaaagacacgttccttttccagccatctcattcagttagtgacaaagttaatgtaattccagtgatttgtggcttttctttgttgactgtcctcatacctacaatagcacatacctgttattagcttggaattgaatttctctgaacaataatagtaccctccctctaggtgatctgttctcattagtcacatctgttgcctgtttcatttttctgagtttctgtatttggggttccaggtctgatattagaaacttttaaaggggaaaacaggcaacagaaatgagcagatatgtagagcttcgtgtctggttggactttgggattttcccctgtaggttaaaatttttttaattttaatttttattttttgagacggagtcttgctttgttgcccaggctggagtgcagtggtgtgatcttggctaactgcaagctccgcctcccgggttcacgccattctcctgcctcagccttccgagtagctgggactacaggcgcccgccaccacgcctggctaattttttgtatttttagtagagacggggtttcaccgtgtcagccaggatggtcttgatctgaccttgtgatctgcccgcctcagcctcccaaagtgctgggattataggcatgagccaccgcgcccagccaggttaaagtttttaaatttgcacattgaaattttctactaaacctgaaaatgtggtgcttgcgatttaaccatcactagttttactaccagaaaagtcacttgaaatgtctgtttaaatgggtgaatatgttataaatgcagattttgtttcatattgaattctcaaggcaatgttgaaccaaagattgaaaagtaggagaaacattcttcttaggaaatcgcagttgttgcagagagtatgtatttggaggcggggactaaaggcaccaacaaatgtgcttaacttactatgtcatttctacccgagcatggttacaaaccattccatcttgtacgcatgacctcggttcttacataatttcacagacccttagctgtgaaacgggtacagtaccaaccccatcgggttgagaagggtgtgtaaagcactcaggagagtgtcaggattatagtcagtgtgcaaaaaaagttactaaggagaggttcctcaattttctctgttcacaatgcttttagtgtctcggtaatttttttcatggcatctctaggctaaaaggaatacttaaaaattccatttattaagtagttagattccagtaatttattaaatattatgtcctaacaagagctgtttgaaaaaaaatatatataagttggaagaaaaaaatattttcatcattcttcctaattgcagcagtgtgctacgtggggggcaggccctgcgggagctctgtggcacctctcacctgaaggtcggattggacgctgcttctccctttggttttttttttttcttcttctttttggtggtacttgctttttatcagagcagccaccctgttttgcgacgataatgatgtcatcgaaagaagtggagccctgatctgatgttgacactgtgaataccttgtgtggggttcctacaccacaagcattgctgtttccctcataaatttaaaatatctcttggtgcctctctgcgtagtgtgtgggaagcctaggtacacagtttgggaacccgtgctgttagtgttattagcccaactccagggtggatttgaactgatactttagaattgaaaagcttcctttcttttcagctcacacacctactttactacaagatgtgtttctgaagagtttctagtaagttctttatgcaaatgaaatggaaaggtctgattttctttttttttttctttttttcttaagtgctgatgaatctctgaaataatcaagtatgatacagcttgggcaacatagggaattcctatctctacaaaaatgaaaataaaaaagttagccaggtgtggtggtgtgcgcttgtactcccagctacttgggaggccgaggcgggaggatcacttggacctgggacgtcaaggctgcagtgatctgtgattgtacctcacactgcaacctgggtgacagagcaagacctggtctcagaaaaaaaaataaaggctgggcgcagtgactcatggccataatcccagcactttgggaggccaaggtgggtggatcatgaggtcaagagattgagaccaccctggccaacatggtgaaaccccgtctctactaaaaatacaaaaattagctgggcgtggtggctcgcgtctgtagtcccagctactcgggaggttgaggcaggagaattgcttgaatctgggaggcggaggttgcagtgagccgagatcatgccactgcactccagcctggcgtgagactccgtctcaaaaaaaaaaaaaaaaaagtatgtcgggcataacacatgaaccagtctttccttagagagtttttgctgtgtgcttccaccagaggcctgccaactgacagtgtgattgtgtggctcactctggctgagttggttatcttttaatggaaatacaaataactgacttaaggatttttttgtcgtaggaaagtttgttgccagttgacagagtgtcttccctggagtcgcatgccttagtgtgtaagtgtgtggtctccaaaggtattgcacactgatctccaagtactgaccctcccacccccgtgctccactctagacctggtggctttagatctggagttagagaccagcaacggcagaagattacagggtcttttttttttaagacatggtctcactgtgtcgcccagactggagtgcagtggcatgatctcggctcactgcagccttgacctcctggggtcaggtgattctcccacctcaatctcccgagtagctgcttgtgtgccaccatgcccagttaattttttgtattttcagtagagatggggtttcgccatgttgcccaggcacgttttgaactcctggattcaagcaatccgccctctttggcctcccaaagtgctgggattacaggcataagccactgtgcccagacagctgcagggtcttaaacagtcaaaacattcccacctcagtgcctgcctctgtggtgggttgcctcagagcttcctgtggcttcctgtcctgtgtctcaccttctttcttcctcaaatctttcctctatctgctcttaatgtcaaatatagtcacagtattttggccttagagaatatttgtttttaaattaaaaattgataaccttggagtcatttatgacttcttttttctctcacaactgacattatctttgaaatatatctagaatccagctatatatagggcctgcctggataatctgggataatcacatcttgagctcctgaacttaattaagtctacaaagacccctttcccaaataaggtgacattcacaggttttgagggttaggatgttgtggggcaccatgccacctgccgcaccactgtctgtgttagctaccaagcgcgcagtggccggcattcatcaagcgtctttggttttagacagctgcgtctgtctttggaggtttgtccttcgtgtactcctgaccgagggaatgttatcttgacatttgggcttctgggttctagatgtggttacaaggtggggtgatcccttcttaggaaaagtccagcctcttctgtgctctctcccttatgtggctttttggacatttgttacatggtgtttaatttctgaatattattttaggcccctgtttgcaattttttttttttaacagtgaccagggaccattccattgtatgtttggacatttttcttttcttttctttttttttttttgagacagagtctcgctctattgcccaggctggagtgcagtggcgtgatctcggcttactgcaagctccgactccgcctcctgggttcacgctattctcctgcctcagcctcccgagtagctgggactacaggcgcccaccaccacacctggctaatttttttgtatttttagtaaggatggagttcaccgtgttagccaggatggtctcgatctcctgaccttgtgatctgcccgcctcggcctctcaaagtgctggattacaggcatgagccaccgcgcctggcccatttttcttatttttaactgagatctgttagcagtttgaagcgattgtatacatttcagagttagctgggcatggtggtgcgtgcttctagtcctagctacttgggagacaggccagaggatcgcttgagcccaggaatttgaggctgcggtgagccatgtttgtgccacttcactccagtctgggcgacagagtgagaccctgtctcaaaaaacaaaaaacaaaaaaaaacaatttcagggttgaaatttttagcagagccttggaactgacaaccacctgtttggatagtaactttaactcaatctgtagcttgccatttgtgggcactgtcagttcacctagaccagtcagcaagctctaaacatccaggttaatgagaagggccgtcagaagtcattttgaagttgaggagctgagggctggttttgctgtgactggccatgatcagtgtaactgtttagtagcacagctcggaccaatattagcatgtctgatgactcctgctttaccaagtacttagggaaggcagacaccatctgttcacatggaagcagggagtttgtccctaaaattatgcttctgagaaagcctttgccatataattaaataaaaatgtcactttagcattctaagaattgagtaagtaagctatacactagaaatttttagtatagtcttattccaaaattaaattcctattctgagaacttgatacccagcactgtctttgcttctcctgtagtctgttctgtcctttggggatcctgggttgtctagtgtggagtatggaggagttgggctgttttcatcagtgagcaaacatttacggaggacctattacatgccagttactgctgaaggggcttgggttatgtcagagagcaaagatcccaaccctttgagagtttacattctgtcaagaagagatagacaatagacaaataatgttaggtgacaagtgctatggaaaaaagaaaaagagaaggataagggaaatggaagaactgtaacatttcacatattttattataaaagtgcaatatgtatcaaagtagacagaatattataaagagaccctacaaacctttcacccaactacagcaattaggtgaactgcccaatcttgcttctctatacccctcattctccccagtcttatattattttgaagcaaatctcagacatataatttatccacgaatggatgttatggactgaacatttgtgtccctccctacacaccgaagccctgactcccagtgtgctaagaataggagatgggcctttgagaagtaccagggctagatgaggtcaggagggtgggccctttattattggattagatgaggaagagtgagaggacacctcccccttgaaacgaggaaaggccacctgaggataacagcaaggaagtggctgtctgcagtctgtaacacaggcctcaccagaaacctaatctactgacaccttgatctcgggcttcttgacctacagagctatgagaaaatacattgcgattttttttttctttcttagggtcttttcagagagaaaacaaaaaactgttttctaagccacccagtctatggcatttttttttctttttaaaaatttctttctttttttttttctttcatggtattttttaattacacctaaaacgtttctttctttcttttgtttttgtttttgtttttgagatggagtttcgctcttgttgcccaagctggagtgcagtggcacaatctcagctcactgcaacctccgcctctcgggttcaagcaactcttctgcctcagcttcccaagtagctgggattacaggcacatggcaccatgcctggctaaattttttttttttttttttttttttgagatggaatttcactcttgttgcccatgctggagtgcagtggtgcgatcttggctcactgcaacctccgcctcccaggttcaagcgattctcctgcctcagcctcccgagtagctgggattacaggcgtgtgccaccatgcccagctaatttttttttttttttttttttttttacaaagacggggtttgttagtagagatggggtttctccatgttggtcaggcttatctcgaactcccgacctcaggtgatccgcccacctttgcctcccaaagtgctgggattacatgtgtgagccaccatgcctgggcctaaaacgtttcttaataccaaatattcagtgtttaagtttccagtgtgtcttaaatgtccatttttaaaactgtttgaattagtatccaaatacagtttttagataaatcctttaagtctcttaaaatcttcatgttccctctgtctctttttttttctttataacttgatgaacctggctcatttgtcttgaaaaggtcccactgcctagactttggtagttggagctggaggctgggtcagcttcaggctggattttttgtcggcaggactttatcatgggtgttgctgttcttccagcaggtgcgtgatgtccgattacctctccttttggaaattggcagccatttattttcacatcactaattccctaaaggttgcaaaatggtgatattctcatttccctatgtctttttttttttttttttttttttttgagacagagtcttgctctgtcgcccatgctggagtgcagtggctccatcttggctcactgcaagttccacctcccgggttcacgccattcccctgcctcagcctcccgagtagctgggactacaggtgcccgccaccacgccgggctaattttttgtatttttagtagagatggggtttcaccgtgttagccaggatggtctcgatctcctgacctcgtcgtgatcctcccgcctcagcctcccaaagtgctgggattacagatgtgagccaccgcgcccggcctatgtaaccattttcaaagtgagttggttcactggcatctttcagaggtgatcggttggcgtgtttttgttgttcgtttagtatggctgtgaacttaatcattatgaacatacttgatgtgttacagtccattgcattgttgcctcgttggtgagcaggttgttctccctttggccagggagagtctctttcatgttggggtctaagatagaggcatctttgtcagattctttcctatctagcctgacaagatgttccgggctcattttgaacatttaatgccctgatctgcacttagcaattgccaaggagccctgattccttttagtgaaaaatagtatttcaagaccatagtctgcaagcttgggctcctagttgctgtgaggccttttcaataggcagagctaggaatagctaggcatttttgtttgtttgttttttgtttttgttttgttttgttttgagacaggctcttactctgttgcccatgctgtagtgcaatggcacgatctcagcccactgcaacctctgcctctcaggttcaagagattcttgtgcctcagcctcccgagtagtgagtagctgggattacaggtgcatgccatcacatctggctaatttttatatttttagtagagacagggtttcaccgtgttggccaagctggtctcaaattcccgacctcaggtgatccacccaccttggcctcccaaagcattgggattacaggcgtgagccaccgcaccagcctaggaattgttctttgttttttgtatttttaagataaaatacatcataagttcactctttttgatgaaaactcagggctgcagggttttaattaacagctccatcctctgtgttttctcttttccacactgaaaatcctaattctcatgggtacttgaggaggctagagttagaggttccccagctcatgctgcttcagtcacctggagggcttgtggacacacagatggctgggtccattccccatttctgattgaacaggtctgggtggggcctgagaatgagcatttctaacaaatgcccaggtggtgctgatgctgaagggccaggggccactgaatagaacatcacacgattgctcacttgctttcagttgctttatccctcattacatagactctgaataacactattaactccaccatcaacaacaggactagtgaacacaggtctagaactgtttttgacagttcttattggcatttggatgtatcccataaggaatgaacagtcaaattactgtagttttaaagttacttgtcatagctcctctctctgagattataccactaaatgtatatgtatacatttaagttcacttgttttatttttcctgattatttttagggaaaaccttgaaaaaatctaattgctttataactatataaaatatttacttccaaaattaaatctacaaaatgaggtctatttaaagaagccttgtgtatgttctgtcctctccatgctaactcctcccttcctgagtactccatcacagtttttatggttttccttccacgtgaaaaacatccaaacatatttgtatttccctttcttagcttagacattgccagctgcacacactgtcccacctcactttcccccggactccactccacgctaggagtatgttgagatcattctcattccatgatgtcgatattccgtggtttattctgccagtcccctcctggtggaatttgagttgttttgtgttttactgtttccagtagttgtgcacagatagcctgtctgtggcctttccgacgggcctgttgggatggagccctgcagggcgggttgctgggctgaggcaaatggttatgtcactgtgctgatgctgcctcagctccctcctgagtgcttgcaccattgggaaactgcctgtaggcctcgctgagaagccagcccttgaacaaagccagtggcaaaggggaagtctggggaaagaccagtttgggaacccttctgtctaaagccttaaggcattggggtgccaggaacaggagtgtctctttttaacttgtaaatacagtactgtggttcaaactgctacagtaatgctgtgtttatttaaaaaatgtatacactgttaaaggctgattcctcagtattcttatattcagatgcatttatccagtctttttgtttttaaactcttgaattttaagtttgctctctgagggctagagaaggcaacttgtttccttgattagaagagttcattcaacttcttaacattcttggcctgtgtgttcttgtcttttaagttaaaacagaaaaagactgggactttctgtcttttgactagtctttacgtgtagtagttccttttctgcaaatttccacagtaggaaacttgatgaacactaatgtatgggttttcttttgaccccacctacagtgggtagtattgtcatatgactgggtgctgggagagagcagcagagggcaggggtgtgtgtgtgtgtgtgtgtgtgtgtgtgtgtgtgtgtgtgtgtgtgtgtgtgtgtgtgtcagagggaaggtagagaccacaggaaggacctggaggagagccaggctgaatgggtataacgttaagccggcgatgacatggcagggggtgtactgagtacttctttagacttggcctttaaacttggtggtgcagaactgtgggagggttcatttgctttacttctcaaatatgtgccttctaatgaagggaggacagtgtctatgctagaaatgtggagttagttgcctagtcatcttagggggtgactaaaccttgctttctacctagagaatctggataacatctggatccttttttgtgctttctcgttgaccttcactccctgcccccacccccgactgcgaaggcttttcacggacagatactctggcaggagcaccggggaggcttccatacccatgattatgcatttgatgttagttttcaccatgaaagagctcccaatctgaagcattaattttcattactgcctcgacattatacacgaattatagcaaatactttatgcattattgaacaggctgagatgacttcccagtttgtaatctcggatgtttttatcgtccatttgaaagcccgttttaccaaaagccattgaagagaaatgaatgtatggcctatgggcaagcacttgcattcctaggcttgaagacggtgccctctctaatcccgtgttttcaaacatgaactgcctcatagtggattgcagctttcttttgttaataggcttaaagaattattatttctgcaaaattttctgtaaagcaaatcttagataaattatacatttcctttgacttttttgttcaaaaatagaatcatggaaccttgcttggagggccttaaaattagttcatctcttgtctagtccagtcactccgctgcttttagtcgcaactgggagatgacccagcccatggttgaggcccccagctgtgggacactttctgtcattcttcacccccctccaccctcagggtcttctctcgtaggccacagcatttcttgggttgagctaaatccatttctctgtctttctcacccattagtgctctggggcctactaagccctacagaataaagccagcctttgaaaataagacagcccattaggtggccgaggacagtgtcttgttaacaggttgaaacactccacatgtctccaacaatttaagataaagtgagatgtattttattagaaaacttactgttccttttaccaagattatgctaaagaatttgaagaaaaattgtcctgtatcagagtatcagcaaatattcagactccttatgtcaaggtttttttttccaacataaatctccaaatagaagtattgaccttgaaaatatatcatgtcaggtatttaggaaagcgacaaactgactgaacattctgttttgcttagccactctctcagggttataattttgtgatccttttatacttttgtatgagtaagaccatcacggctttgcacgttcaagaattggttcagtaaaaaacagatgacagaaatgttcactctgtctgcggaaggccttttggaacccatattttcagccaaccattgttaaaacaactgctgcagagtaagtagtaaacttgttagaattaagaagttgggaaggagcactgggcagtattgagtcctaagccaagctacctgggttcgaatcccagccttggcgctcatttgcttgatgttgggccaattaggggagttcttgatgtcttggtttccatatgagggttcagggtgagtatgcgtgaagtgccgggggcatagcaggcgcacggtgctgtctggagggacggtaaacaggtggcccttctcttgactgtgttacctagcagctgttccatgaccctaatgtgatggttttgggaggtggggcctttgggaggtgattaggtcatgtggctggagtccccacaaaagggattagtgcccttataaaaaagggccccagagatctcccttgccccttcccccacgtgagggcacagcaagaccaaggtactcaacctgctgaagccttgactcagacttacaccctccagaaatgataaataaatttctgctgtttataagccatcctagtttattgtatgttgttatggcagcctgaacagagtaagacattgaatttattgaaatgttacctgttacactaaatcactgaagtcatctttttgaattctttcccccatcgtgtttcttatttgctttgaacataaaaggttttaaattacacaagtaatgcatgaatacgtgcttgtaaaaatctcagggaatacagtaataattcaggaaatagctaagcctatgttagtaatctgattgcatgtaacagaaaatccaattgcaactgcataaataatccaaaaactgattggtccatgtaatcagaccccagagctctgccccgctttcccggggattctctgaactgggctttcctcagcctgggggcccatccagcggctccaggcggcaccctagaaagagtgcctgtgtccctctgggtggctgctgcttgccattccctctacatgtctcttcccatctggggactccagtgcctgctgttcagccagggtgatgctgtgctcccacagactttagggatccatggcaccccagcttcctgacctgccgcaccctcttatctccctgtctccccagtgggcatgagagccaatggtgggtgtggagacgcacagggatgggggtgtatgtagtgaagttgtgttttgaattgctcttataaattattttgatagatctcctctgtcaccaaaaaaaggagaccttagttattggaataaaaggcctgagttgtctcttaataaatagcctcctgaggcagaacagtgaactgggtgactttgtgaacagggtttctgagtgtgggcacatcagtctcaagccccgttttggctcttaggaaccaccctattaacaagcgagttcctgctgggtttcgctcatgcctctgttgcccgtgggattaaaatgaaaatttagcctggaacgtgctctgcctcgcagttcagcccgcagagctctagtgacttttctgcttaatggttgggttagttcaggaaactacaaagtctgtgttgttaatttaattacctaccgcgtgagccaagattgaattcttttgggctcttaaacttaagctgttcaccatctttttttttgttgtttgtttgtttttttgagacggagtctcgctctgtcgcccgggctggagtgcagtggcgtgatctcggctcactgcaagctccgcctcccgggttcacaccattctcctgcctcagcctcccaagtagctgggactacaggcgcctgccaccacacccagctaattttttgtatttttagtagagacggggtttcaccgtgttgtccaggatgatctctatcacttgaccttgtgatccacccacctcggcctcccaatctgctgggattacaggcgtgagccactgcgcccagctgctcttcaccatctttcatgtgctggttctccataccccattttcaaaggcatctctaatttcataagacttgatgtgaagatttaagagtttattaaaataatggttgtatatgctgagaaaatggtggtgatttttcttcacattgttaatgcagcgcctcagtgggttagaattgggccttcaaatctacgctggggcactgtcttggtgtgctagggctgccgccacagagtcacacagtctgggtggcttagcacaaatgcgctgtgtcacagctctggagaccaggtccaggcagccacagcatgggcctttgtgtcctcatggggccttcctgcgttccttctgtctgtgtgaccaaatcttctctttacacaagtcagttggattagggcccatcctgaagacctcattttaactaagctaccttatcaactttgaagaccttatctgcatatggttatattctgaggtactggattttagggcttcaacaggtaggtttttgtgggacacagttcagcccataacaggtactgaggtcagatggtcccaggtcaaattcctacttaggtcagatgacacttttgccactgttggatgtgctgattgactggtcatcttctaggtgaacacaggttagagagttagtccatgatggaatgcgagagacattgctacttggtagtctccatttagacgagtcttactgtacggcagggttcccagggagaagagcttggagcaggtgttggaggcagttccacttttactctgtacggatgttatttgtatacgtatgtgaagtaactgtattgcaaagatagaatgtgagagagagagcgagagagtgtgtgtgtgtgtgtgtttgtagttttatatagaaaaccaagtggaagaggagaaagcgattccatttagttggcttactttccacttagcaaagagtaatgatttttatacattaatcttggaactgtttaacaggacaacagaaattggcaatcaaagttaagaaaccagaggctaactaaagattttcttcttttcttttattgatgtcttttctttctttttcttttttttttgagatggagtttcgctcttgttgcccaggctggagtgcaatggtgcaatcttggctcactgcaacctccgccttccggttcaagcgattctcctgcctcagcctcccgagtagctaggattacaggcatgcgccaccacgcccggctaattttgtatttttttagtagagacaaggtttctccatgttggtcaggctggtctcaaactccctacctcaggtgatctgcccacctcggcctcccaaaatgctgggattacaggtgtgagccatcacgcctggcctcttttattgatttctaagatgactaccaaataaatgaacaagataaaaagtgataagttcaaacatactgtttttgtgttaacaaaatgtagtaatagtccctttttaaccactatgtgccatgccttgttggaagtgactgacgtgtcttgtctcatttaatcctcaccagagctcctctggccgagctcttctcattttcccatttcccatgtccccgaggcacaggaaggttaaatgatctccccaggtgcagtcagctggtcagtgatggaactgagatggggaccgggcagtgaggttaccagcgccttgcccactcaccgtgccatctgcccggaaatgtcattacccttcctcagtgacttgacattattatatgagtttcaggaggttttttatttttaggcttttgatagcaaaataagcagatgtgttaatggcacacatcaattcccaatgatttcttaaagatcaatataaaagcaatttggaaaatggtttgctaaagtaaagaggatcctctgagtataagaattttagtcatctatattaaaaggttcttttttagccgaagtgtaatacagttatatcatcattttatgagaacaaaatggatttttcatttctattaaagcaaagataaaagctgaattaacactgagcgtgcagcgtaaagtcggccgcagctggattcctaactcgcgtctgccactgtcagctctgtgcactgaacacgttggccctcaaagctgactttcctcatctgtgaattggggtcgtgtttgtgcctttcctcccaggagttatggggaagacagaatgagagggtgcctggcaggtgccttgtgtaatattcgcacatggggagccacctataaattttagctcctcctggcacttggttgaacagtgagttgattttggtgaagttttggtttctttttctccatggattttgggcgtctgggagaaagtggaggctgtagaacacagcaaagctgggtgaggtggagcaggctccctctcctaagctttgtgtccttggggcaagttcttcaccttctctgatccttgttttccttgtggggaaaatcacacccaccccatggaggtgtcacgagggttcagcttcatcacatctgtcccgtgctgggttttcctgagacgtgttatgtagaggcacaggtacagaagaatcttgcgatatcgctttactaaacataaaactacctaaaaacaccaatttattaagctctagagccattttgcatgtattcacctaaaaatatggtaactgaatttctttcttcccttcataggtgctggagatcagaatttatttacctctgtttatccaacgctctctcagcagcttccaagagaaccaatggaatggagaaggtatgagttgtgtgttttttggctgtatccctctcttcattttttaaaatgaagtacatgtttttaaataagtatatgttgtttagacatttatgtgaacaagtgaagtagcacaagttaaaagcctcagttctaaagaaacagaatgacctcacataatctgtgggtctttgtgggtcttattctttatggaatgccatggttttctttttttttttttttttttttgagacagagtctcgttctgtcgcccaggctggagtgcagtagcgcaatctcggctcactgcaacctccacctcctgggttcaagcaattctcctgcctcagcctcctgagtagctgggattacaggtgtgcgctaccgcacccggctaatttttgtagttttagtagagacaggttttgccatgttggccaggctggtcttgaactcctgacctcaactgacccgccctcctcggcctctcaaggtgctgggattataggcatgagccactgtgcccagactacgatggtttttcttaacgagacattggaaagtagaagcaagacaattattttgagttaaagactcacttttataggaatgatctgtgattcttcatggttgaccagaatgtcttaaaggcacaggcgttttgcaaaggagacacgtgctcacttagactccaccttaaagcggaagaactgggctgtatcagccatcttacaagaccctccctccaccctggctcctgtgcgttttccttaaggacaagaaggtaaacagaaagatggtatttaaaaattaggagcgaggttagatcagccatcaccgttgctctgttgcatgtttacagttagtcgtctggtgacatactcataggaaatcactgactgggaatcctcttcttggaaaacttatttctggtaagagcaggtgttacttgtaaatataaagttgtgtatatgtaaatgtaaatttgtaaatttggattttgtcttgtaacataggtaatctgattttaaccagggtatacagaatttcctgttgttctttgtgtttatgtaagtctgattcttatagcattattcctttctgaccaccagtttgtgccttagtaacatgagggattaaggtggctttctggagttgacttacccaggtgaatatagtctaatttctgtgctgattatagtgtcttacaagatatgcatttagttgctaatatttaatataaagagtgtacagagtgtaagagaaaaattgcttaacatgtgaggaggcccagtgctgtgaaagagagaaaagagtttagcaaatggagtaatctgtaagggcattctgatagataaagggaaaaaaaaagtgtgttcatgaaacaagataattttgagaaaaaaattaaatggagaaactatgtaggcccggcatggtggctcacgcctgtcatccagacactgtaggagggtcaggtgggaggatcgcttgagcctaggagttcaagaccggcctgagcaacatagtgaaacccctgtctctgtaaagaagaaataaaattagctggacatggtggtgcacgcctgtagtcctagccacttgggaggctgaggtgagaggatcacttgagcccaggagttggaggctacagtgagctgagattgcaccactgcactccagcctgggtgacagagcaagaccctggctaaaaaataaataaaaagaaactgtgtagatttaatatttgtattcatctcttcccctttccgaaactccagtaaatggactacataaatactaaacaaataaatggactaaaaaaaatggaccaaacaaatgctaaacaaatcaccctaaagaactaaaaaggcagacgtgcataaagacagagaaaggaggaggcagcggaggccgcaggatatagctgtgtttttgggagaaagagaaacaggtggaggaattgggagagaaagctgaggaagttcaatcccttgtgtcttgtggctccataagaggaggggaatttctgacaagggacaaagtgccagatcttggaaggcccgggtgaaagcagggctggagatgggggttggcagaggtgtggacagggacagttagactcagggtccccactcctgtctgtagtgaagtgattgctgtcattgcccactcccccaacccccccccccacccccgccgcccctcaggaacctggaaagtctttctgtggacagaagagctccagaccctcggatctgaggtgctgcagaaggcaagggagaagggccattctaaaaccagccggcctaggttctgaacagggcacagctccgctccgggaactctgtagccagatccatgcttcctaggcaagagagtagagaacttatctcaggaaaattggatggccccagggaaaagactacgtttttcagaaacaaccttaaaatttgggaaagaaatgtgttaccttagggaagatacgtccacctgaaacctcaggatgtgtctttattggaataagggtcttcgcagatatggttaagataaggacctcactgtgagatcctcttcaattagggtagaccctgaatccaatgacaagtgtccttgtaagaggcagaagagaagacacagacacagggtagaagaccttgtgaagatggaggtagagatgagagtgatgtgttcatgagccgaagaatgctgaggatgccagcagccagcagaagctgggagagaagcaaggaacctcccactgcagccagagggaactaagcccacccataccttgatttcaactttctggcctcatgaaacatgcaagaataagctaatgtcctaagcctccaggtttgtggtagtttgtgacagcaggtctggaaactcatgcaggagggcaggttgaggaggatggagcaggtacttggtgtagtttggatgtgtccccaaacattcttgcattggaaacttaatttctgccctcgtgagtggattaatgttgctgtcacgggagtgggctccttatcacgtgagtggctttcttatcaaagtgagctctctttggctctctggctcttgccctgtcaccatgtgatgccctctgcgggttttgacataccaagaaggccctcaccagatgctggcaccttgatcttggacttcccagcctccagaactgtgagcgcaataaccttctgttgcttataatttacccagcctgtgatattctgttacagcagcagaaaacataccaagacatggatgtgtgtgtgtgttggtgggcggtgaggaggaagagagggagagagagaaaagcttttcagtactctttgtattgaagtacttatctcaggtcagcacagtggctcacacttgtaatcccagcacttgggaggccaaggcgggtagattggagtttaagaccagcctggccaacatggtgaaaccctgtctcttctaaaaatacaaaattagccaggcatggtggcacacgcctgtaatcccaactacccgggaggctgaggcaggagaattgcttgaacctgggaggaggagattgcagtgagccaagattgcaccattacactccagcctgggtgacaagagcaaaactctggctcaaaaaataaaatgaaataaaacaaaaaataattactttgataaaaagtagaaatttaaaattaattgattggatctaggaaatgaaaacaattgaaacaaagtttgccagatgcactaaacagctgtatagctgaaaagcaaattagtgagctggaagaattgagcttagagactcgggagatcattgctaaaagcaggaatgggagagcatggaggaaaagctggccctggaggataaatcacggagctccaggatccacctgaggggcttttcagaaggaaagtggagggaacagaggacaggtgacatttgaagaatggctgtcaagcttctcccagaagggagttgggatactgcaggagcctagtgaatgtcaagcagaatgaagaaaacaaagcaaacagaaaatcatgccagggaatcagagagaaacagaagaagaaccaagtagacagtttctaacagaaccatttacagtgcaacataaaatacatttacgagcagcctccccacagtcctgagggaaagtaccccagaccctagaattctttatcattcacagtgtcatcaagagggaagactctgtcacagcttcccaccctgagggccttgcgtgagccacaggtgctgagagatttttcctctaggcccccggctggccgtgtgggggccaggatggccaggagttctgccccatcacttctgtgtgcagttctgttccatcacttctgtgtacagaaagccattcctgtctaccccagagtcccattcacatatgttcactgcttgtcatgatacggagataggtgcactgaagtgaatacaaatattttcagacatctataagaacagaaaccttgcgaccctctgagtaattaaaggatgtatcccaatacgaaggcagatgaacccagggatccagggtgaaagcaacgtctgccagcaacatgacatgttttgctgaagttaaggtgtcactttttaaaacaattaaaaatctaaaatttcagatgtgtgtgaaggagaacagagagaaggggagatagactttaactttagtctttgtaataaaaccttaagttacgtactgagaattaaaatgcaaccaacggtagaatagagatagatgataagactttcaaaccagcagagagaaaagatggaaaaagaaaacttgattaatctcccaaaggacaggggaaaactagagccggcaagtagaaaatgtacatatttaagcatcagcatagtcccattcatgatggttggttttaagttattaaacacagcacccttagatcggatgaaaaacaaaatccagctataacattcagaagagacgcagctgctagaagtgagaagtaaaggcacggcacagagatccacgcggtgtggttcactgttagaagcatcgttaggccgtcactgagagccttggatgagatgcagggggcgtgtgggatttcttgatgggttccttcttcttgggttgagaataaagtagaggtttgtcctgctattttatttgtgctctgcaaacaaaaatatgttatattttcgccaaataactttgtttcttggataaaatacaagttgttccaaaaatacgaatgcaaccctaaagctttcgtaattaaaactgcactttggacatttgggacacacttttcttcttttatggtgacataattatagattccgttacactgaaacccaccgtcgagtctgtagtggccctggttaaatgcagtacttggaagaatgtattcctgtgcctgtatccttgaggaaaatgaaagattttgtggaaatggagctttgacctgtacacgtgaactgtgtttaaaataattcctagaatgtttctgagcagaatagcgtagttatgatttggggttaatatatgtgctctgaactcatgcataccattacattatttgttgttctatttcccctcttctgatgaatgctgtttagttgttttctcagtgacttcaaacaattgtttacaggtcctatggccgggctccgaagatgattcacctagagtctaactttgttcaattcaaagaggagctgctgcccaaagaaggaaacaaagctctgctcacgtttcccttcctccatatttactggacagagtgctgtgtgagtaccagcaggggaagaggatgcgcggtgggatggggttggagatgcgtggagagtgctgtgtgagtaccagtgggggaagaggacgcgtggtggggtggagttggagatgcgtggagagtgctgtgtgagtaccagtgggggaagaggacgcgcggtgggatggggttggaaaggtgtgggtctaggctttgttgagccagctgtaatttttcaaatttactttttaacatactctgttataggttgtcccttcattccttggccaagtgcgggacttgctgttgcgtgtttgcgccctggtctggcgtgctgtgctcaccgtggcgccgagcgtggtcgtgttcccatgtctccagtcttgtgagctgtctcactgtgccccacggctgccaggcttagtctaagctgtgtttgatcatgactttcagctttgttttcatgacccctgtgttcccatcgtggctccattgtccttggtcatctgttgtttcttctgcttgtttgtgaccccactgaggctaggaccatgtccttcctccctgttgccgtgcctgggcaggaggcgccccgtgactctccgtggaacgagtgggcctcagccctgtggccgccacagctttcacttgtattttctggttgtgtattcatgaatccagaaagaaccttttcgttcttgacacacttcttctgtcgtgaactaatagaaaattctgtgcggcacttcttcctgtattttgagtcaaataaagcaagatttagcagcatagaaagtacatagattattacacactgtgacattgtagcctagacctgaggcacagaggtagttgttggtgattttaatgagacaggaactgtaagtctgcacctggttttcctcagatttcacctcatgcaccctttctctgctgactttgctccgcctcctttcccacgggctccacacagccagtgaggacacacgtgaggagatttccaccggggaagcctctgccggagactctgtacccaaggttttcaccaggctgcgccgtaggccccctctgcctggcgtgcctgagaaggacactgtccctggcctgctgtgccagctcttctccccataacacctggttgtaatgttcgatttgatcactcctccaggagttgtccggttcctccctggcgtggggctgttgtccccttgcgatcagtaatctaactctggggagccactgtgaggcgatttaagtgtcctgcccctcacccagtggtgattctttcctgagccagagtctttactaagggtgctgacctttccacccatctccgtcagcccgtcccctattctggggagcgcctgcaagggccttctgctcaggcagtggttagtcagtcacctttactgatgctcaggttgtcccagatttggccatcaagagtcacttcagactggcacctgtgttcttttgagcactttctaatcatttgaggcataccaagatgttttaggttctgggagctcgttgcccttgtgctggagtcagccgcgtctccatggagccctggttcctctggcagcaggcgtgcttgctgccatggtggcgttgctgcctctccaccctttacgcagacagagctgatagggatgtgccttagacatcaagaactgggccggtcatggtggctcacgcttgtaatcccagcactttgggaggccaaggcgggtgggtcacaaggtcaggagtttgagaccagcctggccaagatggtgaaaccccgtctctactaaaaatacaaaaattagctgggcgtggtggcacatgcctgtaatcccagctactcggtaggctgaggcaggagaattgcttgaacctgggagtggaggttgcagtgagccgagatcgtgctactgcactctagtctgggagacagagcaagactctgtctcaaaagaaaaaaaagaaatcacgaactgatactgatgcgtccaattttataacttggagggctctttcttgcctctcatttatttctgctctcaccaacatcaacacatctctgtatttgctcagtgctacaacgtgcataagatagtttcagaattggtacacctgcgccacaactaggagcagacctactgagaacagctccaaatttgcaactaaacttttccttttggacagtatgtatcatagtgtttattaacgtctccttcagcttcatccttttcagggtttttgtagttagtcttgcatgtttaattgaggtatttttgttgtgatcaaactaagtttataagttcccatatgcagaactaacatcttgatcacgttgagacatactcaagagcaagggctgcctttccttttgtgcaagtctgcttctgtgttttacactttattttattagagatttttaaaaattctctctctctttttttttttaaagacaaggtcttattctgtcactcaggccagagtgcagtggtgggttcttgggtcactgcaacctcaacctcccgggctcaagtgattgtcctacctcagcctcttgattgagttgagaccacaggcatgcgcccagctaatttttttgtattttctgtagagatagggttttgccatgttggacaggctggtcttgaattcctaggttcaagggatccacctgcctccacctcccaaagttctgggattacaggtgtgagccacggtgccttacagggtctcgctctgtcacccaggctggagtgctggagtgcagtggtgcgatcttggttcactgcaacctccgcccctctaggctgacgccatcctcccacctcagcctcccaagtagctgggaccacgcctgccttttttttttttttttggtgtttttagtagagatgggatcttaccatgttgcccaggctgatctcaaactcctggccccaagtgatcctcctgcctcagtcccctgaagtgctgggactacaggtgtgagccactgcgcccggccgccatagttcaatattgaactatatttatttgcattgctggtataaatcccacttagtcatagtattattttcttaatgtggtattagagtctatcacttgaattttatttaggagtttttgcatctataattcacaagtggttgatcggtaacttttgttttatgctctttttatgaggttttggtattgatgttctacttaattcattaaaataatttggaagtttttacttactttctgtttctgaagtcatttatgtagcactggcgctacctggtctctaaggtttggtggaattttgggaaactagctgggccaggtacttttttgtaactctttgatgaaaattggtctgttttcagccatttgctaattttgataaagtacattttcttggaaattacgtatttcggttaagttgtaaaacttactttcattgaggtatattaagtggtctttctttactttttttttttgcgatggagtttcgctcttcttgcccaggctggagtgcagtggtgcgatcttggctcactgcaacctctgcctcttgggttcaagtggttctcctgcctcagcctcccgagtagctgggattacaggcatgcgccaccacgccctgctaattttgtagtttggagacggggtttctccatgttggtcaggctggtctcaaactcccgacctcaggtgatctgcctgcctcagcctctcaaagttttgggattacaggcgtgagccaccacgcccagcttttttgacttttaaaatgttttgtcagtaattattttcccatcattatttatttattattattattattttttgagacggactctcactctgtcactcaggctgtagtgtagtggcgcattctcgactcactgcaacctctgcctcccaggtccaagtgattcttctgcctcagactcccagtagctggggttacaggcgcctgccaccatgcccggctaatttttgtatttttagtagggatggggtttcaccatgttggccaggctggtctcaaactcctgacatcaggcgatctcccaaagtgctgggattacaggcatgaaccacggcgcccagcccccatcattatttcttattttgtatatttgtgctttctctctttcttccttgattaaattagctagttcgattttttccctccagagaaccaggattttaatgtattcatctgatttatcgttagtctgttttctactcaagtttctactttcatttgtattattttcttctttttgttttctcatggtttactttgttcattttttagttttcgggcgtttgaaatgcatttattttcattcttaaatttttattgatataggtctttaaagttaggaatttttctctggttactactttaaatatatcccattgttttatcattatttttcagaaattctctatttttgatttgtatttcaccctttcattaaatagttgtttaacagaaagctttttagcttacagaaaaaaaaagattaaaaaaattttgtttagaaatttctagctttattgcattgtgttcagaaagtgtttatatttttgctttatgaaacttatttttaaaattttatgaatttgactgttgtgtgacctaataaatgatcagtttttttggacatttcatgtgtgtttgagaatgtattttctgtttccagattgtaatgttaaatatccacaagacctatcttactgcttgtgttgtttaggtcatttatattttgaattttgtccatttgacctatctttaactgacagtggtatggtaaagtcttctgttagtggtgtgtttctgtttctcttgcatctcctgtagtttctgttttgtataggtggttgatgtattatttggtgcttaggtgtttacaacttacagtttttatggagtgaaatatgtcatttacagaatggcttctgggcagtgtatcttgcttagggaggccttgtctgtctgaagagaactgattttctgtattttattttaataattttgtaatttatgtcttatattgggacccgtatagcttcaaattatttatatatattaggagctctgggagttgagggtctaattttactgtctgaatgcatagcaaattggcctaacaccatttcataatagtgtgtcttttctccacttactgggaatgtcacctgtattttaaaccaacatcctgtatgcacaatattctagacactttggttctattgatcattgtctatcctgtgccagaatcagacttttaattattacgcttttttttttttttttttttttgggatggagtcttaccctgttgcccaggctggagtgcagtggcttgatcttggctcactgcaacctttacctcccgggttcaagcgattcttctgtcccagtctcctgagtagctgggactacaggcgcccaccaccacccctggctaatttttgtattattagtggagacggggtttcaccatattggccaggctggtctcaaactcctgacctcgtgatccacccgcctcggcatcccaaagtgctgggattgcaagcgtgagccaccgtgcctggcctattacacttttataatatgtatcaatatctttcttttaaaataaaccttgtggccatctacattttcccttccacatgtcgagtgtccaaatttattttctgaagatggctgtagcagcatacccatcccacatgctcctctctatgtgacagtgactttcccttgttgaaaggctgggcctgtgtttcctccagttgaatctgggtgggcctctgactgtggcagaagcaacactgtgatacttgagaggaagtcctaaaagataacgtgccttctgctggattctctcggggtgcttgttcttagattccagccaccatgctgtggggaagccaagcagccccgtgggaaggccactcgcaggtgttcagcctgccccagctgagtcccactgtgtgttttagctcccagcctcaacacgccactgacaccaggtggagcagagaccttggttcccaccaaatcctctctcagttgtagatccgtgagcaaaagaaagttttacaccactatagcttggagtggcctgttacacagcagtagataactggaatatcagttgaaaaagagaaggctggaggcattttgattgggattgccttgaataagttgttaattcatttgagaagaattttaatcatgagtcttcttgaatcagggaatgtggtatgtatgtttttccattctttatgacttttttctgcccttatttttcgtaaaagttttacatttttattgttagctttagcttttgtggccattttgaatgagacttttttccttaaaattacattctaatagccttttttttttcaaatcttgattatcgtctatttaaaaaaaggagtaagttgataatattgaggattttagatttaaagtaaaactctgttatgttgaatagttgctttaggacttatagagtacatctgtaacagcataattcttccttcaagtaatatgaattatattacttgatgcgtgatataagaactttggatcattgacttctgttttctccctcccagcctttgttattgttgtcatacattttctatacttgttaaaaccccatagtacattgttactattttttgccttaaacagtctgttatgccttggagagattaaaatagaaaatcatgtctttttttttttttttttttttttgagacagagtttcgctcttgtccaggctggagtgcagtggggtgatctcagctcactgcaacctccgcctcccaggttcaatcgatactcctgcctcagcctctgaagtagctgagattacaggcgtctgccaccacgcctggctaattttttatatttttagtagagatggggtttctgccatgttggccaggccattcttgaactcctgaccgcaggtgatctgcccacctgggcctcctaaagtgctgggattacaggtgtgagccactgcacatatttacccacccagtttccatttccattgctgcctgttccttttctttaaaatccctccgcctcccgggttcaagcgattctcctgcctcagcctcctgagtagctgggattacaggtgcacaccaccacacccagctcatttttgtatttttagtagaaacggggtttcaccatgttggtcaggctggtctcgaactcctgaccttgtgatccgcccgcctctgcctcccaaagtgcttggattacaggcgtgagccaccgtgcccagcctttgttgctgtctcttcctttgtgcagatccaggttttcatctggtctggatttcctgctgaccgaaggatttctgtaaccttgcttgtagtgtaggtctgttacggtaagctctttcagcttttgtacattgggaaagtctattttgccttaatttttgaaaaatattttcactcgttagggaattctaggttgacaatttttttttaaagatgtttcacctcttttgggttccattgtttcccatgagaaatctttcattattatttttgttattttgtacaaaagtggctttttttctttgcattttaagattttttctttcttttttctttttttgagagagtctcgcactgttgcccaggctggagtgcagtggagcaatctcggctcactgcaacctccgcctcccgggttcaagcgattctcctgcctcagcctcctgagtagctgggattataggtgcccgccaccatgcccagctaattttttttgtatttttagtagtagagacggggtttaaccgtgttggccaggctagtctcgagctcccgaccttctgattcgcccacctcggcctcccaaagtgctgggattacaggcgtgagccaccgcaccgggccaagattttttttctttatattggtttttaacagtttgattatggtatgctttggtgtagatttcttaatatttcttgtacttggggtttgggggtttattttttttttcttttttgtgggggtggatatgacctttattgagcatatccaccggagaggaaatcatgtttgtacaaaaccagatgtttgttactataccttctgcatcacaattaaaatccgagcagtatttaaaaaacagtcaactcagtcaaaacccactgcttcagaatcaatagcttctttgaagccacagtgacccttaaatatggttaagactcgaatgtagaaatttggttggttggaaagctaattaaacttctaacttgcttaaatagaattacagaaaggtaaattgtgtttttcacagagatgcagtccactggaatcaccaacactggacagctggtagagtatttagagtcctgagaaacaaggaatccaggcatcctttagacagtccgctgttgtcccttcttcccagtcagagatttgtgggtgtgtgcagtgacaccaccaccagcaattgtagccttgacaagagactccagttcttcatctccaggaatagcaagttgcaagtgacaaggggtgacacgctttacctttaagttttttttttttttttggggggaggattgaatttcgctcttgttgcccaggctggagtgcaatggcacgatctcggctcactgcaacctctgcctcccgggttcaagcgattttcctgcttcatcctcccgagtagctgggattataggcagccaccacgcccggttaattttgtatttttagtagagacggggtttctccatgttggtcaggctggtcttgaacttccaacctcaggcgatcctcctgccttagcctcccaaagtgctgggattacaggcataagccaccgcacccggccacctttaagtcttttgatgcatttcctgccagttcaagtccctctgcagcgaggtactccaggatggctgtgttgtacacagcggcagtcgcgcccacacgtccatgactggccgtcctacatttcaggtgtcgatgaatatggcccactgggaactgcaagccggctctgcgagcgggaaaccgcctttgtcttggcctttctggagtcctttcccaccttactgccagccatttcgaattctgctgaagctcaagcaagcaaggcagagaaagggctaatcagacccatggcgagatcccaccacctactccttcggcgcactgtgattcaaactgcttggggtttatagttttgatttaatttggaacatttttattttattttatttttgaggcagggtgttactctgtcacccaggctggagtgcagtggcaccatcttgtctcaccacaacctctgcctcctgggttcaagcgattcttgtgcctcatcttcatgtagcttgaagtataggcgtgtgccaccgtacccggctaatttttgtatttttagtaaaaatggggtttcgccatgttggccaggctggtctcaaactcctggcctcaagtgatcccaaagtgctgggattacaggcatgagccactgcacatggcctgatgtagaacatttttggtcattgtttcctcagattgtttttctgttgcaccctctctgggggagtatgtgtgtgtgtgtgtgtgtgtgtgtgtgtgtgtgcgcgcacacgctacatgaagttccataactcactgataatctgttgatattttttgtagtcctttttccctttttcttggtgtttcatttgtgtaattgctgctgctctgtcttcgtgttaaccttttcttctgcagtgtctaatcggctctcattccacttagcatattttcattttagatttgaggttttcatctctaaaagttccatatgggtctttttcttaattaagtatcttccatgtgtcttcttcacttcagtccactaccttcttcaacatatgaaataactaagtgacagtagttactgtaactcttttaattgctttctgtgtcattactggggctatttctattgattgatttttccttttgagtatagctttatgatttgataggtctggagcagtgatcagtccaggacaaattattccttacagccgaggcaacacagtcttgagttcctctggttttccagactggcctatggggacagccctgttccctgccctgtgtgactgccaagcatgggtgcctctgatcgtgtctgcgggttctgttccagcaatgggtggttcccgcatgtacttactcgtcagttccctgtggaatactcgagggccctgtgccggtctactttactcaccatgtccctctcctctcctaacacagtcctaggaagtctagctgtcttgatctccctggcctgggctctgtgtcctcaactcagggagtctgccagcttcccctctgtcaccccctgccctccccaccctctggtgggcacccagagggcttgctgggcttgtttcccatctctgagtgttgaggggaggaatcattgtcctttgttccttggtgtcctggtcttgaaaaccactgattcatgtttcttggtttttggtgttttgttttggtttttgtttgtttgtttgttgttgtttttgagacagagtcttgctctatcacccaggctggagtgtagtagtgagatctcagctcactacaacctccacctcctggggtcaagcaattctcctgcctcagcctgctaaatagctgggattacaggtgcacgctaccatgcccagctaatttttgcatttttcatagagacggggtttcaccatgttggccaagctggtctcgaactcctgacctcaagtgatctgcccacctcagcctcccaaagtgctgagattacaggtgtgagccaccatgcccaccctgtgtttttttttttttttttttttggttggttcaggcagtggtgtaaatctagtccctgtcacttcatcttggctagaagcagttcactcattgatttctagcttttgatggagtgtaatctattactatcatagtattaataattaatatcattgatgtgcagattgttctgaatttggcttctgtactgatgtactgagaatgtactgattctttgagtactctctgggctcatcccctcctcttgcttcatctcagggctcagccctggctccttccagtgggaaactgtatttagaagtcaggacctggagctaggggagagctttgctggtgagctctcagtgggcatggctagagaacacgtgtgtacacccacacgtgtacgtgcacacatttacatctgtatttcgtgtgtagctgcttgtgtacgtacatacatacatgtacacacgagcccatttcagtccagcactgcaagggtgatcctggtttcctcccttctatgtttgtaactcccttctccacatggaggagccaggcactggttctcctctgtgtttctgatgggagtaatccctctgtgaatgaccatcctcctgtcactgctgctctgctcccagcaggtggatgcccattcccacacttgcctggcagtgtgcctggcacagacttcctcctcacctcacttgatctgcaattaggacaggctcgggacttaaattgaataaaaaggcatccctgtctgggggatgccctttgtgccctgcttggccccttataccacttacacccttatacctctgtgccagccccaaaatccttcatcatctcacttggggcctcacatcttgttctgtacttccctctactgccacctggacaccctcctcactgctgagctctggtacctggggcggcctgctgtgcttgcccaccttgggccctgatgccctgcccctggctgctgctgcctctgtcttggagctggagccttcccctctgactcagctcttgggtcctgcatgtattcctgcccactgctcatgggttttcctgtagtgactttgttttctttctttcttttttttttgttttttttgagatggagtctcactctgttgcccaggatggaatgcagtggcatgatctcggctcactgcaacctccgcctcccaggttcatacaattctcctgcctcagcctcctgggtagctgggactacaggcgcccaccaccacgcatggctatttttctatttttagtagagatgggatttcactatttggccatgctgggactttgttttctttagagacccttagcttcactggctctgctggtcctcttaagagtcacagagtcgtttttaacatgtcgttttgtttgctagctgggatgagtgataggctggatcttgccaaccggtttgccccaggattatgtggaacttctctgtactccctctgtcctgcctcatgctctgtgaggtttcttctggagagttcctgcaaattgactgagcagagctgctctaatgtccccttgggatgtggcagcccctgcccggtgtggacaacttggagccaggactccttctggggtgggggtggggaggagtccagctaaagggctcttggtggccttgtaagaggtggagaggcttccagcagctccttggatggctcacctgtgacgtgtggatggggtcagccgggtgctatgtgtattttcttggcagtcacaggctctgggccctgttggccttttggttttgcttccaggcatggcgtgttggggcttccagcacagaatggttcaccagtgctgtaaaatctatgcttcaagtcccaagaactgccgtgctgtggaaaatgtgcactagataattaagttactgttgggtatttatttgcaggaaattgagtttaccagttggttttaatctcagttttcaaagtaaaagatcttttcagattgtatgatatttgtaatttaaatcaggacatagcagtttttaaaatcaggatacaaatgagaagtactgccttttggaactttctatttagttagttaaaccaaaagagaggctgggtacagaatttaggatttaatattttttttttggagacgcagtctcgctctgtcgcccaggctggagtgcagtggtgcgatcttgactcactacaacctccgcctcccagttcaagcaattcccctgcctcagcctcctgagtagctgggactacaggtgcacaccgccatgcccggctaatctttccatttttagtagagatggggtttcaccatgttgcccaagctggtcttgaactcctgagctcaggcaatccacccaccttagcctcccaaagtgctaggattacaggtgtgagccactgtgcctggccaggatttaagatttaactcactcgtggatactctgattggcttctctctgcctgagtgttactcaagagtgacttgaaagtccggaggaattagggcaggacagtgaggaactagcaaaagaggagaaagcactgatttagatggtagctgtgagttactgtgtccagatattgtcagtgcctaacttggaaatgaattaagtatcttggttttagattttctaaatctaaagggagttggactcttctgagtggatttatggaatagaagcgcagttataagtgataacaggcaaagtgtctgttttcctggttctttatggaagagaaccaagctgaaggccttggcatgtatgtagaaagggccctttctctggcaggctcatgcttgggcctctgcgtgagaagcaggattgatttctgggatggcacggctccctgctgcctgtcgggaagtagagcagccttgcggaagctgcaggtcgccttctttctgaggtctcacagctgtagctgcttgcctctgacacggccttcgcagacttgcggttggggtggttcccaggggtacagagctcagaggctgtggtagaagctgccgggaagcttgcctggggttcctgtgggcagtctgggctgtgccatgacagccagcttgcctcctgagatgaaggcacggcacacagcaggatggcagtcatgtagtgcttgggcccagagctgttggccatagtgggcctgggttttaaagccctgacttgcctaacagacagtattgctgtgggcagctcactcaaccctctgactctcagtctctttatctggatcactgggacgctcacatcccttggggttgtgagaactggggatcatgcatgcctgtgtgcggcactgagacccacagagcacgcccgcaggcttgctaggccgctgggctttttattcaatttaagtcccgagcctgtcctgatgctttaaaacattgcggcctttgcaggctgttattaggcacattttgctgtataaactaaagggcattagttaacctgctttcacagtgacttgtttgtttttaggataccgaagtgtataaagctacagtaaaagatgacctcaccaagtggcagaatgttctgaaggctcatagctctgtggactggttaatagtgatagttgaaaatgatgccaagaaaaaaaacaaaaccaacatccttccccgaacctctattgtggacaaaataagaaatgatttttgtaataaacagagtgacaggtaagtgtatctttaattttacctcatttggttaatacttgacatgatacagattgctggcttcctgggtagtaataaatatttactcagcaatctcgagtgagtgtccatggggtgctgtcaaggagacctggtgcctgtccttgtggagttcctgtttaggcaggcaaagaactcgaagcagtcatcccccgagtgtgctgcctgggaggagcgggtcttgggcccatagtcctgggaggcctcttggtgggtcctttctgaagactgacagcagcagctcctgcagttcttctgtagaacgggtccttaaaggtttttgttttttttttgaaatgacggcacctgtgtttttttctttaccttaacacctgagagttcctaagaacacaagttataaaatgctgacctaaccccttcagaaactgtgaaagggaatcctgaaactttggcagttaatagattgtatgggctttctccgccttgccctgctctctctcctggggtagctcactccctttctcttcagtgatgccattgccagctgagccagccagcacgttaactcctctataaccgatggtctgtatctcgtagcttagcactggaactcacccaaggcctggggattcaggggcgaacatggaccctgccctggtccagcaggtcattatagccatggtcaccatgcttatggtggcgagggttcagatggaggtacatgctcattgtagaattattagaaaaaggtaatgagcaaaaagaaaatggatattaactcttagtattttggtatgtatgttctgagactttttttctttatgcatacataatacgtgtgtgtattttaagttaatataacgttatgtgttgtttatacttgtttttttcactcaatatattgtaaagattttccacaaacaataaatgcatttccagactctcagtgttagtgagtggataatattccatagtattaatgtgccgtaagttatttatacattctgctgctgggcttaggttattgcttacttatcgttataaacaacaatattagaatacttttctagctcaaatgttgtgagcatccttaattatttcaggataccttccctaaaggaaaattgcttggtaacagattttgtgcattttttgggcttttgctagttacgaggctggtagaggcaagggttgacttgtgatcagcagtgtgacttgtgacagcagtagccgttgtggtgtctcgctgaggctgcagccgggagccccttgttccacatgtgcctccagcccctgcagtctgcgcgcctggggggatcacgccgctctccagattggcccaccatccctgacttcattcgttgttttgggctctccttttctgagttaatgatttaggcttgatgtgaacttctgaagtgtagttcttttttacttaaaaaaaattgatgatgatatagaaacaggatctaatagagataggacatttcatgactgtgtatctgattgacctctgaaaacagttactgttttggtggttggcacttgttaagtttccatttccattcacccctgtaggcgcacaggagaattcgcgtctggtcgggaataaatgttggtaattataatccttgagaatgccttaaggataaactacctaactcataggttctagcaagctcctactgtggataaatacaagttagtcctctgggggacctttggagtgagcggctctggtccctttgtctttgagggaagaaagtgtgcagtggggtggattgaatggaattaaagccagccaccaagttataagttttcttcttggttctggttgttcacatggtggaacatgtagagtgtatgctgcttcactgttttgtccactgatttataattccatgaatttagccatgcctccaaaggatatgctggggcacggaaaaaaggaacttagagtcagttcattttgctactttttggtaattcaagtaaaatatttactaaggagaactggtgaagctcatagaatcaatgttttaaaattatttctgagttcagatttattaatcatctttctagattactattaccaaggctaaagaaatttaccatttccagcctatcagataaatacgttgccttgtccaaatctgttgggaactttgtgtaatttcgtgtgtttgacctttttacatcatgggttcagcctctttgtaattaaactgtttgctctatatgttaagccatgttctaagcctttatttgttaattgtttattaaccttccccttcaagagctcacaggctagtgggagggatagaggtccagagaaggggagtgttttcctgtgaggcccacagcctagcagcagtgtgggcagagcagttgggatggtgattgggggaggtttgtgaagatgccacgcctgggtggaaggaatgttctcatgaagagaggagagcgggagaaggtcagcaggcttgagctgggaagcagaggaagtaaagtgagacatcgtggtccttttgtgctgtgctgagaaatctaaatttatcctgtcgatcccaaggaaccaaaatggattttgaaggaggcagggaactgagtgaggcgtgatcacattattttacagaggactcagagctgcgtctttggctcagggctcatgtaaatccctttccccctttccagttgattctatagcaaactctcctttgaatttctgtagaacttactgctcgtgttcatgaccagttcatgatgaagccttttcctaacctggtttcttaccgcctgcctcatgtttttgactgtttatagacggaagaagctagatgcggtggcttatgcctataatcccagcactttgagaggccgaggcaggaggattgtttgagcccaggagttcgagaccagcctgggcaacatagcaagacctcacctttacaaaaaaatacaaaaattaaccaggcatggtggtgcgtgcctgtgatcccagctactggggaggatcactggagcctgggaggtggaggttgcagtgagccaagattgtgccactgcactccagcctgggccacagagcaaaactctgtctcaaaaaaaaaaaaaaaaggaggaggaaggaagaaaattgccgctcaggacaatggcagctgctgagtcgtggtgctgtgcatggagggtctttcccagatagtctgttcatgtctttgcaggtgtgttgtgctctccgaccccttgaaggactcttctcgaactcaggaatcctggaatgccttcctgaccaaactcaggacattgcttcttatgtcttttaccaaaaacctaggcaagtttgaggatgacatgagaaccttgagggagaagaggactgagccaggctggagcttttgtgaatatttcatggttcaggtacttgactcattacagaactagacagttccttctctccttccctcctttgttccctccctctctcctcctttctttctaagtaaggcacctctcgtggtaatctcattggcagagtttttaaaaacaaaaaacctggaatatctttaggactagaaaggaagtgtatggaagcagatggggcatgaaaaggacacacacactgccccggggagcctctgggggcaaaagctggagcagtttcagtgacagaataaataaggatagagtcgaggtttaacccatggaataaaattaatatccatgagtctgtatcgatagaaatcatcagttaaataaataaatggaggagaagggtcaactcttccatacagaagaattccacttaaacgcagaaggaaagaaaaacagaaaatcacttttaagccagtgctccagcaagaactgttggaggcaggattactgatgggtgtccggggtggtgggcaaaggcctgagaagaggtgggcttgcacagtctcacggtggccccccaagatgtctgtcagctactgagggagcagtagccactccacagtggggaaaccaggtacataccacctgaatgaaatgataaggccgcttctgcccatgagaagctgtgtccacctcatgaaatccttggtaagatgttctgagaaatacttagcgtcttttctctgtaaaaaatgatcatctcacggcagtcacggaacatatcaaatgaacccacgtaaagggacattagacaacatagctctcttcaagggtgccacggcagtgaaagacagactgtgaagctgacagactgcaggggctgaaggaagcaacagctccggcctggtttgggggtcgagggtggggtcttagagcagaaacaactacatcagtggaaaaaccactgaaattccaatgagggctatttagttaatagtattatacttaggttaattttctggttgtgacaattgtaccacggtcatataagatggcaatgtttaggaagctgagtaagggctatatggaaactagataatttttttttttgcaatatttctgtaagtctaagattagttcagaatttaaaatgagtaaggaaggaaattctgacacacactacagcatggatgggcctagaggacatgatgccgagtgaaataaggcacatagggacagatgctgtgtctgcttatgtgaggtccctcgagtgctcaggttcagagacagaaggtggaatgggggctgccaggggctggcagagggagaatgggaatgagtgtttaataaaggacagaggttccgtttgggaagatgagaaagtttgggatattggttgcacaatagtgtgagtgcatttaacactactgagctgtagtcttctctctctctctctctttttttttttatgatggagtcttgctctgtcaccaagggctggcgtgcagtggtgcgatctcggctcactgcaacctccatctcccaggtttaagcgattctcctgcctcagtcccgagtagctgggattacaggtctgcgccaccacgcccagctaatttttgtatttttagtagagatggggttttgccatattgcccaggctggtctcaaactcctggcctcaagtgatcctcgcaaagtgctggaattacaagcctgagccactgcacccggcctgagctgtacttttaaaaatggttaagatggtcagttttatattacatacatttcaatcaaaatttaaaagaaaaagatgagtttattagagtgctgagtcttgtaaatacttcacaaataaaatgaagttcaacataacttagcagtttctcttgcaaaacacagcccaccactgttttcacgggaaacaggatacaaaggagagctctcagttctcacctagtgagtgggacctgggtgggcccttaggggtctgggaataatgtccacaaatacatggggtggaactggattccaaagacctgaccatgtcaggggaggtttatgtgcgtgcacatcctcctggtctttactttttaatgtgcagtaatggagatcagaaggcaatcacctgttgccctctcttttcattttctcattcaacaaaggttactgagcacggacaggtgccaggccctccttgatgctgggacgccgtcagtgtacagttttttgtgagcttgtgtgacagtggaggagatacaggaaaggaagtgacgcatatgctagggcgagagagaggcacaaggcagagatggtgtggggtgctgtgcgggtcaggaggaggaaaggcctgactgggctggggacttagccagagctgaaggagtttggagagcaagccatgtgggtgtatagaggaagaggaggtgttccaggccatggagtggggcagcgcacaggtcccgaggcagctccctgccacgcacacgtgagcagcggtgaggaggccttggtggtggagctgagtgaggccagagggctggtgctgggaaggggtgggggtgggggacatagattttgcagggcctggggatgtctcgaaaggatttaggagtctcttgaatgtgatgagcagtcgctgactgaaatggggaagaccgtgggtggagcactttgtgggaaaggttggggttcaggtttccatgtgtaagcctgagctgtctgttaggcatccacacaagcgtgctgtgcctgccattggagccagagtcaggtctgagctggagtcctgaatgtgtggtggtcatgctgtgtagatgggctccgtcatggagagggaatagtgagtgtagacagggaagtccaagggcggagccctgcggcctccagcagagagcctcggggagcgagaggaaccagccgtctgaccagagggagccacagtgaggggcgaggggagcaggtggccaggtcctggacagcaggaaacatcccaaggacaggggggtgaccagttatatctggtgctgccgataggtcggggagggttcagaaattaccttagcttttcctagcttcttgtgcatgcgtgaatgttgacatatgcggtcgtcacattggttgttacttagcggagcgtagacattattcatagtgctgcgtgcctttctctgtcgtttaatggctacatactgtttcttctatacattgatttatgtttttgtttttttaaaaaacgtatcttgggcgaataggaggagcttgcctttgttttcgagatgctgcagcagttcgaggacgccctggtgcagtacgacgaactggacgccctcttctctcagtatgtggtcaacttcggggccgggggtgagtagtggcacttcagtaacgcatgcttttcttagtgtggctttctccaacttcagataggcttgaagcagccatttatttacctcaggagtacgcatgttttgttgttgtctttatacacattatatcggatatattctcgtgattcctagaggaaatgaaatgagaattaagaattagtcattttcacttttagaagaatcttaagtaacaaaaataataataatttaaaaaaactgttttccaggtataaaatgtcctttccacaactcagtggcctgctggtgatgcttcgattctgtccctcgttagaatcagagtggacgtccctttgccttccatccaggggttatctttggaatgctcgagtgctcattgctgtgaacttataaaatgcccttgggtgttcatctttcttttgcacttttaaataatatcttaagctcctttacaattaaagaattagcacagtgaaaccatacacagagagaaacattggttattgtcctcagtgtttttcgctgatacttattttgatgaaagtgataccacgttatatagctgtttctctgtcgctcctttttgttactcacagcccatcctgggcatctctccaggttagcaggtggggtttggagttgtttttgttacaattggtattcctggcttgattccattacctggtgttggacattgggttcttttatgcttcttgccaccacaagcagtgctgtagtgggcatctctgccaggtgttctttttgagaacccttgtcaccatgtgtgaaggaaggagtaattttgaggagccctggtgtcagcaggagaacctggagggagatgaagtgtggggacggtcagttctagctgtgagcactgtcctcactctggaactcatcagtggcgccgatggatactggctcatagtgcttctgaagatcaggtctggatatctcactctcctgagatgccagtatagacacagaaccaaagcaaagtgtttactaagtaaaaaaataaaataaaaaaacacttctatttcttatattttatgtgtcttttttttttttttttttgaaatggagtcttgcactgttgcccaggctggagtgcagtggcacaatctcggctcactgcaagctttgcctcccgggttcatgccattcatgccattctcctgcctcagcagtgggactgggactacaggcgcctgccaccacgcctggctaatgttttgtatttttagtagagacgggttttcaccatgttagccaggatggtctcgatctcctgacctcgtgatccgcctcagcctcccaaagtgctgggattgcaggtgtgagccaccatgcccggccttatgtgtccatattatacaaacatatctatttatttatttttgagacagtgtctcactctgtcccccaggctggagggcagtggtgtgatcttggcccactgcaacctctgcctccagggttcaagcgattttcgtgcctaagcctcctgagtagctgggattacaggtgcatgccaccatacctggctaatttctatatttttagtagaaacggggtttcaccatgttggccaggctggtctcgaactcctggccccaagtgatcctcttgcctcggcttcccaaagtgctgggattatagttgtgagccaccatgcccagcctatacatacatacatacacacacacacacacacacacacacacacactttttttttgagacggagtcttgctttgttgccaggctggagtgcagtggtgtgatcttggctcactgcaaccttctcctcctgatttcaagcgattctcttgcctcagcctcccaaatagctgggactacaggtgcgcaccaccacgcccagctaatttatttatttattttaattttaatttaatttaattttattttattttttgagacggagtcttgctctgtagcccaggctggagtgcagtggcgccatctcggctcactgcaacctccgcctcccgggttcacgccattctcctgcctcagcctcctgagtagctgcgactacaggtgcccgccaccaagcccggctaatttttttttgtatttttagtagagacggggtttcaccgtgttagccaggatggtctcgatctcctcgtgatctgcccacctcagcctcccaaagtgctgggattacaggcgtgagccactgcgcctggccaatttttttatttttagtagagttggggtttcaccttgttggccaggctggtctcgatctcttaacctcgtgattcgcccgcctcagcctcccaaagtgctgggattacaggcgtgagccaccgcacctggcctgtattttttaaatatcttacatttttttaaaaaatagatttatttagcaaaaaacgtttgaatttaataaagaaatggcaataactggtgcatacattagttgaaaatattaaaatatttacactgagcaccaaatagaataattctcagtcttttcatggagaactcctttgaaagaatgcctagaacttaatctgtttatttaggtttttaatcgagaaatctaaaactgccaatcacagtttctaattaccatgagatgaccaggttaacaaccttgaggtcatatcataggagctttaaaagctgcgtttaacctatacattctaactgagggcatttgttagcctcaggcaggctggtaatcacaggtccatgtgcttgtgatgccatatacacaacattgagtaaataagtgttatttataaggtaaagaccatatggtccctggcagcagaataggtgctgggcagcgtcagggaccaggcacctgaatggatgtcagtgcatgtgagaaggagccttcaaggctgaaatatcttacatatttcttatatttgacataatttatttggttttttctctcagttttaaaatttggggcaatttaaaatccaaaagtaagcctggaccaaattttgccactgaataagatggttcgtttttgttctttcattcaacaaatacttactgagggaccaccatgtgccaggcactgttctaaatacagggaggaataaagcagaatccctttttttatgatgcttacatgaaggggaaacaggcacagaaaagtaaatctatcacttgctgtccataatagtaagtttgggccgtagaaaggggctcaggtgagagatggggcagtatgtgccattggagcttagatagggcactggagtggcctccctgtgggggcggcactggcacagaggcctgactgaaatgtgggagtgccccgtgagaatcctgtgggaggggagcctagccaagggaactgctggtacagggctgggctggtacagggctgggtccactccacactgctgggtgctccaatagccctgaggatgctggtgcaggggctgggccagcgggtccactccacactgctgggtgctccaatagccctgaggatgctggtgcaggggctgggctggcaggtccacaccacaccactatgcgctccccgggtctgaggagaagctcacgtcagtgaagggagcgtttaaccatgccaggatgccacgtaggaatgaactggttatgacacctctctgttgaagtgagaaaaatagattcaaagatttttttcaataatgattgatggacttgttattatacattgttatgcttattttaagatcatatttgagtcttagggatgtaagtaaacctctgggagccttgctgaaattttcgacaagcagtaattctttttccttctatgtgctgctaccaagtcctccctgtcccttcctccaggagcttgactcagggacgtgacgtggttgagttagggaaataaggaaggaatatgtaatctaaggaagaccaaaaaacaccaggatggtcagagcaggctgcactccagcccacaggtaaagataaggaagcccagccccgctgcagcctaagactagagccctccctcggcctgagacagagcctgagctcccctaaccatgtagcctgtctgtctctgggtgacttcccaacctgttcagctcccgcccatgactttctgggcatggtagggtggtgtgccttgttgcctgggtcacgttaccctcagctcggctgtcagtgctgggagccgaatgcatcactagaccacagggggtgggccagtgttcatagaaaaactggttatgaagctgcctgtttgcccaccatcctcagcctgagcaggaagctcaggaaggtgaagtacctgcaatcagcacctttcatgatgtgtgtttgtttagatggtgccaactggctgacttttttctgccagccagtgaagagctggaacggattgatcctccgaaaacccatagatatggagaagcgggaatcgatccagaggcgagaagccaccctgttagatctgcgcagttacctgttctctcgccagtgcaccttgctgctcttcctgcagaggccgtgggaggtggcccagcgcgccctagagctgctgcacaactgcgtgcaggaactgaagctcttagaagtgagtcggctgttttcccaatttacccgtttcttgattgttccagcagaaatctctgaaccttgagatcccaggcattgaactgtttgtgcttaagaaagggttttcttttctgaatgcctttaattttcagtatattgtttgcttagttactttttacgttgataaattgctcaaaaatagaactctgttctcaacatgctggagtttgtgccggtccagagcaagcctcttagatgagcttctcagtgaagctcactggctgactgcggcctgtgctgctgcgtgagctgtctccacggggaagagtcactcacctgagggacacgcagagctagattttgcatgtagacatttattttatttcagacacttatgtcatgtagacatttatttatttgtcttttcagataaatagttttgcacatggccatgcaggtagcaatgtgagtgacacacagcaggctgtgccccattgattagtagtacggagcttcatggaagatatgtcataaatatgtgtgtgtgtgtgtgtgtgtgtgtgtgtgtgtgtgagtgtgagaatgtagttagtaaaacatttgcccttagagataaattcacccaagcactgaactcttactgtccatagaaccacggacattgtagtgagatgaaaggactgtagagaccgtatctagtctggtgattcttgtttcagggtcctctttacccaaaacaattcacacacacacaaaatgatacttacgacctgaggatttgtgtacatccctgccacccatcccctggttaagatctcctgagtgagtggtctctgatgctgttttgtaaacaagaaaacggagtctggaagtgattaggtctgaagagtataagccattgatggggacggtgtttcataatataggaacttatttttgtgtgcttggtttaaaataattttaagagatttaaactttaattaatgaagagaaatatattttagttaatttcaaaaggagaagttcttatttcagagctaagctcattagtacctagcccaagtcacaaactcagaaacttaagaatttttatcaaatgatttttcttcacctaatgaagcaaatgaggaaaagaaacattttccacctcgaaatgaccctctgggctgcctgtaatcacctggatttagagactctgcctgggttgctcagccctaactgcaggttggggacggggctgtgagggaaccattcactcctagagccgggctctctgttcatgtgtacctagggatttcacctgatgttgagatttttgtcttactagccgggaggggggaaaattgaagtattcaagtccaaatgattcagacatgatgtcttctgagtgagacgaccccaggaggctgattggagagggctgttagttttgttattaccttgtggctggaaggagaaatgtgtaagtaatagagggtgtgggctctggagttcccttgtagcgtcggggttcacaggagccatacggggtctgttggctcctctaggtgctcgtctgcagggccgggaagtcacaggtattttcaaggctttgtatcgtgtgaggagcctcttatccgtggtgtattttccgagccctttgctttgctgaatgaagttgttgtccccttggcctttccttgagtggaagctgccccattgcttttagtcatagctattgcacctctttgcacggttgagttctgcatctccagtgagaggaggtggccaaaggtgaatgctggatttgaggcaaggacgtgtcacccactgatgactttctcacagtctgtcagtctctttccttctaagaacccgcttcctgtttcgtcatcttctgatgcacacagctggctgcgcctccttacatgcgctgtgcctgtcggcttcccaggccagagaggacagcctcccttgtcgcttgtgttgaagcccacacaatcctctttgcacactttgcacctgtgtttgatcaacactgagattcacactgtttacttagagggcttcgctggtaacttcacgtcagaagtgtttctctttctctccttttttctaaatttttaaattttttggtagagatgagtgtctcactgtgtcgcccaggctggtctggaacttccgggctcaagtgatcttccctgctcccctcccaaagtgctgggattacaggtctgagctgcccgtggctgtgtttttctctcttgtgcagtagtttttactccagtctagttgttaggattttttggtgagagtcaggttttagggctacagttgagcagaggccagggggtaggtgtgccactgtcagttgcagatcccactgtcccactttcgagtgggtggcttataaaacatgtcctgctaacatcctggttgctttaccagttgatttgaagtacctcatttatttaaagagaataggaggcaacgaagtggccagctgtgatggaaactagccctgctctgtagtagggcttgatccacactccaggggcgacgggggctgaggaggggagcaagacggccggatagaggcctctgccctgtgggtgctgcttactagccttgcgcactcccttaatggaaaatgtgttaagaatggagattgtgcctaccttgcacagctggctgctggggtgagcggtaacacccgtgaagtgaggccagttctgcgtgagttcaggatcctccttgacagagtatttcctttttttttctgtaacaatttctaattttccctccatttacaaaagttgaatgttttctttatgtaaatttggaaaataacagacaaatatacgaagaaaatgtcgttgcttttgctagcaggaagaggttccctttttttgtccatggccttcttatgtatagatgaactgcagttatttccttgctcctatttggacatttgaattcttcaaaattctttgcaattgcagcagtttgtatccttatacatacatctttgtgtgtaaattcatacaagtagaattggaaggtcgaagatagacatgtttttaaagctatatgttgttaatttgtcctccagaaaggtcttcccattttcagtcatgctagtgatgcctgttttcctgcacctttggtaagaaaaaagtatgatacttatatattttgtcgccaaattagaagaacggggaagatactttcttgaaggccataatgtgtttgttacaatgattgcccaagtgattttttgggggggtttggaatgtgtttcattcagcgtttgaccttttatcaccttagctgctggttatgtaacagaccgtgtgggcctagcagggtcaggactcctccagaccccaggggagtcaccagcctagcctgtggcacggaggaaccgtgcatgggacgccgtcggagttagctggccggtttgtgaacagaggctgtgtgtggccaacctgcaggttgaaccagaggaagaagaaggtttacagtcaaagctggccagctgggatcggtattctgaggtgcaggcctggcagaggacaaaggcagagatgtagtgtgggaatgtagattgtgtttgctgagggcttacagtgtacccgacaccctgctgggtgggtgctctcatgtgtaggtggaggatcttgtgcacccatgagccatgagggggaggagctggattgaaggaggaggggtggttgtgagagctgttgctgaagaagaactgatggctcactggacaaaaggaaagagaggactgtcaagaatcattcaagaaacgtttccttgcctgccaggcactgtgggagacagggatgggggtgcacataaatgaagaggaaagggccccacctaccggcatgaggtgccacgggtcatcagcacagtgtccaagtagtgacgaagtgttgtctgcacacaggggactgtaagggagggaaaggcagctttgccggatgcctcaggtcagcttggtaaacatttgcaggtgcctgataggtgctagggaagctttctagaggaggccctatgtgaactccattaaaaagattcattcaggctgggcacagtggctcaagcctgtaatcctggcactttgggaggtcgaggtgggcggatcatgaggtcaggagttccagaccagcctggccaatatggtgaaaccctgtctctactaaaaatacaaaaattagctgggcgtgatggcaggcgcctgtaatcccagctactcgggaggctggggcgggagaattgcttgaacctgggaggcagaggttgcagtgagccgagatcatgccactgcactccaactgggcaaaagagtgagactccgtctcaaaaaaaaaaaaaaaaggactcattcacttatcagatcttcattgagcttctgttttgtgccaaccattgtggtaggcactgtattttcagcagagagtgaaatagaattcctggccttatgaagcttacgtgctaaggaatgagtagggggagtaagaactcaccaggtagatgtgactgctggtggcgcgggagagtgcgtttcaggtggagaagatggtgttattgaaggtgctctggaggagcctggtcttgctagaacttcaggggtgaggcaggctttgggggcaatgaagggaaattctgaagttctttgtgtgtcacgttgaagcttgccctttgttctgtagccagtagggagccatgaaaggttaggacctagtgaggcagagggcagagagaggcagagagaggtgaagagtttggaaacttctgccatagtccaagggaaaagacggagttccaaaaggcagttgaggtagattttattttttattattattatttgaaacactctgttgcccaggctggagtacagtggtgtgatcttggctcattgtagcctccgcctccagggttcaggcaattctcctgcctcagccagtcaagtagccaggattacaggtgcgcaccaccatgcccggctaatttttgtattttttggcagagatggggtttcactatgttgcccaggctggtcttgaactcctgagcgcaagtgatctaccctcctcagcctcccgaagtgccaggattacaggcgtgagctattgcacccagccggcagattttaaataaataggttcaagaaaaatttagtgaattgatggttctgggtccactggatatccatatataaaaacaaatcttgatctcaccccataaacaaaattaattccaggtggagttttgatctaaacatgaaaaataaaataagaaaactcttgaagataacttgggaaaatgtctttgggaccttaaggttggcaaatattccttaaataggacatgaaacctttatggttatgcaccagccgtgaaggaagagggtcctgcattagactacgtaaacatcagtgcttctcttcactgaaaggtactctgaagggagtgaaaaggccctccgcagcttggaagagtacaaccagtatatatagacaagaaagggcccttactccagggcgtactgtgaagaactcacatacatcaatgcagaaagactgacaaaccagtagaaaaacaggcaagagaggaaatccaaatggccgataaacatgaaaaggggctcagtctcatgaatcatagcaaaatgcaaactgaagccattattaatgaagtaccagcacacaccaccagaatggccaggatggaaaggctttcctcgggtatcagtgggagggtggagatgctggcgctcattcactgatggtagtgtgcatcactgggaccactttggaaggctgtttgcgatatctaatgggtatcgccattacaacacatgccccgtgacccagcacatccacccctggtgtgtacagatacatgcacacacacatgcatcagaaggcaagtacacagagatacctgtggcacccgtgagtcattggagctgcaaacggggaagaactcaaatgttcatcttgtccaagggatgacaacgttgcaccgtggccctgtagtgtgctagggtacagtgatgaacgtgaatgggtcgtagtggatgactctaaccaacctgaagttgagctaaagaagttagacacaagagaaggcatactttttttttttttctgagatggagtcttgctctgtttcccaggctggagtgcagtggcgtgatcttggctcactgcaacctctgcctcccgggttgaagcgataagagagggcatactttttgattccttgtgtctgaagttcacggtgaagctacaccagtctgctgtgagctctctggcaggtggaggggctggtgactggcagggagttccagcgggagctgccttcacgggaggcatagcaggcgttcacctaggactcatgtaccttccagtgtgtgggttgcactcaagtggtaggggtatcaaaagagagaagaacaagaatgcctttaattttatacttggaagtggcaagatggcacttgccattgctaatacagcaatcaggagaggaggagggactttaaggaaaattaatataaattaagaatttgtttaagaagtctgttattcacaaaagatgatatccagatggccaagaggtatctgatggcccattagggaaatgtgagttttctggagacggtgaggccaccacccggttccagagtgaggtgaccaagctgcacgctctgccattcagtctcaggctctcagggcagagcggaggcttggtctttgttgtgttgggtgctgtggcatgctgggtggcagatgccaccatagaggcatggccttcgtgctgttggctgaggtgcccattttctgtgtcggccaccatttaggagcaaggggctgacatttgtttggacgactcaaagccatgaagccatggctgcagaacaattgctcttttccagagtttgtgagactcttgttttttattctcaagctgcactctaatgggtaaaataagccagggtggctctggcactctctgtccccttcccccgagctcttgcgtctctgctgcagggatgctggtgggagaagagtgctggcactgcctgtgttctgctgtgagtagcctggcgcacttgggcctgggggcgtcttcggaccctgagaagtcatccctccgttgaggcaggggtaacattgcaaatagctttacccatagtagccaaacactggaaacaacccagacacttgataggagtggataaataaactgtggccaacttgtagaaaggtttaataagcagcagtgaaaaagaacaggccgacagactcagcaaggttgaatcttaaagatactgtgtggaattaaagaagccccatgcacaaaggaggacatgctgtgtgatttcattatatgaagttcacaaatcagccagaaggaattgatggtggccgaagtcaggagccgggtgcctctttggggtggatcttgaccgggaaaagggacttgagagaaccttctaggataattttatttcttgattaagtggtggttacatttgtaaaaatcatcgacctctaaatttagggtttgtgcccttcacataccttgttgtatgcattttgccacttgttttttcaaagcaatgaaaaagtatcactgcaattaggttttaaataaatttgtttcgttaacatgtctggaagtcttagatgtcttactgtggaaggtctcgctgctgtggagcccacctctttcaggccctctaaagtatagagaagaagcagagtgctcggccccctttggggtgttacctggggtttgggtgggagctaagagacacacacagtaagtagtaacatacgaggcaggcggctctgcaaggcggcactgcagaaagggttgtgtatgccacatcatatgccaaattcacatgcatgtctttttttccccataaaaactgaaattttaaaatgatctgtgataggaaatacagggagctgtgattctcctgggaaataaaggcacttagagcatggagccggtgagaactcgcagcggagaccagagcaggcccgggggaggctttgcactttgggaggtgtgagttccagagggaggggtggccgagctcaccttcaggtttctgttattcagtgaaagcctgcccttgttccttggcgtgggtgtgtgcaggacctgcctgctctctcccacctccttcaggatggaagttgaaggtgaagtctcagcagccagtggccaatgggtgccactggattttgttgtttgtaccccagaaaagctgccgctacctgatgctgctacttttttaatactgtcgttcaagcttaccaaagcgggacttgctctttgcaggaaaaaaatatacaaagaactattctataatcatgccatgcagtaattaatgccactgttggcattttggtggtatcatttgggagcctttctggggtgcacctgtgctgtcaggtggcgcctcagctctcggctgctgctgttccctgcggactcagttcagcgcctggtcgcggagcggccctcgtgccctggctgctcttgcttctgcatccagcgtcctctgccgcggctccgctgctgtggctcctgggctttatctcccttctctgtggatgcatctttaccaaaagcactgtacgtcttcctgctttgtaagagtctctcgtggtctcctaggaggtgtttgtttgtttgtttgttttgtgtttcgctattgttgcccaggctggagtgcaatggcatgatcttggctcaccgcaacctccgcctcccgggttcaaatgattctcctgtctaagcctctcgagtagctgggattacaggtgcatgccaccacacccggctaatttttgtatttttagtagagatggggtttcatcatattggtcaggctggtctcaaactcctgacctcaggtgatctgcccacctcggcctcccaacgtgctgagattacaggcgtgagccaccgcgcccggcctctcctaggaggtctttctgtcaccagtgtgtgcccaggggaggtgcctgtttacagaagcttttgcgcagtgggtactgatggtggtagcgtcttgggagatgaaaagtatcccagatctcctggcacctgggaaccaggcgggcctgcaaggtgcggtcagcccgctccaggcctgctgtggtttgactgatgaggacgctcatcaatcggagggacacgctctgtccaggatctcagagctgcttcctgctgccccgcttttctgtgccttccctcagtgtggtatgtttgggtgagagagttgtgcagctttatgaaagtggcttccgattatgcagtttttgacctacactgatttttttttcccaaaaggtttaagtagcttatcttatttttcagaagttgggctttttagcttttatgggaacatttgatggcactctttggttcttccttgttggttccaggtcctttatttgtgctcagggtgccttgcaagagttcttatgggagtcagtttccccggcattggcagctcatcacctgttgactggtgatttgaagagcacaggtgaacacatttcaccaaaactaggacacatcatgaagtcagtgccaccagagaaaaagtcagcattgccacttaaaagtgtaagatgccacttgattaagagaaacattcctatttcagaagtgctaaaatgtgggggaaaactgcatcttatacagcaggcgattttgcttttctgatagtgttttcttttttttgttttttaagtggaaaggctcaagtaaatacagaagcagagaggataacataattcccatgtaggacccatgaacagttacagtaggcgcggtacctggccagcctctacttcatctgcatcctcgttcacttgccctgggacgtttttcaaatacagacattgggtttcacctgtaaatactgcagtgtatagggagcaatagggagctctttttcccaaacataaatatactgtctttatcacgcctgaagagtgaactgtaattcctcgtgtgatatttctactcggtattcagtttctgctgttgaacgtgatctttcttaaatgtgaccaagcagtcatttgaggtcttagttttccctcccctcttgacactaatctgtggccaatcctcactcttggagtaaatgatcatatttggtctttttctaggtttttcctttttttaaaaaaaaattctttttctatatatatttttcagatctagacctgcagaggctttttcttaataaggttttcaaaaatacaataattgaaagttatacataaaacctgataacacatttgaatataggtcacactgcttctctcttcccatgtgaatgtaggtgattagtgttctttgcccctttctctctcctgtagctctgcatatcacagaactgttagatgaggtggctgcttgaaggatggagggttttgcacgttcaagctagagcatgtgggtttgttcaagctagagctgtcccggagcacccctcacacgttcgcatttgcacccccacaggtctctgtcccacctggtgctctggactgctgggtgtttctgagctgtctggaggtgttgcagaggatagaaggctgctgtgaccgggcacagatcgactcaaacattgcccacactgtggggctatggagctatgccacagaaaaggtgcctacctgcccaagtgtggaatgctcacgttgtctctgcggccatgcctgggtggcggaggaagtctgctgtttggaggagaggtgttgctcatttagatcacgatgcatccactttagtggccctagaaggtgtctgggtgcagccaaagaagtcatagttccctaccacatgtcgatgtagtcagcagacagcaagcacttgctgtgctcctgtgaaattgactctgtaccctgagtcgggggacacgagggtggtgctgaaatgtcagctcaccaggcagagctgtgctggtgtgtgcagcaggtaggctgggcttatgcaggtgcaggcgtagcctggggaactcagggaggtgaaggacagaagcggaggattcccaccctccaagcctcactgggagctgttgtgtaggatgtatttttgtatccagatttgagtcattgggtaggaaagctaaatttcttctagaatttagctggatttgaatttttatatttaaattcttgaattccctgctgactcttacggcaaattaattgaaattgtggatttatcttaacagttaaagtccttgggctatctatgtggacttgtgtcagagaaaggacctaactcagaagatctcaacaggacagttgaccttttggcaggtttgggagctgagcgaccagaaacaggtacttttttgtatatacctgtgtgagtggtgaggtggacagtaatgaaaatgtcctttgcaagttggcacatttaaccgaagttctaagagtaatcatattactcaccatttggaaaattatacccattgttagctgactggattaaagcacatgatagtttaccttttaacagcataatgcaatattagaaatagttgaagaaattggaaggagtttcagaaatgtagctgagtttctcctgggcttaagggactttatagctcatgttcaaatgcaccactgtctctctgaattacagatgatctgtttttctaacaatacgacctgacgattttttttttttttaagagacagggtctcactctgttgcccagactggagtgtagtggcacaatcttggctcactgcagcctcgacctcctgggctcaagggatcctcttgcctcaccctcccaggtagctgggactacaggtgtgtgctaccatacttggctaattttttaattttttgtagagatggagtctcgctgtattgcccaggctggtctcaaactcctggcctaaagtgatcctcctgccctggcctcccagcaaattttttaaaataaattggctgggcacggtggctcccacctgtaatcccagcactttgggaggccgaggtgggcggatcacctgaggtcaggaattcgagaccagcctgaccaacatggagaaaccccatctctactaaaaatacaaaattagccgggtgtggtggtgcatgcctgtaatcccagctattcgggaggctgaggcaggagaatcgcttgaacctgggaggtggaggttgtggtgaacaaagattgctccattgcactccagcctgggcaacaagagcaaaactctgtcaaaaaaaaaaaaaaattctcctggataataaggctctttgaaaggaggattactcattgttttacgtaggaatatatgatgagtattatttagcaagactgttgctaaagaatatctgatgagctgaaaacattcttagtaaattgaataaatgtttaagggaaaaaatacgtagtatttatatttcattgtttcaacttgagaccatttcagatcacttcggaagtaatttaattcatcggagtatttgtaatatatgtttctaaaaaagtttagttctaaagatcagagaaaaagcatgacacaaagcgttttgactattttatgaatatgtgaattgaaagagaatgtacataatcatgtagtttccgttggcattggccggtttgtaatttcacaagagtcagatgaggtcatctacctgcagtatgtgaaggtgaatgtaaagtcatgtgactggacatgatgaagatgaagagggactctcgtttctttctgtttaagccaacacagctcagagtccttataagaaactgaaagaagcattatcgtcagtggaagcttttgaaaaacactacttagtaagtattaacaagtgttcaatgtctgttctgtgaatacctgtctctagaaggctttgctacatggcctgttgagttgggaaggaactggtgtggggggccccttcttgttggttttttttagtttctttggtacctggggagttgtggacaaaacatggagtagttcatcaaatgtgtattagtgcccatggtaccatgctaggcatggaatcatctttgaatatttaccgttttgttcaaattgggtttgctcacacagaaattataagagaggctagtgaatacttttctttgtaaaaaggagtaatttggacttgggcagagctattgtatttgattttgaaagacttaaattagcaaaactttaaaaaacggcgtaggcagaagtgtggtgggtcagcgtcattcccgggtcatgggcaacttgagcgtttggtctgcccgtaatggctgtacctcttatacacacaagtatgaaaaatacccagcatgtcacccacgtgcagaaagtccttggaaaagttagatgttttggatgagtttgtgggtttcttttattattatgcttcataatttatacacaggttaccaattttgcttatatattacagaaaaattcacaaaaatagatgcaaaggaaaaaataatgttacattattagcaatgtcttctgcgggctgggcatggtggctcacgcctgtaattcagcactttgggaggctgaggcaggtggatcacttgaggtcaggagtttgagaccagcctagccaacatggtgaaatcctgtctctgctaaagatacaaaaaattagccgggcctggtggcgcctgtagtcccagctacttgggaagctgaggcacaagaatcacttcaacctatgaggcggaggttgcagtgagctgagatctcaccgctgtgctccagcctgggcgatggagcaagactctgtctcaaaacaaaaacccaacaatgtcttttgtgtgagctttaggtgaataaatgtagtatttgtccatcattaaaagttcaagtacataattgtgtttttacttccccacaggatttgtcccatgccaccattgaaatgtatacaagcattgggaggattcgatctgctaagtttgttggaaaagatctggcagagttttacatgtaattgattttgtacttttctttgaattctaaacatacaaataacacgagaagatttgttatatatggagttagtataaagtgcacataaatttgtagactgaaaagtgtagattctcttacccagtcctcataatttttttttcagtttcttctgaaaaccagatggagagattttctgcttgttactcttaataactgttattggtctttgaggttcttttatttaattaaatatatacatttttgtaactaagtttaattaaagaattataagacagtataatggtgagtaaattggcatatagattcttacatattttgttatatagcatttctctaattttatcaagtattaagaggactgaaaaacctcaaggccattgatgtaaagctactgcatgtgtcaggttcatgaaagagggatgatctagggatgactggaagaaggtgtgtacaaagactgcagggtttccattccagctccagctttgaagtttgattccagaaaaactcaaaatttagcgtatttctggtgtgtttcataaaatcagactatcaaagagaagaaaccccagtgggtcatgtggttaccatttcagagtactcaaaggagatacaagctataaggaaaaagatgcttgttttcattttctaaaaaaaaaaaaaaaaaaagtgattgaaatgagatcttgaaatctgtactcaagtgatttcattaggtgaagcaagaaatgagaattgatttgaactgatgtgaattggctggaaagggattcttagatcagctaagtgaactttctggttttccggatgtggttggagcagctttgccgattacccactggttaacagcagagtcacagctagaatgtagctctcttgaacttccatgctgtgtatctgaagaggaaggtgctccttaaggaagcagagaggcttctcgggaaaggggaggggatccttgttgctcctgaggctttgacaagcccttattaatttgcattttaaaggcaggcaaggccgcacacaccagtagtcccagctacagtggaggaggctgaggcgggaggatcacttgagctgaggagtttgagactgcagtgagctatgatcacaccactgtattccagcctgagtgacagagcaagaccccatctttaaaaaaaacagttgtgctttaaactttgctttgggggccaagtgtggctattttaattctccggcgttctctggaagctggatcctgtggagtgctctttgcctgagtttccaagtggctctgtgctcccttccgcttgcgccctgtagactgcttctgtgtttctgtgcctttagtaggtagtgtagacccatacttggacttcctggcttcattgctgactagcagtgtacttgtggacaagcccttccttcaccttctcttagccttggccctcttgcctgtcagcttgagatcatgaatgataggctcactttcttatcctgagattcagctatgaaagttcctcgacatgtgtataaagccagaccaacgatgtgttgtgctcttatcaccacacgctcatttctcagatctttgcctgggagtctaattatgtcgtcctgagtaggtactctttctcacggagtggggtgggtggaaaagggctatctagagatgttgagtctgtcctggcatggggtctggaggatggaggccaaagcgggagagatggggtttcagtgtgttgattatccctagctgtaatgaaagctactgtttgttgactttgcaaggaggaaaaaggctccacaaaaggcagaaatctatcttcaaggagcactgaaaaactacctggctgagggctgggcactccccatcacacacacaaggaagcagctggccgaatgtcaaaagcaccttggacaaattgaaaagtatcctttaatgttttcatgaagcaggaaaattattttctgtttatacggcaacattgcccacaatcaatgtttcattcacacctattattaaggagagaaaagtcctaacttatacatatgtattgtatagaaaatgaatgaaatgtctagtcgattttttataatctaattttgagccctagtaacttaaaaaaaaaaagccctttggcttttgaagcctctgtgaaggccgtaggagactttgcatccacttccccccgcactcctaagtatgagcctctccacgctccttacctctccgctccagctacctgcagaccagcagcctcttagccagtgaccaccacctcactgaagaggagcgcaagcacttctgccaggagatacttgactttgccagccagccgtcagacagcccaggtaagaccagttcttacaacttgactaggaatattttcaaatattacagaagtaaaaaagaatacaagatataccaaccacttacagtaaacagttgctaacattttgctgtgtagctgacatgtatctatgtctttcacctgacttttttttttatttttgctttaagtcaaactctagaccacattagatcttctaaaaataaggacagtctcttaaccacacccaaagaattaataaggttctaatatcatctgctaagtaggccatattcatatttccctaattgtcttaaagtattttataaatcatttttaatggagtccaacaggatatcacatattacatgtggttgttagatctcagttctcttttaatgtaaaaaaagttcttcccatctctttttcttcttcttcttttttttttttgagacagagtctcgctctgttgtccaggctgtagtgcaatggtgccatctcagctcaccacaacctccgtctcccgggttcaagcaattctcctgcctcagcctcccaagtagctggggttacgtgcgcccgccaccatgccctgctaattttttgtatttttagtagagacagtgttttgctctgttggccaggctggtctcagactcctgacctcaggtgatccacccacctcagcctcccaaagggctgggattacagatgtgagccaccgcacccagtctttttcttcattttttaagatggtgcttttttttttttttaaaatgtaacagcattattgtgatattcacaaaccatgtaattcactcatttgaagtttataattcaatggcttttagtctgtttcaggaatatgtgcaaccattaccacagtcaatattattgttctttttttttttcttttttttttttttttttttgactatcttgctctcttgcctgggctggagtgcagtggcacgatcccagctcactgtagcctcaaccttctggagtcaagagatcctcttactttggcttcctgagtggcagggaccacaggtgtgggccaccacacccagctattttttttcttctctgtctcccaggttggagtgcagtggcatgattgtagcccactgcaacctctgctttttgggctcaattgctcctcccacctccacctcctgtgtagcttggactacaggagcataccaccatgcctggctaatttttgtatttttagtagagatggttttgccatattgcccaggctggtctttaactcctgagctcaaggaatctacacacctcggtctcccaaagtgctggaattacagatgtgagccaccatgcctggccaccacagtcaattttaaaacatatttatcaccctaaaaagaaaccccatactgtaatccccaaagtgctgggattacaggcgtgagccaccacgctgggccccagatgcttgtaagtgaatacaccccagcagtcaataaccacatcaacctgaccctgaaacttctaggaacttctgcctgccctgggaggccggggcaggcagatcacttgaggtcaggagtttgagaccagcctgggcaacatggcgaaaccctgtctctacaaaaaattagccaggtgtggtggcgggcacctgtagtcccagctacccaggaggctgaggtaggaggatcgcttgagcccaggagaactgggctgtagtgagccaagatggtgccactatactatagcctgggcgacagagcgagaccctgtctcaaagaaagggggacaacaaaagatccatgtgggtgggtttctcgggagcatcatgacgttagtctgtggagtctttaacgcgcccaagctgactgttggtagagccgtgaccacatctgctgctgctttgtatttgagactatttgagttgtgatgttcctgccaacgttccttggtatctctatacgaataaaatattccacaatcgtttactgtttctcatgatctatggcatcagtcttggcaagtcctttcgttgatgaatatttaataaatacttaactggtcacttctgcagccttgtgtattttctagacaaaaccaaggtacttacagttcggtcagagagagaagggcccagagagagcattaggctctcattccagcagcaactgtagacctggctggttgctgccatcctgggcctgggggcacagaggggtcctgcttaatcggctgactttgtagactggcagacacctggggtttgtttccacatcacagcagggcacttgggcatcttcactgagcatgtttttaagtaggtgagaaaatattggaatcccttggaaatagctgtagaaattggactatttacaaattgtcgtttgaaattgagaggtagttgacctgtatttctcttaggtttgtcaaagcagacttgagaaggttaatttctgtacattttatgatttctaggcattacgtaggtatttgctaatattctgcttttgatacaatagcctttggggggtgtgaagatggcaggaggctgggctcagctgctgtgcccatcactgctgcttgcttcagtctgctctcggtgatcttactgtgtccgcggcctgctgctgcttactgtcaggaagtgtgacttggggagtcacttacgataatgtctatttacaggtcataagatagtgctacccatgcattcctttgcacaactgcgagatctccattttgatccctccaatgccgtggtccacgtgggcggcgttttgtgcgttgagataaccatgtacagccagatgcctgtgcctgttcacgtggagcagattgtggtcaatgtccacttcagcattgagaaaaacagctaccggaagactgcggagtggcttaccaagcacaagacgtccaatgggatcattaactttccacccgagaccgcacctttccctgtatcccaaaacagtttgcccgcgctggagttgtatgaaatgtttgagagaagcccatctgataactccttgaacacgactgggattatctgcagaaacgtccacatgctcctgagaaggcaggagagcagctcctctctagagatgccctcaggggtggctctggaggagggtgcccacgtgctgaggtgcagccacgtgaccctggaaccaggggccaaccagataacattcaggactcaggtatgcgttcagggtgggaacttgactttcaagtttgtaaagcagggccgtggagcttacaagaactgtctggagtgtgctgtgaattgagtagagtcctttgttctcctaaccctgtttttgtctctgtccttatacaaaaatacactgatgttttctttcgtgttttatacaattttctgacatttgataaattctgagtgaagttcttaacgtagatatttgttcttagattaagttagctttttaactcattggattattggattcagttagctttcccccctgcatatgaaaatacacaccctcatttgttaaaatgagctttcaaagaaggtggtacactttcccactcaaacttattttccttttgtggctggctgggtgtcaaaactggtgtttctcacccactctaacataaagttttctctgacacaggatatcctgtaagttccactaactcaacaggatttggcctgtggaaagtacagctatttgtcacattttttagtctagggcagggcttaaatctcgtgctgaatgtctctacaatgccacaaatacagtttagataagttgaaaataccttattaaagttaaatttaagcatcagttactcagaaaatcacgaattgagagattctgagggccttgtgaagagcccaagcttagaggtttaggcacaagagcagggggtacaagagggaaagaagtacaggcctttctggagttcagagagaccgctgcaccgcgctaccgcaggaagctaactgcaaaactgggtgacgtggtttcaaatgcctgattctttgactctaggccaaggaacctggaacgtatacactcaggcagctgtgcgcctcggtgggctccgtgtggttcgtcctccctcacatctaccccattgtgcagtacgacgtgtactcacaggagccccagctgcacgtggagccgctggctggtgagtggggtccccagcctttgaggaggcgtgctgctggggcagttctgaggagacctgctgagatgccaggcttctcataagttttagctgtgtctgcctttaagagatattttgggtaacataatggaaattttgcctgggaactagctgactgcctcttttgtttatctgaatgtttgctttcctgtaattgctttttcatgtttaataaacatggtgtatctgaaaataagaaacacagaagaattagctctgagagtggaaaaaagaaactcaaggtatttttttctattggctcactcaacctaatggtcaatgcagaggacttctgggcccaaatgtgcagggatttccccctgccagcaagcaagcagtcggtcctgcaattcagttctgaccctgtctactggagctggcgtcagacaccacagggtgagggctcagtccccaagacagtcccccccttcccatgccagccaccagcccagggttcttttgcttgtgctcctgaccaactagctagaaatcagggctctcacaaccccctttctgggtttgatgaatttgttagaacagctcacagaactcagggaaacaggttgactggattattataagggatatagatgaagaagtgtggagggtgaggtatggggaaaggggtgcagagcttccacgccctccctgggcgccaccctccaggaacctccatgtgttcagctgcctgaaagctctccagaccctgtcctttggtttttatggaagtgacattacacaggcatgatcgattacaccactggccactgatgagcaactcgaccttcagcccctctttcctccctggaggttgggtgccactgctgaaaggcccgaccctctaatcctgccctggtcattctggtgaccagtcctcatcttgaagctaccttggagctgccagcctccaatcaactcattagcctacaaaaagacatcactttggagattctaaggaatttgggagctagtatgcctggaaatggggttgaaaactacatgtgtattttacagtgtcacattaggccaagaagcagctaatgtctaccacagggtttcataaatatgtatataatttcctgcttagaagtacgtttcaaatgctaaacactagatttagttaggatctatactcagatcccagcactttgggaggccaaggctttgagaccagcatgggtaagccagtcggggcaggatgacaaaaccccatctctgcaaaataaaaaaatgaagtaaattagctgggtgtagtcgtgcgccacggcctctagtcctagctacaggctggagccccagctgaggctcctgcctcagcctcctgagcccaggagtttgaggcctcagggagctgtgattgcgccactgttctccagcgtgggtgacagaacaaaactccatctcttaaaaaaaaaaaaagttttcctttgaaagggttgattaaacttgtccgtctggcatggcatttgagaaattcaaagctattgtcctttctgataagttctaaaattggaaggagttgctataaacaaatgattgaagaacatgtggcagctgaacaagagtgagtgaatgtctcctttgttcgggctagcaacgatttatttatttgcctgtttcttctacgtggaaaaaaatcacaaagggcatttttctgttattcccccattccccctatttttctgcatttgtgcctcttgtgtggccaccagcaaaggctgtcagatgtgggacacagcagtcagtctctccagtgattcttccattggaacattgtgtagagaagctgaactcgattcccgcaggggagccgaagcaccagccagcaggccctgccctccccatggcccagcggctgcagtgccaggctcatggcctggctcctgcttcctgcctagtgtcccctgtctctgtccactctccccccggtcctggtatcttgcctgccttctgtcttccctgcagcaggattctcagaggcctcagctcactcctgcctctcattgctgtcttggagtgagggggagccacctgactgctgactgttcttaacccaaaagcccgtggcctgaagctgaaaaatccagagaaggttttgaatatttgagcagcaccagcacagtcaagttttctttacagtctcttcttaagcctcattatgtgattctcttctactactaatgggcaggcaaattttgtgaccctcagagacgtagtcatgatcataatccctgacttgctgaaccaagatgggtataagactccttgactcacaggattcttttttccccagcaaggttctccttcaaccctgtagtccacatcattgagatgaaaagttagggcagaagggaatggaagtagaaggaattcatggagatcccaaaggagcaaatctttcatagtaaaagaaatagagcccctttcaccccattgcgggccctgagatgctgtcttccggttggcagcggtgctgagccacgatctcttttcctttagatagccttctggcaggcattcctcagagagtcaagttcactgtcactaccggccattatacgataaagaatggagacagcctgcagcttagcaatgccgaagccatgctcatcctgtgccaggcggagagcagggctgtggtctactccaacacgagaggtgaggtgccgcccacccaggcccaaggaggatgcccaccttgccctgcactgtgtgggtgtgagggtgagcctggccttgctgccatcctgctgagcgcccctcaacagtgtctggagtccgtgttccataggagccctgcggcctgatgcctgtgctggggtcccatctgaggtgataaactgagagtggttcacacgctgagtggccgagcagtgcttgtctggctgaggattaggagatgggggtcacggctggggtcacgttccatggtgatgcctgccagaccctgtcccccttgggctggccctgctcccgagaagcaaaagcagagcagcccttgcaggtgctgttgagagccctgagcactcccatcctcccagccacgaggaaggggaaggggaggaccctgctcccctggggtgggggtggatctgcggatgagctggaacgggagaaagtcatgcagggacctacacaggacttgggtgggccccgtgggaaatgcccttttcctctcttcagattgagatcaatgatgggtctgggcgcctgcctgccggctttcacacagggctgctctgtcctaggggccttgttcttgggtttgcctgccaggtgcgcaggagcgggagaggttgagcagtggcctcactgctgggccatcacctgctgtaaggaaaaggacaagtgaaaccgagggaacagctttgaagtgactttttctgtccttcgtagaacagtcttctgaggccgcgctccggattcagtcctccgacaaggtcacgagcatcagtctgcctgttgcgcctgcgtaccacgtgatcgaatttgaactggaagttctctctttaccttcagccccagcactcggaggggagagtgacatgctggggatggcagagccccacaggaagcataaggacaaacagagaactggccgctgcatggttaccacagaccacaaagtgagtagggacagtggaggagcttagcttgtggggcgtccgccgcccgcctgcctgctgggaaaggcgatgtagcgatgcctgctgttagcctggctccttctgattcccgatgccctgggcatgtgtttagcagttctgtctgtctgtgaatcaccctttcttagataaggggtgcattttttgcaagggcagagacaagccagctctacctttccctctcagttccaggggccagggagtttgctgtaagaggttagggccggcttaggcatgaggggcgtaaaacttgggtcatgtccattagaccggtgacgaggccagaggaggtctgtgtcgtgtgtgcctcggtgtctgtccactgaaactcataagctcagccacggaggagctgtctcattttaggctttggtgctggtacttactgacagttacttgagaaagatgtgatttcggtcccagagccacaggatatcagctcatggaatgtgtcgctgcatcatgttactcagggtgtgcccaagtctcgtagcccagaaatcaatcctgagggccctgaaacagcccaggggccgcagtatacgcccaagagcagcgggggcaaagggcaaggcatgccgtctttccaaagcacggagtcaccagacaagtccacgcctgaagacgaatgttgtaatgttcagcttttgaagaacctgaggaagtgtctttcccttaactcacacagacgttcaccattcacgaaggtggcgcttagctcagcaggagcgcgcagcactggtggcacctgtgctatgtgccgtgttatcccgctcttccctggcgctggtggcacctgtgctgtgtgccgtgttatcccactcttccctggcgctggcggcacctgtgctgtgtgccatgttatcccactcttccctgacactggcggcacctgtgctatgtgccgtgttatcctctcttccctggcgctggcggcacctgtgctgtgtgccgtgttatcccactcttctctggcgctggcggcacctgtgctgtgtgccgtgttatcctcttttccctggcactggcggcacctgtgctgtgtgccgtgttaccccgctcttccctggcgctggtggcacctgtgctatgtgccgtgttatcctctcttccctggcgctggtggcacctgtgctatgtgccgtgttatcctctcttccctggcgctggtggcacctgtgctgtgtgctgtgttatcctctcttccctggcgctggtggcacctgtgctatgtgccgtgttatcctctcttccctggcactggcggcacgcacgctgtgtgctggggtattcacctcttccctgtggggaataaggcttgagacttgcttccttcctgcccttaagggatgtaatagctttgtcctcactgtgcccctaaactgatttggttttcagttacatattcagcctcacatggattaaatgcttagataattcattaactatggagtagttactgattggctaatgtcatctggaaatacatgactgaaagcactttgtcaaaaccctgtgcacattgcaacatgcatggctccgcggccctgcgtgtatgggagcagcaggtgggtctgctgcttagaggacggctgtgctcttccgccgttgaggtgactctggtgatgtgtgcatgtcttgccagttctgcgttcgtttctcttgtctgtatgcatagcttcctgtttctcgttggtttgtgtatgtgttgggtaaggctttgcttcctggataatgagtggttgaagccataataaaatgtctagggcgtgggcgggcactgcaggtgagtctgggcagcagtggtggtggctgtgctgtccgtcggcgagtggtctgagagtgtctttgtgcttcctcctcaggtgtcgattgactgcccgtggtccatctactccacagtcatcgcactgaccttcagcgtacccttcaggaccacacacagcctcctgtcctcaggaacacggtaacggaggcgtagcgtgcgggccctggcttctttccccagactcttctaagtggaggttcctaatgttcaaaactggccttcgtggtgaccaaggatgtcttcttatgtgaccacaaggccattgtttgtgtcttaaaatccacaattccctggtgtcctgtgacatccagttcatattcaggttttcccaactgtctgaaaatgaccttttatggttgctttgtgtgacttggggtccaaaatctccatcagaccactagatctctgttcatcctttcttccctgttttcaagccatcgacttgttcacttgcaggccaggtttcctctggacgcccgcctttctggatctggctggatttgttaactagttctcctgtccctgtatttcttgtcaattgcctgcaacctctagaacaggagcttttaagctcagcattagtgacattttgggctagataactctgttgtaggggctttcctgtgtgctgtagggtgttgagcagcaccccaggctctcccatgagatgccagtagcactccccacctgcaggtgtggcagccacagatgtctgtagacactgcccagtgtcctctgggtggggcggacgtgccccagtggaaaacagctgccctaaaggcttgagtagactccagttctgctttgaggcaggcggggctgtgtgcttcctgttgactgcaccgggaggcccacggtgtccaggtgtcctaccttagtgacggtgctagcgttgatcaatgggctcgggatgctagcctggcctctcaccacaactttttatccattgatgatgtgtggataatttggaaacaaaaacgtcagacccatgtttagaatggaacattatactagcagcttttttccccttcaaatcacagcaaagggaactgtagatattaatagttaaaaacatcaataatctctaaaagaaccttattaaaaaattatttttcagccgggcgtggtggctcatgcctgtaatcccagcactttgggaggccgaggcaggcggatcacgaggtcgggagttcaagaccagcctgaccaacatagtgaaaccccgtctctactaaaaatacaaaaattagccgggcatggtggcgggcgcctgtaatcccagctactcgggaggctgaggcaggagaatcacttgaacctgggaggcagaggttgcagtgagctgagatcgtgccattgcaccccagcctgggcgacaagagcaagactctgtctcaaaaaatagtaactattattaatattttcaaagttttgcatgtaatggaaatggatataagccccgcctatcatctctcaatggagagtcttcacctgtaatgaggagggctgctgctgtctccccgtggctccccaaaggccagtgagggtgaccagccatgatcacttaataaggctggtcagaaactatattctttcttccattgcctcacagaacttgcctctttaaaaactttttttatttatttttatttgttatttttttgagatggagtctcgccctgtcaccaggctggagtgcagtggcgtgatctcagctcactgcaacctccacctcccaggttcaagcaatgctcgtgcctcagcctcccgagcagctgggattacagacacgtgccaccacgtctggctaatttttatatttttagtagagatggggtttcaccatgttggccaggatggtctcaatctcctgacctcataatctgcccacctcggcctcccaaagtgctgggattacaggcgtgagccaccgtgcccggccaaaaaggtttattttctggcacttttcggtgtgaaatctgaagggaaacttatgcaacaacttagcttactttgctttgttgcttttttgattccccaggcagagagggtctccttaacaaagctaagatatatttaataaagttcttacatatcaaaataatactttttgtttttccactttaggaaatatgttcaagtttgtgtccagaatttgtcagaacttgactttcagctgtcagatagttatcttgtagataccggtgatagtaccgacctgcaactagtaccactgaacacgcagtcccagcaggtaaacattgtgtagacctgagcataaacttctcaacagagaaccagagtgtacggaaatgatgtagtatgtgttgcgactgagcctttagatagaacagctgcactgctgatgagtaaaggctcctgtgcagctcctccggctgccctgaggctggatcgaggcttgctcctgagtaagcgggtggctggatggatgaattcttctttttagaagaattaaatctgaaactggtcccactctatgcgtagacgtgtgcagatccaagcttctgtttgaacgcactgttgattgcatgggcactgctccactctgcccagagcctgatgcctgccagtgccagagcgatggtgcccgacaccttggtgcctttgtaaaagagccatgcttgtgcctgcatctggaccttgctttttctgtttatggctcgctgcctggatgaatcttgaacttgctttttccgtttatctttcacgtgtgtttttaggcagtaaatgctgagtgtttagagatcaaaggcttccttaatggatgtctgaatctcagcattttcaaaggatttgcccccactaatcctttagctctttcagatatcactgggggctcatcactgtgcttttaggtgtggactttacatgtaatagcggtgttcagcccctgcattaggttgtgctggttcctaaaataatttaaatataaaataattggctggatgtaaagattactttttatcttattttttaaatttttatttatctttttttgagatggagtttcgttcttgtcgcccaggctggaatgcaatcgtgtgatcttgcctcactgcaacctctgcctcctgggttcaagcgattctcctgtctcagcctcctgagtagctgggattacaggcacccgccaacacgcccagctaatttttgtatttttaatagagacgtggtttcaccatgttggtcaggctggtcttcaactcttggcctcaggtgaaccacccaccttggcctcctaaagtgttgggattatagccatgagccaccacctctagccaagatgtactctttaattaattgatgatatattcccctgttttggagctgcatgggatatgctatatattaattaatatcctttgggcatggtggctcacacctgtgatcccaacactttgggaggcccagatgggtggatcacttgagctcaggagtttgagaccagcctgagcaacgtggcaaaccccatctctacaaatacaaaaattagtcaggcatggtggcacacacctggattcccagctacccaggaagctgaggtgagaagatctcttgaacctgggaggttgggctgcaatgagctgtgatcacaccacagcactccagcctgggtgacagagtgagaccctgtctctaaaaaagggaaaaaaaaaatcagcggggcgtggtggctcacacctgtaatcccagcactttgggaggccgaggcaggtggattgcctgagctcaggaattcaagaccagcctgggcaacacggtgaaaccctgtctctactagaatacaaaaaatgagctgggcatggcggcgtgcatctgtagtcccagctactcgggaggctgatgcggaagaatcacttgaacccaggaggtggaggttgcagtgagccgagatcctatcactgcactccagcctgggcgacaaagcgagactccatttcaaaaagaaaaaaaaattaagctactttttaatgatctcatatgatataaaacttatggtatcataaaaagttaaagatttaccaattttgtacaatcttctgctgggacaaggccaggcaaagggagtcagggcagggacaggtgctgtggggcctaaagcagcatgcataggcgtgctgtgaggcggggcctgcccatggtgtctgctcagcacccttcgcatggcgtgtgtttcgctgcagtgtctgtgtcctctttgcggttatggtgctgtgtgagcagtgacccccaactctctttccagcccatctacagcaagcagtcggtgttcttcgtctgggaactcaagtggacagaagagcctcccccttctctgcattgccggttctctgttggattttccccagcttctgaggaacagctgtctatctccttaaagccgtatacttatgaatttaaagtggaaaatttttttgtaagtgatgtattattttgggagggtgggggtgaaaaaatgaaagatggcatcatgttctttataatctgaaaaactgaatagacagcttctgtcaacataatgaaggagcagctggagaaaaacagttgttggggtagttgaatcattgactgtctttattttagaaccccaggtccttctcaagtgacacatctgagatgcccacactcctgggggcatctctaagaggagtgtttgtcatttggaaagcccaaagattccttttttcttctatctttttccctttctcatgttgacttagtaactccctggaaatatttcttggagtcatttcatcttcaggggcattgctttctaaggcatatctctagtttttcaaagaaaagctgaaaacatatgaaaacctgctagctgagtattgtgaagattttcttagaacttgtgcatcatttggtagaagccaatttgagtgtggaatgaagagtagccttgagctaggtgagtagatacaggtgtgtgctgtgttcctttagggagatgatttgacttaatgttttgcaattttgtgatactttcttttcttctctttactatttgaaattatcaaacaatgtttatttgaagtgtttgtctttatagttttgatattagcagtttttttctatcttcttccatccaagacaaattgttttgaccttcatgttttatataactctccttaaataaatttaaatgaataaataaaaccacaaattattaaataatttaattaaatcaaataatagtatatattataataataatttatatataaacaaattatttatttatgagacaaggtctcactctgttgcccaggctggagtgcagtggcacaatcatagctcactgcagcctggaccttctgggctcattatcttcccacctcagcctgccaagtagctgggaccacaggcacgtgtcaccacacctggctaattatttttattttattttatttatttatttatttatttatttattttcgagacggagtttcacacttgttgcccaggctggagtgcaatggcacgatctcggctcaccacaacctctgcctcccaggttcaagcgattctcctgcctcagcctcctgcgtagctgggattacaggcatgcaccaccacgcctggctaattttttgtagaggcggtgtttctccatgttgatcaggctggtctcaaactctctacctcaggtgatccacctaccttggcctcccaaagtgctgggattacaggtgtgagccactgtgcccggctaaagtatgggtttttttttgttttttgttttgttttgtttttttgagacagagactcgctgtgtcgcccaggctggagtgcagtggcgcgatctcggctcactgcaacctccgcccctctaggtttaagcaattatctgcctcagtctccggagtagctgggataacaggcatgtgctgtgccaccacgcctggctaattttttgtatttttagtagagatggggtttcaccatcttggccaggctggtcttgaactcctgacctcatgatccaccccgcttggcctcccagagtgctgggataacaagcatgagccgccgtgcctggcccaaagtacgggtttgtatgttgctgtatctattcaattctcctggtaaagacctgagtggaatttctgggtcatagggtaactctgtggttagctttttgagcaactgccaactttttccagagggctctacattcccaccagcaacatagtggattccagctgggacccagagagtcccagcttctgtgtgtcctgccagcacttgtctcactgtgtttttggttgtggctgtcccaattggcaggcgtttccccagtggctggtgatgtgctgcggctcgtgggcgtgtggcccatttttctgccttctttggaaggatgtctgttcagatcctttccccatgtttaaatagggttatttgttttttattattgaattgtaagttctttatatatcctaggtaccaggtccttatatatgatttgcaagtattttcttccatttgttgtcttttgaagcaccaaagttaaattttgatgaaatccaattcaactctctcttttattgcttaaattttttgctttggacctagaaaatcattgcctttggtcaaaaagattttctcttgcatttccttccaagatgttcgtaatttgagcacttgcatttaggtctgtgatctactttgacttaatttctgtgtatggtgagaggtagggtccaaatttgttcttttcaaatgacccagcaggtgtccctatcccatctgtcatgacgatgctttcctccctgcagggtggccctggcccccttgccagattccagctggccgtcagtgctcgcgtgtctctctgaagaggctctgcggttctggtccctgtgcctgagctccaggtgccgccaggtgaggcccctgctgctcgccttgggctgtgctttcccccagccactctccttcccagatgcagcccagagcagcgttcaggcacacgcaggtctcatcacaccccactgtgtcctactgcaactctgggtgtccttcaagccctgaggcaaatctgcattctttgctggattcagaaacattcagactgtgccccagccagaagcttctgaggaggaggtatttcagtgggcctctagcacagtgttctactgcttcagttcccaggacctacgggcacccgggcccacggctggcacttttgcatctgtgtatttgggatcttttctgccctgtggcttgagagccccaggaagtcccagcatggcccctcttgagactggtgggagtttgtcccatgtccgaacagaggtaattgggcatttggtaggagatcacctagaaaggccgctcttgggactgctgtttaggctgtgaactcccataaaacggcttcatcttggcctcagactccagacaaatgcttcttaatatactgaaatctcttctttgaacattttacaatgccaatagaacactttttaagtcaagctatactgtattacacacgctcgcgcgcacacacaacgcttcccctcagaagtggaactgccaggttgtagtgcatgagccctttttcatcttggcagtggcagatgtgttttgatcgtttgtcatgggtggtggtagaatgttaagcatgtttgaatagccaccgagaataggttgattatggaaagaaaacacggacaaagtagattatggactgaattgggttataccaaggaattcctgttgcttttgctagttgtaataatagcattgtgttttggtaagaaaaaggccttagtgtttagtaatgcatactgaagcagatggggcaaaataacaggttgtctgaaatttgctttatttttttattttattttatttttttagacaagagtcttgctctgtcacccaggctacagtgcagtggtgcgatctcagctcactgcaacctttgcctcttgggttcaagggaatctcctgctaagtaatccaagtagctgggattacaggcacctgccactgtacccggctaatttttgtatttttagtagagacggggtttcaccatgttgcccaggctggtctcgaactcctgacctcaagtgatctgcccacctcggcctcccaaagtgctgggattacaggcgtgagccaccatgcctggcctgaaattcgctttaaattacctcaggcaaatacagaaatgtccatggcttgataagaggatgctgaggcagcaagatgctgagatctcaggatctgggtgataggcggctggaagggctctgtgctatcctttcttcctgtggttgaaaatgttcataatttaaagaaggatgttaaggttcggagtgtaggacttccgaaaacattgcatctccagtgggaattattgagagtgagtggcgacagttgctctaaggccagccgagcagataggtgtctatcctcagctctccagggtctgtgggcagctctgctttttcctctagttgcatttcttgaggccacttaggtacatttcctttctattctctccctttcctgcccagacattatacaacgtgaaggctgagatctttcccccttcgggaatggagtattgcagaacaggctccctctgctccctggaggttttgatcacgaggctctcagacctcttggaggtggataaagatgaagcactgactgaatctgatgagcatttttcgacaaagcttatgtatgaaggtaggtggtctcgaacccatgggctcaagcagtcctcccgccttggcctcccagagtgttgggattacaggtgtgaggcactgcactcagcctatcttgcattttgaatggctcttttacccaggcatcatagcgttacaccctgtgccattagtcatgtgggaaacatggtttcctgagttgtgcagatcttccaaatgtgggcacctttcgtttgacaatatttttttaaaatctgcatttgtgatctctcagggagggcttggagcatcagaactctttcaagctcacagtggcaagtgtaagttttccaaaattctgatttttgcttaaagtctcagatggcatcattggcagcaaatagtcgtgttgttttctttgaagtgacaggcttacatcattcatttttaatcagacgtctaccaaatacccaacactgaataactagcttccccagcgctcttgcaagtgaaaagggcgttctgtgaaaacagcggctatttcagctcgcagcaccgagcgctccccgtgtgctttccctgagccagctgtcattctgcagcagagacccagagaatgtcaagaacacaagcactcaagaatggaaataactcaaacgtccttcagctcgagagcggttaaactggcacatctgattcctcctcagcagtgaaacagaagggactgttgacacacgcagtgctgtggttggatctcaagggcattatactaagagaaaaacgccagtcctataaggaggtgtactgtgtgattccatttctaaatgacatcctcaaaatgccagcctcagaaggagagcgggtcagtgttccacggagcagtgggaggcagcaggaggccgtcctctgtggtaatggagagttctgggccagggccgctgtggttgttacacgaatctacacatgtgacaaatgccatagaattagacccaaagaatgcctgcgaaagctgctgaaatccagtggggtctgcagcctggttcactctgtagtgaaatccagtggggtctgcagcctggttctatctgtattgaaatccagtggggtctgcagcctggtccactctgtagtgaaatccagtgtggtctgcagcctggttctatctgtattgaaatccagtggggtctgcagcctggtccactctgtagtgaaatccagtggggtctgcagcctggttctagctgtattgaaatccagtggggtctgcagcctggtccactctgtagtgaaatccagtggggtctgcagcctggttctatctgtattgaaatccagtggggtctgcagcctggttcactctgtagtgaaatccagtggggtctgcagcctgggtcactgtatggtaccagtgtcagcttcctgtgttacacgagatggcacagttgggtgaagctggtgatgaaggtatgtgacccctctactacttttacaacttcttgtgagtctataaacatttcacaattaaaaaaaagtctactcaggagctgaatttaataaaatgagcacttttgactgctttgtgaagcgtggcatttttttttttgtttttttgctgtgagttcatggtagtaaagaacatgagtgacatgactgcgcagtctggcccgagttcatgccattgtggttgccccagcagcgcgaggtcagcagcgtagaaaggcagcagtgtgaaagctatgagcttgcgggtgccctgagagccacactctgagaactgtcactcctttgccttcctcctgacactcctagggcctctgcatgtcctgtagtagctcctgtcttcaaagttcccccatccccaactacaggatgtccacctccctgagcccttctctgctgctcgtggccttctggtcactcactccccctgggcggttgctcggtatcctcatgatgggaagctgtgacctctttaccaggtctactgctactggatggcaaggatcctgtcttgcttactttcatatctccagggctagtcccagtgaatgatcacttaagtgtttgaattgcattgaattacatgatggttgtgttttaataattaatgttaataataacacctgccatatattaagacactaccatgtcccaggagtggtactaagtgctttacatacaaggggtcttcaaaaaaatcatggaagatacgttatgaaaaaactatgcatggatttcaacactttttgcaccaaaataagctcctactcactgagcaggatctagtttgaggcactaagaaggataagacatcagttttaaaagagcccctatcagagcaacatgaattctgctaaaattaaatcaagaaccaacattggccgggtgcagtggctcacgcctgtaatcccagcactttggggggctgaggcaggcggatcacctgaggtcaggagttcaagatcagcctggctaatatggcgaaaccccgtctctactaagaatacaaaaattagctgggcgtggtggcaggcgcctataagcccagctacttgggaggctgaggcaggagaattgcctgaacccaggaggcggaggttgcagtgagccaaaattgcgccactgcactccagcctgggcaacgagcgaaactccgcctcaacaacaacaacaacaacaacaaaacaaccaacatcaaatttatggtgaagcttgggtggaagaatggtgaaatcattgatgctttatgaaaagtttatgaaattctttggacagtgccccaaagaattagtagtttgcaaatggatatcttgttttaagaagggacgagatgatgctgaagattaaggccacagcaagcagaccatccacatccattttcaaggaaaaaattcaccttgttcatgccctaattggagggaactgacaacagcagaaatgacagccaacaccgcagacatctgaactggttcagcttatgcaattacgcctgaagggtgagcaagcgttccactcagtgggtgccaaaaccctagtacccaggtccgtggccgaccagagcagagcttcccatggaaacttcaaacacacgggatcaagatcctgaagcatttactcaaagaaccataacaggagatgcagtgtggccttcccagtaccatcctgaagacaaagcagacacggcaatggctaccaagaggtggggtggccccaccaaagcagaagcagactggtcaagagcagaggccacagcaacaggtttttgggatactcaaggcattttgcttgttgactttctggagagtcaaaggacagcagcgtctgtgtattatgagattgttttgaggaagatagcaagagctttggtagaaaaacccctggggaagcttcaccagagagtcctcctccaccacgacaaagctcctgctcattcctctaacaagcccaacttcgtgagggtttctatgggaaatcatgaggcatccaccttgtggacctgattcggctccttctgactgattttggtttcctgatcttaagaagtctttaaaaggcacccatttttattcagctaataatgtagagaaagactgcgttgacatggctaaattctcaggcctcccagttcttcagggatggactaaatggcatcgtaagcaatggcatcattgcttacaaacatgtcttgaccttggtggggcttatgttgagaaataaagcttatattttctgttttcatctttggattccatttttgcatgaactttttgtagttccctcatacgtattctctttccatccttaaaaagcagctctgtgaggctggtggtggtctcagcactatacagcggtcattgagcctggaggccttggggtgctcttctgagtggcagagttggcttcagacccagtggtcttggatactgccacttaccagacagaacccattaactgccaaagtcaccatactgtggaagatgacacaaaaatttgaaaacaaaattaaatcatttattaacctcacaggaaaaatgcagttttctgtacacgtccagcataattcattctaatccagaactaattgaaattggactcaatgaaataggggttgccaccgtgaaagtgcatggctttatcttcaggcgcagctacaaggcactgggctctgtgtccgcagtgttttgtcagacagcgttgggtgagaggattgggtaacgacggccgtgactctcgcctgagtactggaaggcccgtcctggatgacacatcgcttcctctcgtttcagttgtcgacaacagtagcaactgggcagtgtgtgggaaaagctgcggtgtcatctccatgccagtggctgctcgggccactcacagggtccacatggaagtgatgccgctcttcgccgggtatctccccctgcccgacgtcaggctgttcaagtacctcccccatcattctgcacactcctcccaactggacgctggtaaggactttggaagaaaaagtttaccttcagtatttgagcaggtgagcactttgtgcgagaggtgataaacttatgactgagcaggttggagaactagcggcgtgttttcagtgccggtagaaactggtactagaagcctcatccgctgttagaatcttaggcacctgctctgaaagccaagcctctgtgcacagagtgctctgtaaaggggcagcctcgggtggcattctgcacgttcagcctggctccgtgtggctttgcccgtccccaggtgagtgtcggcgcagcttgggtctaacttcctgtgtgttttgcagacagctggatagaaaacgacagcctgtcagtagacaagcacggggacgaccagccggacagcagcagcctcaagagcaggggcagcgtgcattcggcctgcagcagcgagcacaaaggcctacccatgccccggctgcaggcactgccggccggccaggtcttcaactccagctcgggcacacaagtcctggtcatccccagccaagatgaccacgtcctggaagtcagtgtaacatgacaacgccagggtgaacacacgccacttcccagctaggagtgcactttatgggactgtgactggactcttccgttctggctccagccagaccttcagtggtcctgcctggccgtggggacatcagagagtgtcatcacgcagctggccagctgagttctgttgttgttttcatgccgcctgtgatctcagattcctgcttttctcaccccgtccccatgctggtgtccgacgccgcttactcagagccctggcctccctccccctacctcacacgctgctcatgaaagtttccacccacgctgtctccacggaacagcctccgtctgctggctcttcgtggaaggccatttgtctttcaggtagacactcagcagccctcacggtcttagtgacgtgtgtgcctttctggtcacacagctgcccagtttcctgatcggggtggatttgtgtcccctaaggggtaaaacagccgtttaccgcagatcctctcattgtgcttttctagaataacacccttctaggggaggcgggtgggggagggagggatcataaccccttctgtgccttgggatgccggagctgggggacctggaggcccatcagccggagccacgtgaaaggtactgaagaaagctgagacccggctgtgaggagcgcctcagcggtgaggtggtttagggataaatgtttctggaaccctgtggtcccccataatgttgatagaatatcatatgcactgggagttaaatatatttaatttaatgatcattatatatgtgggggttaatatgttgtttttctgtccctttaaagtctttacatgtaattgtagctgtataatcgttatttttcttttgcatcttaagtcttagaaattaagatattccatcgtgaggatgagagaggtcctcagtgtgtttttggtctggttgtagggaaggactcaagtcctggaatgtcctccactggtctactgagttgcagtcacactgttccaatggattatttgctttcggttgtaaatttaattgtacatatggttgatttattatttttaaaaatacagactaactgatgtaatgtttatgtataagttgcaccaaaaatcaaggacaaaaataagtgtgtttgtttttacaggtgtgaaagtcacagcttgtaaataagtgttgtatgtattaaaccttttccagttctccaaagcgatgtatttttgtacacttgaaatagagtactcttaatttactgggcaaatgtgcttggaattgaacttgacaagattagctcaagcagatagagtcgggtccagcagtgggtggccctcgtgtgaatccccgtggatgtgcaagttgtggagagaaggagcaccgggttcctgcccagcactgtgcttgcgggaggcggtggggcatgggaggaaggaggcacagaccggggaaatatgacagccgtcatttccagtattctctgtgttgtcttttagctcattcaataaataaaggtggtgtgatttttttttcctcctgtctttttcatttgtagaaactggagacgtgtaaagaagataaataattgtgtaattaaactttccagaaatttatcttcctcatgtgcagtttaacaaacttggtcaaactagttagcaaattagaacttcagaatctaatgatagtttagggtttctaaaataaggttttttattgtaaaaattgacgattgccctgcatttctaccaagtcctgtgaataaagagatgggagatttgattccgtcagaagagactgtaatccgtgtcgtcagcctgggagccttccccagtgtaatgtagctttctctcttaccttctggaagagggaatgtttcatttattactgtttgattttcttgtatctggttctactcccaggatgaaattatccaactacatatatatttagaggaagaaagtgaaggggaaatttaaaatgtttacggcgcttaattgcctggaaatgaaatgaaatcaaatttatcagtttttttccccctaattacccaaaagatcttttgcaaactatgttacatgaatgcttctgcctctttaagacaaagaagaatgtcacccaaaattgtcatttttttcttaatgttcatcataaaagtcctaaaagagtaactgtaattggatgtttattgtttttatctaaagtaaggtgtatgtgtttgagacaagctggttttgttgataaagagatgttaaataattgtgaagccagatatgcaatgtgtatctaaaaagcaaggaatttgcagccgttttacaaatatctgtggaacatgtaaatactgtcaaatggaaaataaaataagttataatttttgtgaatttcatgggatgtcctatgattggaaaaattataactcttctgattctaatgtggaaattgttgtatttaatctgaaaatgactttacctacaacagttccattgtcagcacagcctaggagggtcagattcctgtattaattactcttagtggagatgccagatatcccatacagaattagcagagaaaatacacacaggcttctattcaaattttctttagtgcttaaaattaagttttaaaatgaaatcagacactgcaggtttgtatataaaatgaaaagctatactactttttataaaagggcaaactgggctgatgtaaatgttttactttcaactgtgttctttaaaataaatcctacctggtttttaaattttatttttcatgaaaatgctcctttctctacatttattcatcctatatacatcaggctgtaagaccccccccagtcatcattaatacaatgtgttgggattctgtgactggaaaaggtgacaagttggtgactttgacactgcaggtattccattttcatggtttactatgaaaagtcatttttcatattatgtaatatattgttagattaaaaccattgtattaagactttaaaatgtaagcattgtaattctgaaaatacacattttaagaagaaactattttgcactggatcttttgctgcgacatggtgtgacaacagtatgtaatgtgaagattttattgttttatctccctagtccttgttcctgactcttgggcatagattatttgccttttgggaaacattcggatttttttttttttttttttttttttttctctgagacagtcatgctctgttgcctaggctggagtgcaatggcgcgatctgggctcactgcagcctccgcctcccaggttcaagccattctcctgcctcagcctcccgagtagctgggactacaggcatgcgcctcatttttatactttagtagagatgatgtttcaccatgttggccaggctagtctcgaactgctgacctcaggtcatccacccgcctcagtctcccaggcgtgagccaccgcaccggccagcattcgggactttattcataattccttacccaacagttcacaagaacgaagacatttgggtgtgcagcgctctcatgttgtggacgctgctgtgccaggctgggcgtccgtgcggagcgcgcccagcgctggagcgcgcctaagaggcgccctgcagtgtggctccggggtgtgggcggggcccggagaaggccccgccttgggaggggttgggcctcgcgttcaaactccgcctcggggcggggcgagggcgacgcagctcctgcctcctgggccgctgcggacggtggtgcgcgaccccgtcccgggcgcgcgcgctgtgggcggtgcacgccgtcgcttcccggaagtgcgtgctgtgggcggtgccgcgcggacccccgggaagtgtctctgtgggcggccgccgggttgagctgcggcacacgtgcgacggccgtgatgaagttcgcttaccgggtgagcgcgggcggcgggcggtctgttggatcggcgcggctcttccggtggacggcgcctgagctggctccgggcgggctgggggcgcgtggtctgcttttgcggcgtctggccgcgtgggggtcgccggctgtctgcgcgcccatggcctcggggacgcggggctgtggtggggctcctgggagagctgggacggaggcgccgacggcttctcggagggaacagggacatttgtcggggtcccgggatatttttaacctgagtatggcccaacctaaaggctggagttggtgcagtcggggagggcacagcaccctcgggagggatgaggaggtgggacggggcggggacgcgggcgcgcgcaggcggggtgagaacagcagggacccggggcccgggactggtccctaacgagcgagcgtccaggtgagcggaagggcggggaacccaggtgtgagctctgtttcccgaggccggagggaattcctgaggcggacgccctcagctttgagagccagggaagacttgtcccagatgtgaagtgcaggaggcgggtgagacaggtaataagagggggccgcggagccggcctgggggtctctgaagcgtttgctacagctggccggttatggggacgcctgtgtttcccacagtggccctgaccgttgcgcttccagggttgcacgggccgcctgctgctgagcccaccgtgtactacacttgtcctgtccgaaactgggcatggtactggcccctcagagtgctgctcctgtgtcccctgtgctggtggagccaccgctgtgtgcccagcaccaaaccagaaaccatatccacgtcctcacaggccaggacttcatccgctccacattcctactgcaaggtggcaaaaaatgtgccttggagcctgcctggccgcttaaagtccttctgctgaccaagctcctccctgaggtcctgagggcgctgcccactcacagcttcagggcctggctggtgccttcccatttagattccagctcaggtgacccttccaggtgcctctccgtgaccaccgtctaaagtagcccctgctcccacacttctcatccccctcctgctagagagagaatataaggtgtgcgtgtctgtgcgcatggcagtctccagtgaacgctcgtgctcgtgagttagtaaataggatgctggcttaccacacttctggaagccctgagttctaagcacttttggggtgctgttccattgttgcagcttttttcttggtgaagtgtgggctccatgcccctcttcacctggcagacgcctcctgtcttgggaggcttcctcagtgctcacaggggcatcttacccatctctgtgggagcttggggccgcccgggctcctctggtctcctgaggatcaggctcacttcttcctctcttacccaggaaaggtgaacgggcccccaaggtggggttctctatgccatctctctgcccagatgcctcacttagtgcttttctgggagtcgactgttttctttgtgttaagacaattttgttttcttcacagttttcaaatttgctgggtacggtgtaccggcgtgggaacctaaattttacctgcaatggaaattcagttatcagtcccgtgggcaatagagtcactgtatttgaccttaaaaagtaagtatgtgaaagtggtattcataatagtgatactgattactattatcaccattttttaagtaacatatgaaaactgatagtgtcttctgtgccttccttttaatggtgcacccgttaattaagggagcccaggagaggactacaggacagactagggtcagcagatcagttgtggaaattggcagccagacccagttcttcgttgtagtgccttagccaggccccataaagtggtgtgtcacttggctccgttctgtgggaagggaccctgtccctgtgctgtgaagggtgggtgggggaaaaggtgtagctcagggttagcccttcccccatcagggaaggcccctaagggctgaaaggccagggctgctgggggagttgaaggtaccttggacccctgctcgggagccctgctgccactgggcctcaccagtcggacgggcaggcccaaagctt

SEQ ID NO: 22260 - DNA, 1206 bp, Homo Sapiens
atgaacaagttgctgtgctgcgcgctcgtgtttctggacatctccattaagtggaccacccaggaaacgtttcctccaaagtaccttcattatgacgaagaaacctctcatcagctgttgtgtgacaaatgtcctcctggtacctacctaaaacaacactgtacagcaaagtggaagaccgtgtgcgccccttgccctgaccactactacacagacagctggcacaccagtgacgagtgtctatactgcagccccgtgtgcaaggagctgcagtacgtcaagcaggagtgcaatcgcacccacaaccgcgtgtgcgaatgcaaggaagggcgctaccttgagatagagttctgcttgaaacataggagctgccctcctggatttggagtggtgcaagctggaaccccagagcgaaatacagtttgcaaaagatgtccagatgggttcttctcaaatgagacgtcatctaaagcaccctgtagaaaacacacaaattgcagtgtctttggtctcctgctaactcagaaaggaaatgcaacacacgacaacatatgttccggaaacagtgaatcaactcaaaaatgtggaatagatgttaccctgtgtgaggaggcattcttcaggtttgctgttcctacaaagtttacgcctaactggcttagtgtcttggtagacaatttgcctggcaccaaagtaaacgcagagagtgtagagaggataaaacggcaacacagctcacaagaacagactttccagctgctgaagttatggaaacatcaaaacaaagaccaagatatagtcaagaagatcatccaagatattgacctctgtgaaaacagcgtgcagcggcacattggacatgctaacctcaccttcgagcagcttcgtagcttgatggaaagcttaccgggaaagaaagtgggagcagaagacattgaaaaaacaataaaggcatgcaaacccagtgaccagatcctgaagctgctcagtttgtggcgaataaaaaatggcgaccaagacaccttgaagggcctaatgcacgcactaaagcactcaaagacgtaccactttcccaaaactgtcactcagagtctaaagaagaccatcaggttccttcacagcttcacaatgtacaaattgtatcagaagttatttttagaaatgataggtaaccaggtccaatcagtaaaaataagctgcttataa

SEQ ID NO: 22261 - DNA, 2018 bp, Homo Sapiens
cgcagaaagaggaggcgcttgccttcagcttgtgggaaatcccgaagatggccaaagacaactcaactgttcgttgcttccagggcctgctgatttttggaaatgtgattattggttgttgcggcattgccctgactgcggagtgcatcttctttgtatctgaccaacacagcctctacccactgcttgaagccaccgacaacgatgacatctatggggctgcctggatcggcatatttgtgggcatctgcctcttctgcctgtctgttctaggcattgtaggcatcatgaagtccagcaggaaaattcttctggcgtatttcattctgatgtttatagtatatgcctttgaagtggcatcttgtatcacagcagcaacacaacaagactttttcacacccaacctcttcctgaagcagatgctagagaggtaccaaaacaacagccctccaaacaatgatgaccagtggaaaaacaatggagtcaccaaaacctgggacaggctcatgctccaggacaattgctgtggcgtaaatggtccatcagactggcaaaaatacacatctgccttccggactgagaataatgatgctgactatccctggcctcgtcaatgctgtgttatgaacaatcttaaagaacctctcaacctggaggcttgtaaactaggcgtgcctggtttttatcacaatcagggctgctatgaactgatctctggtccaatgaaccgacacgcctggggggttgcctggtttggatttgccattctctgctggactttttgggttctcctgggtaccatgttctactggagcagaattgaatattaagcataaagtgttgccaccatacctccttccccgagtgactctggatttggtgctggaaccagctctctcctaatattccacgtttgtgccccacactaacgtgtgtgtcttacattgccaagtcagatggtacggacttcctttaggatctcaggcttctgcagttctcatgactcctacttttcatcctagtctagcattctgcaacatttatatagactgttgaaaggagaatttgaaaaatgcataataactacttccatccctgcttatttttaatttgggaaaataaatacattcgaaggaacctgtgttatcacagtaacccagagctgtatttggctagcaatctgcctgtatctctcactattatctaaaagaaaccttccaatgcttctgttgatctcagtattgtcaggggaacagagaagttgggaaaagattactgaaatataccttttgcatttctttctagagtagctcccatatatggagatgggtgattctcttgatgccaccttcagatccttttattctccagaataattcttaacagtggttcaaatttcctttcataccttgaagtatgtgtttagtagcctcaattctccattaattaaaagtgtgggctgggcgtgggggctcatgcctgtaatcccagcactttgggaggccgaggtgggcagatcacctgaggtcaggagttcaagaccagcctggccaacatggtgaaaccccgtctctacaaaaatacaaaaattagccaggcgtgatggcaggtgcctgtaatcctagctacttggcaggctaacgcaggagaatcacttgaccgggagacagaggttgcagtgagctgagatcgtacctattgcactccatcctggatgaaagagccagactctgtctcaaaacaaacaaaaaagcgtggggacttctggggacagacaaggtgcctgttatatatttactcagtctttgccctgaatggtctcagcttgagaccatttcaaactggagagaagcaagccagccaatagaatggggtgatttacagggatttctgtttactgtcaaaatatttctcatctgcactatgtttccatttgtggtcctgaaggaaattcttataactcaacatttgtctggtcttataagtaaagacagctttaaaatctgttcactttcaaa

SEQ ID NO: 22262 - DNA, 5589 bp, Homo Sapiens
ggggtcgcgggggacgcgggggacgcgggggacgcgggggacggcggggaacggcggggaacagcgggggacggcggggaacagcgggggacggcggggaacagcaggggactgcgggtcgcgtcctggccgccgaggagctccttcccttaacagagctgagagaggcatctggagctgcagcatggaccagcgagagcccctgcctcccgctcctgcagaaaatgaaatgaaatatgataccaataataatgaagaggaagagggagaacagttcgattttgacagtggagatgaaatcccagaagcggacagacaggccccatccgcccctgagacaggaggtgctggagccagtgaagcccctgcacccacaggaggtgaggatggagctggagcagaaaccaccccagtggcagagcctactaagctggtgctcccgatgaaagtcaacccatattctgtcatcgacatcacgccattccaggaggaccagccgcccacccccgtgcccagcgctgaggaggagaatgtgggtctccatgtgccctgcgggtacttggtgcctgtaccctgcggctatgcggtgccctccaacctgcccctcctgctgcccgcctactccagcccggtcatcatctgcgccacgtccctggacgaagaagaaacaccagaagtcacagaagatcgccagcccaattctctgagttccgaggagcctccaaccagtgaagatcaagtcggtcgagaggacagcgcacttgcccgctgggccgcagacccggccaacacagcctggatggagaatccagaggaagcaatttacgatgacgttccaagggaaaactcagactctgaaccagatgaaatgatttatgatgatgttgagaatggggatgaaggtggaaacagctccttggaatacggatggagttcgagtgaatttgaaagttacgaagagcagagtgactcggagtgcaagaatgggattcccaggtccttcctgcgcagcaaccacaaaaagcaactttctcatgacctaacccgtttaaaggagcactatgagaaaaagatgagagatttgatggcaagcacggtgggcgtggtggagattcagcagctcaggcagaagcatgaactgaagatgcagaagctcgtgaaggccgcgaaggacggcaccaaggacgggctggagaggaccagggcagccgtgaagaggggccgctccttcatcaggaccaagtctctcatcgcacaggatcacagatcttctcttgaggaagaacagaatttgttcattgatgttgactgcaagcacccggaagccatcttgaccccgatgcccgagggtttatctcagcagcaggttgtaagaagatatatactgggttcagttgtcgacagtgaaaagaactacgtagatgctcttaagaggattttggagcaatatgagaagccgctgtctgagatggagccaaaggttctgagtgagaggaagctgaagacggtgttctaccgagtcaaagagatcctgcagtgccactcgctatttcagatcgcgctggccagccgcgtttccgagtgggactccgtggaaatgataggcgatgtcttcgtggcttcgttttctaagtccatggtgctggatgcatacagtgaatatgtgaacaatttcagcacagccgtggcagtcctcaagaaaacatgtgccacaaagcccgcttttcttgaatttttaaagcaggaacaggaggccagccccgatcgaaccacgctctacagcctgatgatgaagcccatccagaggttcccacagttcatcctcctgctccaggacatgctgaagaacacctccaaaggccaccccgacaggctgcctcttcagatggccctgacagagctcgaaacactagcagagaagttaaatgaaagaaagagagatgctgatcaacgctgtgaagtgaagcaaatagccaaagccataaacgaaagatacctgaacaagcttctcagcagtggaagccgatacctcattcgatcagatgatatgatagaaacagtttacaacgacagaggagagattgttaaaaccaaagaacgccgagtcttcatgttaaatgatgtgttaatgtgtgccaccgtcagctcacgcccctctcatgacagccgtgtgatgagcagccagaggtacttgctgaagtggagcgttccactgggacatgtggacgccatcgagtatggcagcagcgcaggcacgggcgagcacagcaggcaccttgccgttcacccgccggagagcctggccgtggttgctaacgcgaaaccaaacaaagtttacatggggccaggacaactgtatcaagatttacaaaacttgttgcatgacttaaatgtaattggccaaatcactcagctgataggaaaccttaaaggaaactatcagaacttaaaccagtcagtagcccatgactggacatcaggtttacaaaggcttattttgaagaaagaagatgaaatcagagctgcggactgctgcagaattcagttacagcttcccgggaagcaggacaaatctgggcgaccgacgttctttacagctgtgttcaatacgttcacccctgccatcaaggagtcctgggtcaacagcttacagatggccaagctcgccctagaagaggagaaccacatgggctggttctgtgtggaagacgatgggaatcacattaaaaaggagaagcatcctctcctcgtcggacacatgcccgtgatggtggccaagcagcaggagttcaagattgaatgtgctgcttataaccctgaaccttacctaaataatgaaagccagccagattcattttccacggcacatggtttcctgtggatcggaagttgcacccatcaaatgggtcagattgccatcgtctcgtttcaaaattccactcccaaagtcattgagtgcttcaacgtggaatctcgcatcctgtgcatgctgtacgttcccgtcgaggagaagcgcagagagcctggggcacccccggaccccgagaccccggccgtgagagcttctgatgtccccacgatctgtgtagggacggaggagggaagcatttccatttataaaagcagtcaaggctccaagaaagtgagacttcagcactttttcactcctgagaagtccacagtcatgagcctggcttgcacgtctcagagcctgtacgctggcctggtcaacggggcagtcgccagctacgccagagccccagatggatcctgggattcagaacctcaaaaagtgatcaagttaggcgtcctaccagttagaagtctactcatgatggaagacacgttgtgggcggcttccggaggtcaagtcttcatcatcagtgtggagactcatgctgtagagggtcagctggaggcccaccaggaggaaggcatggtgatctcccacatggccgtgtccggcgtcgggatctggattgccttcacctcagggtccacgctccgcctttttcacacggaaactctcaagcacctgcaggacatcaacatcgccacccctgttcacaacatgctgccagggcaccagcggctgtcggtgacgagcctgctcgtctgccacggattgctgatggtcggcaccagcctgggagtcctcgtggccctgccggtcccacgtctgcaagggattcccaaagtgaccggaagaggcatggtctcctaccatgcacacaacagtcctgtcaaattcatcgtcctggccacggctctgcacgagaaagacaaggacaaatccagggacagcctggctcctggccccgagcctcaggacgaagaccagaaggacgcacttccgagtggaggagctggttcatctctgagccagggtgaccctgacgcagccatctggttgggagattcgctgggatcgatgactcagaaaagcgacctgtcctcctcatctgggtccctgagcttgtctcacggctccagctctctagagcacagatcagaggacagcaccatctatgatctcctgaaggatcctgtctcgctgagaagcaaagcacgccgggccaagaaagccaaggccagctcggcgctggtggtctgtggagggcagggccaccgccgggtgcacaggaaggcccggcagccccaccaggaagagctggcgccgaccgtcatggtctggcagatccctctgctgaatatataagcaggacggccgccttctgctgtcagaatttgcaatcaagggtgacttctcagctaatcctacagcctgagtggttaagctgtgtctacactggttgggaataaattaaaaacagtatttgggggagaaacgtgcaatagcgtaatggtggtgtccctgccaattccttccttctcttctgtacagcagaagtaattacaagcacttctcacgaaggcagaagactgatgcaattttcgagtaattgagtgcagttctgggaaaataccacattctttttgactgctgtagtccatatatgaatactaaatgttaaacttcatcagcgtcagacctattgtatcatattagagaatttgcagactaagaatttatgagaaaatatatgtattcagtagtgcaggcatttattaacaattcttaaaagttttacctgattcagattcacgacttttatttatattctatatttttgaatttcagagtaaaatttgttaacaattttaaaagccaggtaacacctaccagtccagttagcatgatttgctttcagaagtgagctgggttttccaaagtggtataatgtgtgtactgtatattttaacaaagtaatatttttgtattgcatttttctattaaaaaattaacagttaatgtttcagtcaatgtattatctgtagcatttcacaaataatgtttgctttgaaccaaaatgctcagtgcctatcaacatttggactcaagcatcaacaccaaattattcctcccttctcgtataaatagagtgactatccacaggagaaaagtgtgtgctttagtattagaggagataggcagagaagtcttgcttagttccttcgtgcagcttcttgcccctgttgacgtggaatgctgtgtctgctttagcacgcacgctccgaatgactcctggtgctaggccatgctggctgctgtcactgagcgggactcaggccaagaggcgtgacctcgggccagcctgtctgttgtgcagacgcctcctctgcagaacgcatcagtttctattctgcagttgcagagccagccccgcgtgagaacgtgcataatgagtgcacaccatcatgtcaaggtgcatacttagtgagcgccatcctgctgaacgtgtatttcagtgtttcacttactggacggataacaagaaaaaaatcctaacacaggcagtcaccagaaataaatgtctcagcactttacagatgactaaaaatgttaattttatgacttagccaaatatgttctaggttgcatatatcccccatgtgaaagtgatttcttcccaagcttctcaaactgttagctgctgtctgacttcatcaataaagtatttttatttt

SEQ ID NO: 22263 - DNA, 7326 bp, Homo Sapiens
caaggccagcccttcctcagctaataagcggaaaaacaaacccctttcagacatggagctgaattctagctcagaggactccaaagggagcaagcgtgtccgtactaattccatgggctcagccactggcccccttcctgggacaaaggtagaacccactgttctggacagaaactgcccctcccccgtcctaattgactgtccccacccaaactgcaacaagaagtacaagcacatcaatggacttaagtaccaccaagctcatgcccatacagatgatgacagcaagccggaagcggatggggacagtgagtacggagaggaacctattctccatgcagatcttgggagctgcaacggtgcatctgtctcacaaaaaggttccttgtcccctgcccgctcagctacccccaaagttcgacttgtagagccccatagcccttctccttcaagcaaattcagcacaaaaggcctctgtaagaaaaagttgagtggggaaggggacacagaccttggggccttatccaatgatggctctgatgatggaccctcagtgatggatgaaacaagcaatgatgcctttgattctttagaaaggaagtgtatggaaaaagaaaaatgtaaaaaaccctctagtttaaaacctgaaaagattccttccaagagcctaaagtcagcccgtcccattgcccctgccatccccccacagcaaatctacaccttccagacagccaccttcacagcagcgagcccaggctcttcctcaggcttgaccgccacagtggcacaagccatgcccaacagtccccaactcaagcccattcagcccaagcccactgttatgggagaacctttcacagtcaaccctgccttgactccagccaaggacaagaaaaagaaagacaaaaaaaagaaggaatcttcaaaggaacttgaaagtcctctgacccctgggaaggtgtgtcgagcagaggaaggcaaaagcccattcagggaatcttcaggaaatgggatgaaaatggaggggctcctaaatggctcatcagacccccaccaaagccgactggctagcatcaaggctgaagccgacaagatctacagtttcacggacaatgcccccagcccttccattggaggcagtagccgccttgaaaacactacccctactcagcccctgactcccttacatgtggtgacccagaatggagctgaagccagctcagtcaaaaccaacagccctgcatactctgacatctctgatgctggggaggatggggagggcaaggtagacagtgtcaaatcaaaggacgccgaacagttggttaaagaaggggctaagaaaactctttttccccctcagcctcagagcaaagactcaccatattaccaaggctttgagagttactattctccaagttatgcacagtccagccctggggctctgaaccccagcagccaggcaggagtggagagccaggccctgaagacaaaaagggatgaggaacctgagagcatagaagggaaagtgaagaacgatatctgtgaagaaaagaagcccgagctgagcagttccagtcagcagccctcggtcatccagcagcgtcccaatatgtacatgcagtccctgtactacaaccagtatgcctatgtacccccctatggctacagcgaccagagttaccacacccaccttctgagcactaacacggcttaccggcagcagtacgaagaacagcagaaacgccagagcttagagcagcagcagcggggagtggacaagaaggcagagatgggcctgaaggagcgggaggcagcactcaaggaagagtggaagcaaaagccgtcaattccaccaactctcaccaaggcccccagcctgacagacctggtgaaatcaggacctggcaaggccaaggagccaggggctgacccagccaaatcagtcatcattcccaagttagatgactcttcaaaactcccgggccaggcccctgaaggccttaaagtgaagctgagtgatgccagccacctaagcaaggaggcctctgaggccaagacaggtgctgagtgtggtcgacaggcagagatggatccaatactctggtaccgacaggaggcagagccccggatgtggacatatgtttatcctgccaagtactcagacatcaagtcagaggatgagcggtggaaggaggagcgggaccgcaaattgaaggaggaaaggagtcggagtaaggactctgtccccaaggaagatgggaaggaaagcacaagtagtgactgcaagctgcccacgtcagaggagtctcgccttgggagcaaggagccccggccaagtgtccatgtgcctgtgtcctccccacttacccagcaccagtcctacatcccctacatgcacggctattcctacagtcagtcctacgaccccaaccaccccagctaccggagcatgcctgctgtgatgatgcagaactacccaggttcctacctgccttccagctactctttttccccatatggcagcaaggtctcaggtggtgaagatgctgacaaggcacgagccagccccagtgtgacttgtaaatccagctcagagtccaaagccctggacatcttgcagcagcatgccagtcactacaagagcaagtctcccacgataagtgataaaacttctcaggagagagatcgaggaggctgtggggtggttgggggtggtggcagctgtagcagcgtcgggggagcaagtgggggtgaacggagtgttgaccggccccgcacctctccttcccagcgcctgatgtccacacaccaccaccaccaccacttggggtactcattgctcccagcacagtacaacttaccctatgcagcagggctttcttctacagccattgttgccagccaacaaggctcaactccctcactctacccaccccccaggaggtgagaatgacaccaagtgcccggataaagtcagcttcacgggcccggactggcttacccaaggaggtgctgaaggtgccgtttagacatcagttaaatggtgttgatcatcctgtttgccgtttccaccatgactgaaggcagacccttggctatctcacctccaccagacctccggactacctgaccctacctcttcctcaggagctggagagctggtacttagcaaaaatatttattctctcagccacagttatgactattgtggcctctgtggagatgaaggcacgggaagcaaccaggggaacatggcctcagcccagagaagccactgctctgttccccaagcccttggtctgctgctggagcagtaccagcccccccgcccaccagggagggacccccacccccaagcactgggtaaggtctgaagacagcacagcagccatacccctcaccatcattaccaccatcaccagattctgcatctccctagtgctttgcaccctgggaattggcagcatgtggaggaactagaatctcaggaaagaaattgggggttgttttctacataattgtgaaaacaaggtcttcaaatgtggagacttctccccatttacatgagcacatataaacgctcacaacctagcctggaaaggaagaccaaggcatctgccccaacatggccttgagctgcctgtgaggcagggggcaggggttccaacaccagcacagggctccccagggacactgggagtaagctggtgctggagcatgaatgacgtctgtgaagtagaacctgcgtccccactaagtcctgctgcttcttattccccaactccttgcccttttcccttccctcctaaccccttggtgcctttcccagggggatccccacactggtcttgcctcttcttttccactgcttggctcttaagcctcaggcagataaactagtattccccccagcttggggaaccttggagtctgccaggtcaccttagggcaaggcccagaaggcagcccctgggagcacccagcagttcttggagatgtcctgtcatctagccatctgatatcttcctcatttgaggccacagatatatacagcccaattcctctgtctacaagtacatgattttatatagctcagtctataacctccatgtgggccaatataagctgtgtttcttggtaacacatattttgtttgaggggccactggccatgggaggttatttgttccttagaccctggaataacacatccaagccattacttattagagtctcagaatgtactcagtggagctgtgctttgaggcagccaacatttctctgctctccttagaaatgcagtctcccaatggaagctttatactctttgtactgggaaagtgaggatgatttggtagctttattggggtcatgtcttccccaaggtgtggggagcttagcttacttggcttttgaggtatcatccctctgttctcccctcctatctttccatgaccctctggattgagagagagagataaagactgacagacaccagtgtaggctggaaaagggagtgtgtgaccagagtgccaaaagtgactaggagcaggaacttggctccgactcagtttggaaaatgggaaataggggacagtaagcacaatgcccagtagtagttgatttccaaggaccctggaaccctacacttgagaggcttagggtcaccatctgctcaagaggatcccctctgatctacaggccttttccctaggtttctgcctcctcgtttttgttcaagttgggttctgagtcctccccaaaaaccattgttttagacctcttggcagggccccaaaacagcctccctcatacccatcattccgtctgccttctgctgccctcatgggcagtgctctgagcagtgacctccctttcctccgtggaagtagctagtgcagacaccgtcatcccaccccacctgagtcaccccaaccaagagggtgactgaatttcagcctgattatgccctcctggggctcctgtgaggtggagccaaggttccctctctgttcctgtttgtctttaaatattgttgtgtgttttgtatctgtggcactggcctgcagcatactctgtatatattgtaaagaaaccgttaggagtaattttcttttgcattgggcaggcatggccctgcattcctgccctttccactcattctgtaacacagaggacgaacttctgtattagctgggcagccttgggttctccagaagagaacaggtttttcttttcctttttaatttttcttcttaaacatttggctctttgatcctcatatccaagtctcccctgaagagtaggagctgctcagaagagcaggtgaaagccaccatggcagatcctgatgcctgccgggcctagtcttccctctgaaataacatgaagcagcagctgtggagattcttgacaagtgctgagtgaaagatttgctgcccacctctacatggggaggagaaacacaggtgggagctacctgtggcatccatgacctagtcagagggatgagatgctcagcaggggtccccatcctatcccaccccacaaacaaaggctggaaaaatttgctaccaagggccaagaccaccagaccaagcctgtttatgagccacccctgcccaggccctcacagacattgctcacggggcttcccatagaggagaagctaaagagggagggggcctcatccccagatagatcaggcaaggcttggagagctgctctttaggatccacatcaactacttcctcattttaaggtatggcagttcccttcatccccttttcctgccttgtacatgtacatgtatgaaatttccttctcttaccgaactctctccacacatcacaaggtcaaagaaccacacgcttagaagggtaagagggcaccctatgaaatgaaatggtgatttcttgagtctcttttttccacgtttaaggggccatggcaggacttagagttgcgagttaagactgcagagggctagagaattatttcatacaggctttgaggccacccatgtcacttatcccgtataccctctcaccatccccttgtctactctgatgcccccaagatgcaactgggcagctagttggccccataattctgggcctttgttgtttgttttaattacttgggcatcccaggaagctttccagtgatctcctaccatgggcccccctcctgggatcaagcccctcccaggccctgtccccagcccctcctgccccagcccacccgcttgccttggtgctcagccctcccattgggagcaggttggggcgagctggaggcccgggctggaggggcagtgttgctgttcatagattttgttccattggcgttgctctgttgaatttaatttcagtcttcctgattcttcccttctgtaaagtgtacattaccaagttccttgtttttttatatatatatataaatatatatatatacaaactgtactctttttgcctttgtacattcaggcaagaagagaaaataaatctttttaagagacaatcacaaatctgtgagggctgctggttatttctcctggagtttgctgctgagctgcctcttccttcctcccaattttcctgttctccctcagctctcctgatcttcctggccctgctccatatgcatcctcagcttcactttccctggctgatggcaagctgttgaatccagtgtccagactacctgccttgtaacccttttctgcccagcattgttttctggcttggccactggcttagcccaggagctttactctgtgccctggcctcccctctcttcacctttagatttccattcaccgaagtggctttggacccctgggtactctgggacctgtttcctggaggccctggcttgggacactcacctgtgaaactatgcagctgggagctctctgcctaagagtttgcactatttaaacctgcctgggagttaggacggatggttttaggaatgaccggaaaactacccctaaaactcccccgacattccagcctctagaatgctctgatccagagctcagtggatgattcccagctggtggactcctgtggctaccccatcagaacaagggctaagggtttatgggtcaagagtatttgatcagaattttaaagggtggtatactctgaaacacagcccaaccaaaccattgtttggccgctttctcttttcctctaccttcctcatccccacttttttccctttctctctacttcctcttcttaattggctttggaattgaaatatatttttaaattatttgttgtatttattgaataaagtttttaatgtccctgttctt

SEQ ID NO: 22264 - DNA, 8039 bp, Homo Sapiens
aaattgttctctggagatgacaaaggcaaaattgtttattcttctctggatctagaccaggggctctgtaactcccagctggtgttggaggagccatcttccattgtgcagctggattatagccagaaagtgctgctggtctctactctgcaaagaagtctgctcttttacactgaagaaaagtctgtaaggcaaattggaacacaaccaaggaaaagtactgggaaatttggtgcttgttttataccaggactctgtaagcaaagtgatctaaccttgtatgcgtcacggcccgggctccggctatggaaggctgatgtccacgggactgttcaagccacgtttatcttaaaagatgcttttgccgggggagtcaagccttttgaactgcacccgcgtctggaatcccccaacagtggaagttgcagcttacctgagaggcacctggggcttgtttcatgtttctttcaagaaggctgggtgctgagttggaatgaatatagtatctatctcctagacacagtcaaccaggccacaattgctggtttggaaggatccggtgatattgtgtctgtttcgtgcacagaaaatgaaatatttttcttgaaaggagataggaacattataagaatttcaagcaggcctgaaggattaacatcaacagtgagagatggtctggagatgtctggatgctcagagcgtgtccacgtgcagcaagcggagaagctgccaggggccacagtttctgagacgaggctcagaggctcttccatggccagctccgtggccagcgagccaaggagcaggagcagctcgctcaactccaccgacagcggctccgggctcctgccccctgggctccaggccacccctgagctgggcaagggcagccagcccctgtcacagagattcaacgccatcagctcagaggactttgaccaggagcttgtcgtgaagcctatcaaagtgaaaaggaagaagaagaagaagaagacagaaggtggaagcaggagcacctgtcacagctccctggaatcgacaccctgctccgaatttcctggggacagtccccagtccttgaacacagacttgctgtcgatgacctcaagtgtcctgggcagtagcgtggatcagttaagtgcagagtctccagaccaggaaagcagcttcaatggtgaagtgaacggtgtcccacaggaaaatactgaccccgaaacgtttaatgtcctggaggtgtcaggatcaatgcctgattctctggctgaggaagatgacattagaactgaaatgccacactgtcaccatgcacatgggcgggagctgctcaatggagcgagggaagatgtgggaggcagtgatgtcacgggactcggagatgagccgtgtcctgcagatgatggaccaaatagcacacagttacccttccaagaacaggacagctctcctggggcgcatgatggggaagacatccaacccattggcccccaaagcactttttgtgaagtccccctcctgaactcactcactgtgccttccagcctcagctgggccccaagtgctgaacagtggctgcctgggaccagagctgatgaaggcagccccgtggagcccagccaagagcaggacatcctaaccagcatggaggcctctggccacctcagcacaaatctctggcatgctgtcactgatgatgacacaggtcagaaagaaatacccatttctgaacgtgtcttggggagtgtgggaggacagctgactccggtctctgccttggcagccagcactcacaagccctggcttgagcagcctccacgggatcagacattgacgtccagcgatgaggaggacatctatgcccacgggcttccttcttcatcctcagagacgagtgtgacagagctcggacctagttgctcccagcaggacctgagccggctgggtgcagaggacgccgggctgctcaagccagatcagtttgcagaaagctggatgggctactcgggtcccggctatggcatcctcagcttggtggtctccgagaagtatatctggtgcctggactacaaaggcggcctgttctgcagcgcgttgccgggcgccgggctgcgctggcagaagtttgaagatgctgtccagcaggtggcagtctcgccctcaggagcccttctctggaagattgaacagaaatctaaccgggcttttgcttgtgggaaagtcaccatcaaggggaagcggcactggtacgaagccctgccccaggcagtgtttgtggccctgagcgatgacacggcctggatcatcaggaccagtggggacctatacttgcagacaggtctgagcgtggatcgcccttgtgccagagccgtaaaggtggactgtccctacccgctgtcccagatcacagcccggaacaatgtggtgtgggcgctgacagagcagagggccctcctgtaccgggagggcgtgagcagcttctgtccggaaggcgagcagtggaagtgtgacattgtcagcgaaaggcaagctttagaacccgtctgcataacgctcggggatcagcagactctctgggccctggacatccatgggaacctgtggttcagaactggcattatttccaagaagccccaaggagatgacgaccattggtggcaagtgagcatcacggactatgtggtgtttgaccagtgcagcttatttcagacgataatccatgccactcactcggtggccacagcagcccaagcccccgtagaaaaggtggcagataagctgcgcatggcgttttggtcccagcagcttcagtgccagccaagccttctcggggtcaataacagcggtgtctggatctcctcgggcaagaatgaattccacgtcgctaagggaagtctcataggcacctactggaatcatgtggttccccgtgggacagcttctgctacaaaatgggcctttgtgttggcttctgcagctcccacgaaggaaggaagcttcctgtggctgtgccagagcagcaaggacctgtgcagcgtcagcgcccagagcgcacagtcgcggccctccacggtgcagctgcctcccgaagccgagatgcgcgcctatgccgcctgccaggatgcgctgtgggcgctggacagcctcggccaggtgttcatcaggacgctctccaagagctgccccacgggcatgcactggaccaggctggacctctcccagctaggagctgtaaaattgacaagcttggcatgtggaaatcagcacatctgggcctgtgattccaggggtggagtttacttccgtgtagggactcagcctctcaatcccagtctcatgcttccagcctggataatgattgagccacctgtccagcccgccggggtcagcttggtcagcgtccattccagccccaacgaccagatgctgtgggtgcttgacagcaggtggaacgtgcacgtgcggaccgggatcaccgaggagatgcctgtggggaccgcctgggagcatgtgccagggttgcaggcctgccagctggcgctgagcaccaggaccgtgtgggcccgctgtccaaacggagacctcgcccggcggtacggcgtcacagacaagaaccccgccggggactactggaagaaaattcccggcagcgtgtcgtgtttcacagtgactgcgtcagatgagctgtgggctgtgggcccgcccggctacctcctccaacggctgacaaagacgttcagccactcgcacggcacccagaagagcagccaggccgccatgccccaccctgaggacctggaggacgagtgggaggtcatctgaaggagccctggccgagtcacgcggaggggcccggcgtctgtggcgggcacaggggcttcagagtgactccctggtggacgcgctgcctcaacacttgtccagacacctctggccaggttggacccgcacacttactttcatctatgttggtttctgtctcgttccagaacccacagcctccacccgtggctggcgtgattgctgcagcagtggcgcctcctagctcaggacagtggcgactgcccggctgcatgcactccgattacccacgtgctgccgtcctggtctcatccacagatagctccagcttttgttggtgggagtggtctccggaggcctcccagaaccaagggtagccgggcagctggtttggcccagggcctccttccacattagtagccccagggccagatggagccaaaggtcagctctctgcagcgcgggatgtgctcggtgatggctttgtcccatcataggggggtgtccccccagagacaaagctgcagagcacattccatgccagacgctctggccaggaagctgaggccgggcttgagaggagagcgctggccatgccaggagagaacccacgcacatgcacaccacaacacacaacacacctcacctcacaccacagcacacctcaccacaccacaccgcactgcaccatacctcaccacatctcaccacaccacagcacacctcaccacacaacacaccacaccccacaccgcactgcaccgcaccgcaccgcaccgtacctcgccacatctcaccacaccacaccacaccacacctcactgcccacacacggcgcaggctgcccgcctcctggagagcacacttcagctgaaacagtaaagcctgatgggtgcaaatggaacctggatgtgtgcacgtgtgtcccaggtagggacggcacaggagggtgcatggggcgtgggggagctgagcaagggtcgctcacttagaaatgtctttggaatggtgtttaactaatgctgctggcggacatcctaaaaccagatgcatcctcagaggacgagtctactaattattgcctttgttgttgtattacaaatctgcataaaatacctcatttcaaatcaaatcttacaaatttagaagagagatatgttttccgaaaacagtggaagccctttgttccttcccgggtttgtcctgagcctgcactgtcctcgcctgcagcctcagaggggcaggcatccccgcacagacttgactggcagggcggtcacgggacctgcgggctggctccgagtggcagcccatgccttctgcggggtatgggttgacacttgacaggttgaaaccagtgcctctatggacggctgctgtggccccttcagacaatgggcagtgcccaccccgcccactggcatctgcgtgtgagggctaggccgccctgccacacatcccgccccctcccggaggcagcttcaggacaggacaccaggctggctgctttttttagcctgcccctggcccaggcccagtccttggtgtcagggagcccccaggccgcaggtggagggtgataaaatatgttctctgacaggacccagccagccacataggtggaggttttccatgtccaaatgaggtcaagatgccgaaatcccagatctgacttcacacttcccttttctagaaccttttgtaaaagttggtggcagcagaggcagccccaggccgggctgcatctctctgtgtctgttgtgccttgcccggcgcctcacggatggcaaagctctcctcacccatgggactgtagtgcaattaaacccgcgtctaggtgatgcttttaaagttgtagcttcgtgctttgtacagttttctttctggttttaatttttagttgtgctttgagtcagtgcaataaactagactttttccaaacctggccgagtgtggtgcctgagctgtgagaagtgtcctcagccgacactcacgagggcagtgcaagggagaacctgccagcccagccccaccacagggagagtgcgtcagcagacctgtcctggcctggctggtgttgaaatacacaccggtttgcccaagtggctgttatgggggaatggccgctccagagctggctgtaccccatggtagcctctgaggaggacgctgtggggtgaggtccagggctgcctcctcatggagctgtgtgtgagcaggcgttggaggggttcgagcccctggttctgtatcttcagccagcaaacgaaaccatatcgcaaaccagagctgctggaaaccagcacacgcaaaagatgacgcccagcacagcagcaggacacaccatgtgccaggaaatgacctcagcaagaaacctcaggccgtgtgaagagcagcaaagctttccagaaggcataaaaggaaacttgaataaaggaagatatgttccacattcctggatggaggactacacacattatggaaagacctcattctttccaaaggaatttataggtgtagcttgatttcagttcaaatccccactgggattgttttgttggggcaggcagggaggaataatgttagtacccacaaatgcccatgactgtgcccaatgtgcttctcaccagagccctgcaaggggaagtctcattagccccttgagactcagagaggttaggtaacttgctcaaggtcacacagcactgggactggaagccagctctgtagaactgcagacctgtgctgtttgatgcctcctcactgtcccgtcactcctgggaagaagaaacgggtgagaactgctaagtgatgacaggtggagccccagcaggggccactctattgaatggcatggcccagaccctcggagggccaggcaacaggctagcaaggcccacagggagggagcagaatggagagggcatctcagatgcgcttaaggagcggcgggggcggggcatggggggtgtcacaactaatgtggccactgcttcattctctgggcaaaataatattaaatggattaaagaatctaaaaccagtgggaaaactgtctgatttctggatggcaaaggctttctaaactcaaaagtgataggacaagctacagaggaaaataagtacatagatttgatttctccaaaatacagaaatgctgctgggcacagtgatgtgcagttatagtcccagctacttgggaggccaaggcaggaggattacttgagcccaggagtttgaggctgcaatgaactatgatcacaccactgcactccagcctcggcgacagagcaagaccttgtttctcaaaaataaataaatagaaggaaataaatgtaaaaatgctgcaaattaaaaacctcaaagaagggaaataattgcaacaaatgggaattgatgttgaatatttaccttaaaaacctatacaacaataagaggagtgcgcccttcagcagcatgtatacaaaaattgcaacgatacagagattagcatggcccctgcacaaggatgactcgcaaattcataaagctttccataaatatatttattaaaaaccaataggaggagcacttcgagtcgagtgtaagggcccttcacaaaagcagaaggaacactggcccaaacccccagcaccccggaagcagaggtgagatgggagcagcttgggagccccccattggcgccgccctactggggaagccggtccgtacgtaggccttgcatctcgccacctccacttctgtcctcaagaacaagtcctaggtcaagggaaacagcacagcctgtttataattaggaaacacttaaaacagcctggcatttgggaacagccatgttaacgtgagcaaattcctctcatgaaatagcctgcagctattaagaagcacgtgtgtgcaggaagcggaggcgcaggacctcaccgcgccagcgtgaagttcccgggcatggtcatgaaagcgtggttctgtaagaaatcagagggagaaagggagagaagggggagggagacaacccaaacgttggagggtatttgttgtaaacttcaaacttttggcaggtttgaaatttttcataactccggggaggagcaagaggggtgaaaagaaacaagttctctacttgtgatcagcagctggtcatagtggttgcctggagtatatgcctttttgtatcctttgaatttccagccatgtaaatgtattatttattccaaaaataaagcagatttacattttaaaaattc

SEQ ID NO: 22265 - DNA, 11140 bp, Homo Sapiens
cttttctgaagcatgctgggaagtatatgtctgttcccagcattcaccagcaaaccggaagcttgtacaggctttactggagaaacatgtttcttctttgcgagcacatgaaacctggggagactccattcttggcatgggactgtggccagattctgtgccctcagctctctttgctactgaagattcacacctgtctacagtccgaagagatggacagatcttagtatattgtctcaacaggatgagcatgaaaaccagcagctggacaaggagtcagccttttaccttgcaagacttagagaaaattatgcagtcccccagccctgagaacctgaaattcaatgcagtcgaagtgaatacttactggatcgatgaaccagatgttttggtcatggctgttaaattgctcatagaaagagcaaccaatcaggattggatgctcagagttaaatggctttatcatttagccaagaatataccgcaggggcttgagtccatacaaattcatttggaagccagtgctgcatctctcaggaatttttactcacattccctctcaggtgcagtcagtaatgttttcaaaatattacaaccaaatacaacagatgaatttgtgatccctctggatccccgatggaatatgcaggctctggacatgattagaaatttgatggactttgacccacaaacagaccagcctgaccagctctttgcccttttagaatcagctgcaaacaagacaatcatatatcttgaccgggaaaaacgggtttttactgaagcaaatttggtttctgttggtagcaaaaagctaagagagagtgttttgagaatgtcctttgaattccatcaagatccagaaagctatcacactctgccccatgaaattgtggtcaatcttgctgctttttttgaactttgtgatgcactagtcctgctctgggtacagtcctcccagggaatggtgtctgatgccagtgccaatgagatcttaggttctctgcggtggcgggaccggttctggactgtggccgacacagtaaaagtagatgccccaggtctggcccttcttgccctccattggcactgggttttaaaacatctggtccaccagatcccccgacttctgatgaattatgaagacaaatattacaaagaagttcagactgtctcagaacatattcagaattgtctggggagccagactggtggcttcgctggtataaagaagttgcagaagttcctgggacgaccgtttccttttaaggacaagctggtggtggagtgtttttcacaactgaaggtccttaacaaagtccttgccatcagggagcagatgtctgcccttggggagagtggatggcaggaagacattaaccgtctccaagtggttgcttctcagtggacattaaagaaaagtctcctgcaagcctggggactgatcctcagagcaaatattttggaagatgtcagcctagatgaattgaagaattttgtgcatgctcagtgtttagaactgaaagccaaaggactctcacttggttttctggagaaaaagcatgatgaagcttcctccctgtcccatccagacttgacctccgtaatccacctcaccaggagtgttcagttgtggcctgcaatggagtacctggctatgctttggcggtacaaagtgacagctgattttatggcacaagcttgtctcagaagatgcagcaaaaatcaacaaccccagataaatgaggagataagtcacctcatctcattttgtctttatcacacacctgttacacctcaagagcttcgagatctgtggtccttgctgcatcatcagaaggtgtctcctgaagaaattacatctttgtggtccgagttatttaattccatgtttatgtctttctggagcagtactgtgaccacaaatccagagtactggctaatgtggaaccctttgcctggtatgcagcagagggaggcacccaagtctgttttggactccacattgaagggccccggcaatctcaatagacccatattctctaagtgctgctttgaagtcttaaccagcagctggagagcaagtccctgggatgtgagtggcctccccattctttcctcctctcacgtgaccctaggagagtgggttgagagaactcagcagctccaggacatcagttcgatgctttggactaacatggctatctcttcagtagcagaattcagacgcacggattcccaactccaggggcaggtgctgttccggcacctggcaggcctagcagagctgctcccagagtcccggcggcaggagtacatgcagaactgtgagcagctgctgcttgggagcagccaggccttccagcatgtgggccagacacttggggacatggctggtcaggaggtgctgcccaaggaactgctctgccagttgctcacctccctgcaccactttgttggtgaaggggagagtaagaggagcctgcctgagccagcccagcgtgggagcctctgggtgagcctcggcttgctccagattcagacatggcttccccaggcacgctttgaccctgcggtgaagagggagtacaagctcaattacgtcaaggaagagttacaccaactgcagtgtgaatggaagacccggaacctgtcatcccagctgcagactggaagagacctggaagatgaagtcgttgtcagctactctcatcctcacgtcaggctgcttcgccaaaggatggatcggctcgataatttaacctgtcacctgttgaagaaacaggcctttagaccccagctgcctgcctacgagtccctggttcaggagatccaccactacgtcaccagcatcgccaaggcccctgctgttcaggatctgctcacacggcttctgcaggccctccacatagatgggccacggtctgcccaagtagcccagagccttctaaaggaggaggcctcttggcagcagtcacaccaccagttccggaagcggctgtcagaggagtacaccttctatccagatgccgtgagcccactgcaggcatccatattgcagttacaacatggcatgaggctggtggcctctgagctccacacctcactctacagcagtatggttggtgcagacaggctggggaccctggccacagccttgctggctttcccatcggtgggccccaccttcccgacttactatgctcatgcagacactttgtgctcggtgaagtctgaggaggttctacgaggccttgggaagctaatcctcaagcgctcaggaggaaaggagctggaaggcaagggccagaaagcctgtcccactcgggagcagctgctgatgaatgctctcctttacctgcgctcccacgtgttatgcaagggagagttggaccagagggccctgcagctcttcagacatgtgtgtcaggaaatcatcagtgagtgggatgagcaggaacgcatagcccaagagaaggctgagcaggaaagcggcctgtatagatacaggagcaggaactctaggacagccctgagtgaagaggaggaggaagaacgggagttcagaaaacagttccccctgcatgaaaaggactttgcagatattttggtgcagccaacgttggaggagaacaaaggaacttcagatgggcaagaagaggaagcaggcacaaacccagctctcctctcccagaattcaatgcaggcagtaatgctgatacaccagcaattgtgtctcaactttgctcgatccctctggtatcaacagactctgccgccacatgaagcaaagcattacctcagcctgtttctgtcttgctatcagactggggcatcgcttgtgacacacttctaccccctgatgggagttgaactgaatgaccgactcttgggcagccaacttttggcctgtaccctctcccataacactctttttggggaggcaccctcagacctgatggtgaaacctgatgggccctatgacttctaccagcatcccaatgttccagaagcacggcagtgtcaacctgtgcttcaaggtttctcagaggctgtcagtcacttgctacaggactggccagaacacccagcgcttgaacagctcctggttgtaatggacagaattcgtagtttcccactttccagtcccatctcaaagttcctgaatggcttagagatccttctggcaaaggcacaggattgggaggaaaatgcaagtcgagctttgtctttgcggaaacatcttgatttgatcagtcagatgatcattcggtggcgtaaactggagctgaactgctggtccatgagtttggataatactatgaagcgccacaccgagaaatccaccaagcactggttctccatctatcagatgcttgagaagcacatgcaggaacaaacagaagaacaggaagatgacaaacagatgaccttgatgttgctggtcagcacattacaagcatttattgaaggatcctcgctgggagagttccatgtgcgacttcagatgttactggttttccattgtcatgtcttgctgatgccacaggttgaaggaaaggattcactttgcagtgttctatggaatttgtaccattattacaagcaattctttgaccgggtccaggccaaaattgtggaacttcgttcccccctagaaaaagaacttaaagaatttgttaagatttccaagtggaatgatgtcagcttctggtccattaagcaatctgtagaaaagacacacaggacactctttaaattcatgaagaaatttgaagcagtcctgagtgaaccctgccggtcatccctggtggagagtgacaaggaagaacagcctgactttttgcccaggccaacagatggagctgcaagtgaactgtcttccattcagaatctgaacagggcactgagggagaccctgttagcccaaccagcagctgggcaggccacaattccagagtggtgtcagggcgctgctccttccggcttggaaggggagcttctgcgtcgcttgccaaagctcaggaaacgcatgaggaagatgtgcctgacgttcatgaaggagagccccctgcctcgccttgtggagggccttgatcagttcacaggtgaagtgatttcctctgtgagtgagctgcagagcttaaaggtggaaccctctgcagagaaggagaagcagcggtcagaagccaagcacattctcatgcaaaaacagcgagctttgtcagacctctttaaacaccttgcaaaaattggtttgtcgtatcgcaaaggtcttgcttgggcccgttcaaaaaaccctcaagagatgcttcatcttcacccattagatctccagagcgcattgtccatcgtcagcagcactcaggaggctgattctaggctgcttacagaaatctcgtcttcatgggatggatgccagaagtatttttatcgctctcttgcacggcatgccaggcttaacgcagcactagcaactcctgccaaggaaatgggcatgggcaacgtggagaggtgcagagggttctcagcacatttgatgaagatgctcgtccgacagcggcgctccctgaccacgctcagtgagcagtggatcatcctcaggaacctcctcagctgtgtgcaagagattcacagcaggctgatggggccccaggcctaccccgtggccttcccccctcaggatggcgtgcagcagtggacagagcgcctgcagcacctggccatgcagtgccagatcctgcttgagcagctctcctggctcctccagtgctgccccagtgtagggccagctccaggccatggcaatgtccaggtactggggcagcctcctggcccctgcctggaaggaccagaacttagcaagggacaactttgtggagtagtgctggacctaattccttccaatctgagctacccatctccaatacctggaagtcagctgccctctggttgccggatgcggaaacaggatcacctttggcaacagtcaactacgagattaacagagatgctaaaaaccattaaaacagtgaaagctgacgtcgacaaaattagacagcagtcttgtgagactctctttcattcttggaaagattttgaagtttgctcttctgcgctgagttgcttgtcccaggtgtcagttcatttgcagggcctagagtccttgttcattcttccagggatggaggttgagcaaagagactcacaaatggcactagttgaaagtctggaatatgtaagaggagaaattagtaaagccatggctgactttactacctggaagacccatctgcttacttcagatagccaaggaggaaatcaaatgttggacgaaggatttgtggaagatttttcagagcaaatggaaattgccatccgagccatcctctgtgccatccagaacttagaagaaagaaagaatgaaaaagcagaggagaacactgaccaagcaagcccacaagaagattatgcaggctttgagagactgcaatcaggacatctaacaaaactcttagaggatgacttctgggccgatgtgagcactttgcacgtgcagaaaataatttctgccatctccgagctgttggagaggctgaaatcgtacggtgaggatggcacagcagcaaagcacctgttcttcagccaatcctgttccttgctggtgcgcctggtgccggtcctctccagctactcagacctcgtcctcttcttcctgaccatgtctttagcaactcaccgtagtactgcaaagctgctctctgtgcttgcccaggtctttacagagcttgcccagaagggattttgcttgcccaaagaatttatggaagattcagctggagagggagcaactgagttccatgactatgagggaggtggaattggagaaggcgagggcatgaaggatgtgagtgaccagatcggaaatgaagaacaggtggaagatacatttcagaagggtcaagaaaaagacaaagaggatcctgattcaaaatctgatattaagggcgaggataatgccattgagatgtcggaagattttgatgggaaaatgcatgatggggagcttgaagaacaagaagaggatgatgagaaatcagatagtgagggcggagacctggataaacacatgggcgatctcaatggtgaggaagctgacaaactagatgagaggctttggggtgatgatgatgaggaggaagatgaggaggaagaagacaataaaactgaagaaacaggaccaggaatggatgaggaagattctgaacttgttgctaaagatgacaacttggatagtggcaattcaaacaaagataaaagccagcaagataagaaggaagaaaaggaagaagcagaagctgatgatggtggacaaggtgaagacaaaattaatgaacaaatagatgagagggactatgatgaaaatgaggtggacccttaccatggcaatcaggaaaaggtgccagaacccgaggctttggaccttccagatgacttgaaccttgacagtgaagacaagaatggtggtgaggacaccgacaatgaagaaggagaagaagagaatcctttggagataaaagaaaaaccagaagaagcaggtcatgaagctgaggaaagaggagagaccgagaccgaccagaacgaaagtcagagtccacaggagcctgaggaaggccccagtgaagatgacaaggcagaaggggaagaggaaatggacacaggagctgatgaccaagatggagatgctgctcagcatcctgaagaacactctgaggagcagcagcagtctgtggaggaaaaagacaaggaagccgatgaagaaggtggagagaatggccctgctgaccaaggtttccagccccaggaggaagaagaacgggaggactctgatacagaggagcaggtgccagaggctttggagaggaaggagcatgcctcctgtgggcagactggtgtggagaacatgcagaacacacaggccatggagctggctggggccgcacctgagaaggagcaggggaaagaggaacacggaagtggagctgcagatgcaaaccaggcagaaggccatgaatcgaatttcattgcccagttggcctcccagaagcacaccaggaaaaacacacagagttttaagaggaaacctgggcaggctgacaatgaacgttccatgggtgatcacaatgagcgtgtgcacaagaggctgaggactgtggatacggacagccatgccgagcaggggccagctcagcagccccaggcccaggtggaggatgcagatgcattcgagcacattaaacaaggcagtgacgcatacgatgcacagacctatgatgtggccagcaaagaacagcaacagtctgcaaaagactctggcaaagatcaggaagaggaggagatagaggacacccttatggacacagaggagcaggaggagttcaaagcagcagacgtggagcagctgaagccagaggaaatcaagtcgggcaccacagcacccttgggctttgatgagatggaagtggagatccaaactgttaaaacagaggaagaccaagaccccagaacagacaaagcccataaggagacagaaaatgagaaaccagaaagaagccgagagtctaccattcatacagctcatcaattcctcatggacacgatcttccagccctttttaaaagatgtcaatgagctaagacaggagctggagagacagctggaaatgtggcagccacgtgaatctggaaacccagaggaggagaaggttgcagctgagatgtggcagagttacctgatcttaacagcgcctctttcacaacggttatgtgaagagcttcgtctcatattagagcctacccaggcagccaagctgaaaggagactatcgaactgggaaacgactaaacatacggaaagtcattccatacattgctagtcaatttcggaaagacaagatttggcttcgaaggaccaagcccagtaaacgccagtatcagatttgtttggctatcgatgactcttctagtatggtagacaatcataccaagcagcttgcatttgaatctttggctgtgattggaaatgctctaaccctcctggaagtgggtcagattgcagtgtgtagttttggagaatctgtaaagctgttacacccatttcatgagcagttcagtgattactctgggtcccagattctacgtctctgcaaattccaacaaaagaaaaccaagattgctcagtttctagagtctgttgccaacatgtttgcagctgctcagcagctctcgcagaacatcagttcagaaactgcacaactcctcctggtagtctctgatgggcgaggccttttccttgagggcaaagaaagagtcctggcagcagttcaggctgcccggaatgcaaatatctttgtcatctttgttgtattggacaatcccagttcacgggattctatcttggacattaaagtaccgatatttaaaggacctggagagatgcctgaaatccgatcctacatggaagagttcccattcccatactatatcattcttcgagatgtaaacgcacttcctgagacactcagcgatgccctcagacagtggtttgagttggtgacagcctctgaccacccatagaacagaaagaagagtccaaagtgagacttaactgtggtcagaaggtcacattgcttacccaggtgctcccttttggacaactacaaaaaattttattgtaatatttttattttacaacgtgatcttacagcctacagaatgctctctggctcccggctttgcctgggctgaggtttttataccaaacctggaagcagcagcaggtgcctgaactcgtaactagagaagagttatccttcttccctgccttggaagccctggcctgggaggaggtcataccccaccgttggagcccagctgcctgttttcttttgcaggggatctgggcacctgtgccttgaggagatgctgccaggagcatgggactctgacagtcctttgtataaaggactaaagggagctgcccttttgaccctgttctaagctctgccttgccaagcccatagtgtgtgcccaaaagctgtcaagtggccaagacagctcgtttctggagagtatgagggtgtgttttcttattgtgaaaggaactaccttctcttagagggtaggaagaatgtggtgtgtgtgtgttctcataaagcaactggacattataggtgcccaggtcatctataaaaacgatccttgggctgtgtaaaaatgaagtggcttttcagtatcctctttcacacttgctgcttcgggagactatgcaatgatgggaaggtgattgcccctttatttcattcagtgccatggtccctgttgttgtagtaatttatttgtttagttcatttttttttttcttaacagtcaaggggaagagtgattcctcacactgctttcaagctggactgagccagtctcattctgggaaagaaacgctgtgtccagaactcagcagctccatctattttttccagtcgaaagaaactgatctttaggcagtttttacttggccagaaagcagtgctgaatacttgaaactgtgtgctctgttctacttaatgttctgtcagaatgttcttttgtaggcagtatgtcatgatgtaatcatctatctccttgtctgtttccaagttacactgtgaagtctgcgacccttttgaggtggtcatcaaagacacagattccttgtttaaccaagtgtcccaaagcatgtacctgaagttatatcattttttattctaaaaagctatgcagcttatattctgaaaactattaaaacatataccactgttgttgatgtaatttgtgactcttcttaatggaagatgacaggattgtaaaaggtatgctaggggactgatcttctctgctggatcagtcagtcagctgttactagttgatgctgtgctaacatgatcccctcctacttccatgttgctcttactacaaaggttatcatttgcatttatgtccatggtaggctgagctataatatgctggctttgcagcagaatgaaaaggatgagttggtgtagccttataaggaggcttataaaaataaattatcctccataaatg

SEQ ID NO: 22266 - DNA, 6629 bp, Homo Sapiens
tggaatttgatccggaagaattttactacctattggaagcagcagaaggccatgccaaagaaggacagggtattaaaaccgacattcccaggtacatcattagccaactgggactcaataaggatcccttggaagaaatggctcatttgggaaactacgatagtgggacagcagaaacaccagaaacagatgaatcagtgagtagctctaatgcctccctgaaacttcgaaggaaacctcgggaaagtgattttgaaacgattaaattgattagcaatggagcctatggggcagtctactttgttcggcataaagaatcccggcagaggtttgccatgaagaagattaataaacagaacctcatccttcgaaaccagatccagcaggcctttgtggagcgggatatcctgacttttgcagaaaacccctttgttgtcagcatgtattgctcctttgaaacaaggcgccacttgtgcatggtcatggaatatgtggaagggggagactgtgctactttaatgaaaaacatgggtcctctccctgttgatatggccagaatgtactttgctgagacggtcttggccttggaatatttacataattatggaattgtacacagggatttgaaaccagacaacttgttggttacctccatggggcacataaagctgacagattttggattatctaaggtgggactaatgagcatgactaccaacctttacgagggtcatattgagaaggatgctagagagttcctggataaacaggtctgtggcacacctgaatacattgcaccagaagtgattctgaggcagggttatggaaagccggtggactggtgggccatggggattatcctctatgaatttctggttggatgcgtgccattctttggggatactccagaggagctatttggacaagtcatcagtgatgagatcaactggcctgagaaggatgaggcacccccacctgatgcccaggatctgattaccttactcctcaggcagaatcccctggagaggctgggaacaggtggtgcatatgaagtcaaacagcatcgattcttccgttctttagactggaacagtttgctgagacagaaggcagaatttattccccaactggaatctgaggatgacacaagttattttgatactcggtctgagaagtatcatcatatggaaacggaggaagaagatgacacaaatgatgaagactttaatgtggaaataaggcagttttcttcatgttcacacaggttttcaaaagttttcagcagtatagatcgaatcactcagaattcagcagaagagaaggaagactctgtggacaaaaccaaaagcaccaccttgccatccacagaaacactgagctggagttcagaatattctgaaatgcaacagctatcaacatccaactcttcagatactgaaagcaacagacataaactcagttctggcctacttcccaaactggctatttcaacagagggagagcaagatgaagctgcctcctgccctggagacccccatgaggagccaggaaagccagcccttcctcctgaagagtgtgcccaggaggagcctgaggtcaccaccccagccagcaccatcagcagctccaccctgtcagttggcagtttttcagagcacttggatcagataaatggacgaagcgagtgtgtggacagtacagataattcctcaaagccatccagtgaacccgcttctcacatggctcggcagcgattagaaagcacagaaaaaaagaaaatctcggggaaagtcacaaagtccctctctgccagtgctctttccctcatgatcccaggagatatgtttgctgtttcccctctgggaagtccaatgtctccccattccctgtcctcggacccttcttcttcacgagattcctctcccagccgagattcctcagcagcttctgccagtccacatcagccgattgtgatccacagttcggggaagaactacggctttaccatccgagccatccgggtgtatgtgggagacagtgacatctatacagtgcaccatatcgtctggaatgtagaagaaggaagtccggcatgccaggcaggactgaaggctggagatcttatcactcacatcaatggagaaccagtgcatggacttgtccacacagaagttatagaactcctactgaagagtgggaataaggtgtcaatcactactaccccatttgaaaacacatcaatcaaaactggaccagccaggagaaacagctataagagccggatggtgaggcggagcaagaaatccaagaagaaagaaagtctcgaaaggaggagatctcttttcaaaaagctagccaagcagccttctcctttactccacaccagccgaagtttctcctgcttgaacagatccctgtcatcgggtgagagcctcccaggttcccccactcatagcttgtctccccggtctccaacaccaagctaccgctccacccctgacttcccatctggtactaattcctcccagagcagctcccctagttctagtgcccccaattccccagcagggtccgggcacatccggcccagcactctccacggtcttgcacccaaactcggcgggcagcggtaccggtccggaaggcgaaagtccgccggcaacatcccactgtccccgctggcccggacgccctctccaaccccgcaacccacctccccgcagcggtcaccatcccctcttctgggacactcactgggcaattccaagatcgcgcaagcctttcccagcaagatgcactccccgcccaccatcgtcagacacatcgtgaggcccaagagtgcggagccccccaggtccccgctgctcaagcgcgtgcagtccgaggagaagctgtcgccctcttacggcagtgacaagaagcacctgtgctcccgcaagcacagcctggaggtgacccaagaggaggtgcagcgggagcagtcccagcgggaggcgccgctgcagagcctggatgagaacgtgtgcgacgtgccgccgctcagccgcgcccggccagtggagcaaggctgcctgaaacgcccagtctcccggaaggtgggccgccaggagtctgtggacgacctggaccgcgacaagctgaaggccaaggtggtggtgaagaaagcagacggcttcccagagaaacaggaatcccaccagaaatcccatggacccgggagtgatttggaaaactttgctctgtttaagctggaagagagagagaagaaagtctatccgaaggctgtggaaaggtcaagtacttttgaaaacaaagcgtctatgcaggaggcgccaccgctgggcagcctgctgaaggatgctcttcacaagcaggccagcgtgcgcgccagcgagggtgcgatgtcggatggcccggtgcctgcggagcaccgccagggtggcggggacttcagacgggcccccgctcctggcaccctccaggatggtctctgccactccctcgacaggggcatctctgggaagggggaaggcacggagaagtcctcccaggccaaggagcttctccgatgtgaaaagttagacagcaagctggccaacatcgattacctccgaaagaaaatgtcacttgaggacaaagaggacaacctctgccctgtgctgaagcccaagatgacagctggctcccacgaatgcctgccagggaacccagtccgacccacgggtgggcagcaggagcccccgccggcttctgagagccgagcttttgtcagcagcacccatgcagctcagatgagtgccgtctcttttgttcccctcaaggccttaacaggccgggtggacagtggaacggagaagcctggcttggttgctcctgagtcccctgttaggaagagcccctccgagtataagctggaaggtaggtctgtctcatgcctggagccgatcgagggcactctggacattgctctcctgtccggacctcaggcctccaagacagaactgccttccccagagtctgcacagagccccagcccaagtggtgacgtgagggcctctgtgccaccagttctccccagcagcagtgggaaaaagaacgataccaccagtgcaagagagctttctccttccagcttaaagatgaataaatcctacctgctggagccttggttcctgccccccagccgaggtctccagaattcaccagcagtttccctgcctgacccagagttcaagagggacaggaaaggtccccatcctactgccaggagccctggaacagtcatggaaagcaatccccaacagagagagggcagctcccctaaacaccaagaccacaccactgaccccaagcttctgacctgcctggggcagaacctccacagccctgacctggccaggccacgctgcccgctcccacctgaagcttccccctcaagggagaagccaggcctgagggaatcgtctgaaagaggccctcccacagccagaagcgagcgctctgctgcgagggctgacacatgcagagagccctccatggaactgtgctttccagaaactgcgaaaaccagtgacaactccaaaaatctcctctctgtgggaaggacccacccagatttctatacacagacccaggccatggagaaagcatgggcgccgggtgggaaaacgaaccacaaagatggcccaggtgaggcgaggcccccgcccagagacaactcctctctgcactcagctggaattccctgtgagaaggagctgggcaaggtgaggcgtggcgtggaacccaagcccgaagcgcttcttgccaggcggtctctgcagccacctggaattgagagtgagaagagtgaaaagctctccagtttcccatctttgcagaaagatggtgccaaggaacctgaaaggaaggagcagcctctacaaaggcatcccagcagcatccctccgccccctctgacggccaaagacctgtccagcccggctgccaggcagcattgcagttccccaagccacgcttctggcagagagccgggggccaagcccagcactgcagagcccagctcgagcccccaggaccctcccaagcctgttgctgcgcacagtgaaagcagcagccacaagccccggcctggccctgacccgggccctccaaagactaagcaccccgaccggtccctctcctctcagaaaccaagtgtcggggccacaaagggcaaagagcctgccactcagtccctcggtggctctagcagagaggggaagggccacagtaagagtgggccggatgtgtttcctgctaccccaggctcccagaacaaagccagcgatgggattggccagggagaaggtgggccctctgtcccactgcacactgacagggctcctctagacgccaagccacaacccaccagtggtgggcggcccctggaggtgctggagaagcctgtgcatttgccaaggccgggacacccagggcctagtgagccagcggaccagaaactgtccgctgttggtgaaaagcaaaccctgtctccaaagcaccccaaaccatccactgtgaaagattgccccaccctgtgcaaacagacagacaacagacagacagacaaaagcccgagtcagccggccgccaacaccgacagaagggcggaagggaagaaatgcactgaagcactttatgctccagcagagggcgacaagctcgaggccggcctttcctttgtgcatagcgagaaccggttgaaaggcgcggagcggccagccgcgggggtggggaagggcttccctgaggccagagggaaagggcccggtccccagaagccaccgacggaggcagacaagcccaatggcatgaaacggtccccctcagccactgggcagagttctttccgatccacggccctcccggaaaagtctctgagctgctcctccagcttccctgaaaccagggccggagttagagaggcctctgcagccagcagcgacacctcttctgccaaggccgccgggggcatgctggagcttccagcccccagcaacagggaccataggaaggctcagcctgccggggagggccgaacccacatgacaaagagtgactccctgccctccttccgggtctccaccctgcctctggagtcacaccaccccgacccaaacaccatgggcggggccagccaccgggacagggctctctcggtgactgccaccgtaggggaaaccaaagggaaggaccctgccccagcccagcctcccccagctaggaaacagaacgtgggcagagacgtgaccaagccatccccagccccaaacactgaccgccccatctctctttctaatgagaaggactttgtggtacggcagaggcgggggaaagagagtttgcgtagcagccctcacaaaaaggccttgtaacggggagggcccaggggcaggactgtggagacccgtcctgaacgggcgactgtgtcttgactacctttcaaaaccagcactgtgtgggaatgtccgccaggcagagctcggagcctcattgagacaggggagagagaaagacaaagaggggaccttcttccagatgccttcccagttgtaaccggtaaaactgttaccagatagtgtttgtac

SEQ ID NO: 22267 - DNA, 5402 bp, Homo Sapiens
gccggttcccaggccgggtggagaccaactctggggtctcttggtgggagagtggggagcccgtcttctgctgagtgctgccgccccttcccaggacagcggaggtggaacttcgtcgcgctgcaacccccggctcgggatcctggggcgtcctttggcagttgattgcaccctgcactagagagaagtccaggaatgatatattcttgggctgtatttctctaccctggagttcatccagttcatcccagaaacactgacctgattactgtgacaaagtctgatggatagaccctttctgttgaccttgtggcgtttttctttcatgtggaagttggaagacaaggtgaaaggggccaaaagttacctgctttggtgaataggagtgctctacttggttctcagaacatgggccctcgtttaaagctgcagctgtgatcctcggctgtctgttggcattgacgggacctgatgttttacgttattggtggaatcacagtgtctgtggttgcattcttcttcacaattaagttcctctttgagcttgccgcacgtgtagtcagcttcctccagaatgaggaccgcgagcgccgaggggaccggactatttatgactacgtgcggggaaattacctggatccccggtcttgcaaagtctcctgggattggaaggacccctatgaggtgggccacagcatggccttccgagtgcatttattctataagaacgggcagcctttccctgcacatcggcctgtgggactaagagttcacatctctcatgtcgagctagcagtggaaattccagtgacccaggaagtccttcaggagcccaattccaacgtagtaaaagtggccttcactgtgcgcaaggctgggcgttatgaaatcacagtgaagcttggtggattaaatgtggcatatagtccctactacaaaatttttcaacctggaatggtggttccttctaagaccaaaattgtgtgccacttttctactcttgtattgacctgtgggcagccgcacacccttcaaatagtaccccgagatgagtatgataatcccaccaacaattccatgtccttgagagatgagcacaattacaccttgtccattcatgagctcggccctcaagaagaagagagtactggtgtctcatttgagaaatcagtaacatccaacaggcagactttccaggtgttcttgcgactcaccctgcattctcgaggctgcttccatgcttgcatttcataccaaaatcagccaatcaataatggtgaatttgacattattgtcctaagtgaggatgagaagaatatcgtcgaacgcaatgtgtccacttcaggcgtgagcatttactttgaggcttatctttataatgctaccaactgtagcagcactccatggcacctgccacccatgcacatgacctcttcccagcgccggccatccactgctgttgacgaggaagatgaagactcgccctctgagtgccacacccctgagaaggtgaagaaaccgaagaaggtgtactgctatgtgtcaccaaagcaattctcagtgaaggagttctacctgaagatcatcccctggcgcctttacaccttccgagtgtgtccaggaacaaaattttcataccttggtcctgaccctgtccataagctgctcacactggtggtggatgatggcattcaacctcctgtggagctcagctgtaaggagaggaacattctagcagccacttttatccgctccctgcataagaacataggaggctctgagacctttcaggacaaggtgaactttttccagcgagagcttcggcaggtacatatgaaaagaccacattccaaagtcaccctgaaggtcagcagacatgccttgttggaatcgtctctgaaagccactcggaatttctccatctcagattggagcaagaactttgaggttgttttccaggatgaagaagctctggactggggagggcctcgccgggaatggtttgagctaatctgcaaagcactatttgataccaccaatcagctcttcacccggttcagtgacaacaaccaagcattagtgcatcccaaccctaatcgccccgctcatctgcgcctgaaaatgtatgagtttgcgggacggctcgtgggcaagtgtctctatgagtcctctctaggaggagcctacaagcagttggtccgagctcgcttcacccgctctttcctggcccaaatcataggactgcgtatgcattacaagtactttgaaacagatgacccagaattctacaaatctaaagtttgttttatcctcaacaatgacatgagtgagatggagctggtctttgcagaagagaaatataataaatcaggtcaattggataaggttgtagaactcatgacaggtggagctcaaactccagtcaccaatgcgaataaaatcttctatttaaatttgctggcccaatatcggctggccagtcaagtgaaagaggaggtggaacatttcctaaaaggcctgaatgaattggtccctgagaaccttttggctatttttgatgagaatgagcttgagctgctgatgtgtgggactggagacatcagtgtgtctgacttcaaagcccatgcagtagttgttggtggctcatggcatttcagagaaaaggtcatgaggtggttttggactgtggtttccagtctgacccaggaggagttggctcggctacttcagttcacaacaggctcctctcagctaccacctggaggctttgccgccctctgtccctcatttcagattattgccgctccgacccatagcacgctgcctactgcacacacatgttttaaccagctgtgcctccctacatatgactcctatgaagaggtgcacaggatgctgcagctggccatcagcgagggttgcgagggctttggcatgctctgaccactctcctgtcatccagttggctcccatgctctctggagcttctgggcgcaagttacagacatcataaccactgatcctaacacacataaccatcagccagaagatgccgcatgctcccctgtgtctggaggattttgtcacctacaagccttgtctttacctcacctgctccctgcccatatctaccacaggccactttggcatggtatgtaagctgagctcttcattctgtcatgagaagaggaccatgctgctatcatttatttggtcctttgaagatctcagtagctgagggagatggcacacggggctcagccctgttgggaaactggtgtggagacccttaaatccacactgtgctccaaaactccctctgctgatactccttggagacaccctctttggccctcactacttgaccagactggtacttgagtccttctcatgggtggggtgattgcctcttctcatcaggagccaggagagagggggacagataggaggtggcccataggagcagtcccgctgcacaatggtaggcataggccatggcactggactgcctctaaggactgctaaaaagaatatttttttgtggtgtcagaactggaaaaagcactttcccttcgggcatttctggaaatgattattaatcacaaagaagaactctgtaagctttttcttgaattgtagccagtgagaaaagcagatagactgaagaatatgaaggatagctgagctgtagcctccagagtggggcatgcctaggcatatggctggcttggagactactgatgcttttccctgagtttgttattggcactgaagtatggccggcttgggccactgacttccccattatgtagtctgctaaaagctggggatcctttagcattctactgaagaaaattttgtagcaaaagattagaacagtaagaatagtatgccagcaatccctgattctctctctgcttggtgttctctggcagcactaagacaaaggaacagggactaggagtttacgtgcttatcacaggtccttggcgtcaggacactagggatgaacatggaggtgatatgttacacagtaaacacctgccaacccctgtactcccctttgctccatcagttatcaggaaggagaactaaggagggaggaagcttattaggttcactgttgaatgatgattgaagagtacctgctgctgtatcttggaagatgacaacatcctttttcattactgtttgattgaaaataatttcaagattcaaaatctcattgacttcccaaatttgtgtttttaagaaggctttgctgcaagctaccattcccaatggggcagtcaactctgagaatattacaagccatctttattgccaaaaccagcaagtacacagagtcctgaaacaaggcaggactttggcaatgccttggcctcctggaagcatgtctgagccctcctgttcgcagggatcatgaggaacaagccctcctgagctgctacagttcctgcctgacctcagtctttcgcagtcatcatttgtcctttcttggcacatgggtgctgacctcactcatccttggggtccgggatccagcatcagggtctctataccccaggatcctccatgccacatggtcactgctctcctcagggaccaggacaaggtgctgctgcttgcccaaatgttttcccatgggatatgtaccggaaggtttatcaccaccctgggaaacataatgctgccccttgggcccagaaaggggtttccagctgggggcacgtggactggttctgctgtttttggcagtcgcttttctgaattctcccctccggcagccttccagagactgatcctggagattgagttgattgtcttggctagacctgtcattttaagctctagtcatagcactttttcagagcatcttaggcaccattgcaacccaaccagggaagctgcatccctgtggtggtccttaggcaccagtctttgttaaacaaaaccctttggcactattgtggttttctattctctgtctgaactctattcaaaagtatctttgctctcttgggccttttcttttactgttttgttttttttttctaatcctgctttcatactagccagtgtggggaaaaggtacaatatgtcaaagagatgagagagtgttatttcttgggcaattttctattagtgtttcttattttggccagttcttttatttatgtccttgtgacccaggtacttggggggccagctacccttctggccttttagcgtctttgaaggagaccagacatgagtgaatacctaggagagtgtcagcatgtttctggaaaattggcagagaccaagccctgctgcagattcgtcaggccaggtgaaagggccaggcagttgcagctgatgatgtaaatattttgtacagtagataaataaatgtttaaaag

SEQ ID NO: 22268 - DNA, 6227 bp, Homo Sapiens
gggagagaaaggagggatgaagccgcctgcccactggacgggagggctgcagccagagcttcagggtagccctgctggatgggacagcactgagggctggacctggggggatggagaacatgggctgggggcagcagccatgcctacctggggggcccgccccgcgtccccagatcgctttgcggtgtctgcggaggctgagaacaaggttcgggaacagcagccccatgtggagcgcatcttcagcgtgggggtgagcgtccttccgaaggactgtccggacaacccccacatctggctgcagctggagggccccaaggaaaacgccagcagagccaaggagtacctgaagggcctctgcagcccagaactgcaggatgaaatccactacccgcccaaactgcactgcatctttctgggagcccagggcttcttccttgactgcctggcctggagcacgtcagcccatctggtgcccagggcgccaggctcactgatgatcagtggcctgactgaagcctttgtcatggctcagagccgggtagaagagctggcagagcggctgagctgggacttcacgccaggaccatcttccggagcctctcagtgtactggagtgctgagagacttctctgccctgctgcagtccccgggggatgcccatagagaggctctgttgcagttgcccctggctgtccaggaggagctgctgagtctggtgcaggaggcgtctagtgggcaggggccaggagcactggcttcttgggaggggcggagctcagccttgctgggtgctcagtgccaaggagtgagagctccccctagtgacggcagggagtccctggacactggatctatgggacccggagattgcaggggagcaaggggagacacttacgctgtggagaaggagggagggacacagggtggtcccagggagatggatttggggtggaaggagttgcctggggaagaggcgtgggagagagaagtggccctcaggccacagtcagtgggtggaggggcaagggagtcagcacccctgaaagggaaggccctggggaaggaggagatagctctgggaggaggagggttctgtgtccaccgtgagcctcccggtgcccatggctcctgtcacagggcagctcagtcccgaggagcctccctcctccagcggctccacaatgggaatgcctctcctccgagggtgcccagccctccacctgcaccggaacccccatggcactgtggagaccggggtgactgcggagaccggggagacgtgggggacaggggagacaagcagcagggcatggcacggggtcgggggcctcaatggaaacgaggcgcccgagggggcaacttggtgactggcacacagcgtttcaaggaggccctgcaggatcctttcaccctgtgccttgccaatgtgcctggccagccagacctccgccatattgtcattgacggcagcaacgtggccatggtgcatggcctccagcactacttctccagccggggcattgccattgctgtgcagtacttctgggaccgtggtcaccgtgacataactgtctttgtgcctcagtggcgcttcagtaaggatgccaaagtcagagagagtcacttcctgcaaaagctgtattccctcagcctgctctccctcacaccctcacgagtcatggatggcaagaggatctcctcctatgatgacaggttcatggtgaagctggctgaagagacagatgggataattgtctccaatgaccagttccgggacctggcggaggagtctgagaagtggatggcaatcatcagagaacgcctgctgccctttacctttgtgggaaacctcttcatggtacctgatgacccactggggcgaaacggccccaccctggatgaatttctgaagaagccagccaggacacaggggtcttctaaggctcagcatccttccaggggctttgcagaacatggtaaacagcagcaggggagagaagaggaaaaaggtagtggtggcattcggaagacccgggaaacagagcggctccggcggcagctgctggaggtgttttggggtcaggatcacaaagtggacttcatcctgcagcgggagccatactgccgggacatcaaccaactgtctgaggccctgctcagtcttaacttttgagcctcacctgcttgagtggctgccgccctgtcagctccagccgcctccagctcagccctttctgtgagagtccctctgctgctcactctgatccagaggcaccctgagttggtgctttggatcagggaagccactttgggacaggtccataaagtgaactgatcttaccgagtcaggacctcagccagctctcaagaggttctgctcagccttaacttctcaactttgccttagcacagggtttctgtagggagtgggggctgctagaggggattagttccggagactgagactgttggctccacctccaagctgagctagggtggagggcagggtgggcaggaagtgacaggaagttaagctgttcctctccctggctgctgctctggatggccagagaacaagatgctcccttgctgagctcctgggagcgtggaaggagatgctaggccctggcacagtgttatgtggactgggccacgatagggtggagtgagctagtgaagaaggcagagggagacttggcttctggtctcagctatgcctgttttgtgaccttgattgagttgcttgggctttacttctgcctacaaatcaggggtaaaaatacctgttgggaggagaaatgagaacatagaggaaagcctcttggaggaaaggtgcttggaccaagtctcaggtgtgtctgcctgtggctgcacaggctctctaaccgaaacctcactttcagagagatgtgggtcctttgtctccaggatccacaccctagattttaacactgcattctcactataacatgccctataatggctgcatcccttttgagcaacctccaaaatctacatttacacagtaggtaaattagggatgactgcattatcaaaatactctcagggttcctataaatggcagctctcctgttgtattcaggtgttgtttacagactaacaaatgtgttggcaaatccctggttagatgcacttcctggtgttgagatgaacacgtcgatttttcaccaatcgatgaagccatgctctgcaatgacaatattaatgtgatccgaccctaacattttctctatggaagacgtatgttgcataaagcaaggcacacttctgctttatgtgtgtgtgtatggggatgggaggacttaacggaagttgaaccagttggttctagatgaaccaattatctggaaaatgaaagaaccagagttggaaggcacttgactggccaccagaccaactctgctgttactgacatgctttcttcaccctgattcctagaggtcattgccctggatctgcttgaagtcctcctgtgccagggaatttactatctccagggtagcacattccctgtgtagacggtattaatcagtactccttactttagtgcagcctaaagtatgcttttctgttacatccacctttgaggctggtcatacctccaggaacaatacagagccagtcaacttcctggaatccaagaccagataaagaagtaggacaggtgcccctgggttctgttctgtgtgggcctgtggggagtctctagacaagatcttttccaggccctgacttctgcctccctctgagtggcacagggagttgaatactgcatggcgagtgtaatgatgatggggagggtccttgtgtcctcaccccttcctttttggtgatttacaccactgtaccatactgacccaggctgggggcaggtgtgttggagacaggctggtcaaagaggtgacaatgattaagagataacccagtggtccctgagaagagattggttagtatggcctgaactggtggctgggggaactgtgtctggtcaagttatggcagatgtcacagctttaggtaggtaaaaagggtcctagatgaaaaccttggagtttttttttttcctgatagggttgtttatacttcttgattggtttcttgccattttcactttcagtgatggtgggtgtgcagtagaccaaaagtgtcttctgcccttttgtgctaagggccctggttgactgagtggccccagtcagatgagaggcaagtcctaagcttcttatagacagggatgttgactttgttctgctgcagcctgataaactgggaccactgtgtggttagtaatgcacttgccatttggtgacacagactgaaggctatcctacacctgggccttacctcttcctctactggcatcctaatggcactctgacagcatccagggtgactacagggcccattggaaatggatcatcattctctcttctagtgtctatctttatcataacctgatgtcccaaacttgtgacaagttcttttggcaactgaaggaccaagaagggaaacggtgatgagagagactgcccattataactttcaaaaccccgtctttggggaagaatcatctagggtgacattccttgaagtaaatcccaggagaatctaggccaaagagatgagccaaggttagtgagacaatttatttttattgcctaaactgcagagcattctctacacagcgtaaaggagaagtggggcagctgcaggacatgtagagaaaccaaaccgggaaatcttacaaggagttgaaaagattaatgtcccaacctgatgagattacggccttgagacaataaggtggagcaacagaacaatgggaaagaggactgggagaggaatctaagaaccagatggcttcagctctctagaggagctgagcctattcacagtgcctaacctggaagcctgtgaggaacaggcctcaggcccttgccatgacctacttaggctacaatttcctttaaggcagcccctagctctgggaaggaatactggtagccagtggccagtgttcgccgtgggatcaccttctggccctccagcagcatgatggcacgctgtcgcccaaagacagcttgcaccacagcgctggggagagggatgaaggctcggcggcccagggcagcaccgaaggtctgggcaaactcagcattagtggcggaggatggagccactccattcaggaccccgtgcacgtggtttgcttcaagggcatgggtcaggattcctgccaggtccccgatgtgtatccaggggaagaattggtggcctgagccgatggggccccccaggcccaggcgaaagggcagcagcatgtggcccatggcaccacccccacggcccagcacaacccctagagcaggaaagagggaaggtacaggggtcttctcagccttgaaggagcccactgctcctcctggtttctgtttccccttcctcactctccccatgctgacttggctctgtaacagaagtgagcagtatggctgtctttaagacctcacaccttctcatctgcaggttggctagaagtggtggcatcctctcactctgtaattgtaatctcagctctcctaatcccatcacttccccagcccagagaagacattccaaccctgtctgatacccaggcccgtttctcacctgagcgcaccaccacctggcgtgtagaatctccaggaagcctggctgcagcttcccatttggttacgaggttggagaaaaagtcaaagtcccctcctgggctgtcttcatcatactccgcagtcagactgggctggtagtaagctgccggtggaacacaatcatttgccctgggtgtccttggtcctgcctggctctctgtagtggaggctccccttggcatcaccttctctggcccttaggatctccccatttggagacagagccatttggatattttccccttgaacttctccatgacctgaagcgttccttccctggaggaactctttggttgcagggctaaacttagaggctgctagagtgtagtggttaagaacaggaacttgggtaccaggcgcctgaattttaatcagctccctcatttattaactctctgacttgatgcaagttacttaacctctctgtatagaattttcacatctttaaaatgggaataatagtacctacctcatagggttgttgtaaggaataaatgataataagcataaaac

SEQ ID NO: 22269 - DNA, 6720 bp, Homo Sapiens
tcaaagtaaaggtattctaaagatttcagctgtccctgaactaactgatgtgaatactggaaaaccagtatctctctctagttcttattttcacagagagaaatcgaatattttcagtccacaggaattgccaggtagtcatgtaactgaagatgtgctgaaggtttcaacaattcctggaccagctggccagaaaacagtattaccaacagctcttcctagttccttttcacatcgagagaaaccagatattttctatcaaaaggatttgccagatagacatctaactgaagatgctctaaagatctcaagtgctcttgggcaagctgatcaaattaccggattacaaacagttccctctggtacttactcacatggtgagaatcacaagcttgtttcagaacatgtccaaaggctaatagataatttgaattcttctgactccagtgttagctcaaataatgtgcttttaaattctcaggctgatgacagagttgtaataaataaaccagaatctgcaggttttagagatgttggctctgaagaaatccaggatgcagaaaatagtgctaaaactcttaaggaaattcggacacttttgatggaggcagaaaatatggcactgaaacgatgcaattttcctgctccccttgcccgtttcagagatattagtgatatttcatttatacaatctaagaaggtggtttgcttcaaagaaccctcttccacgggtgtatctaatggtgatttgcttcacagacagccattcacagaggaaagcccaagcagcaggtgcatacagaaggatattggcacacagacgaatttgaaatgccggagaggcattgaaaattgggagtttattagttcaactacagttagaagtcctctacaggaagcagagagcaaagtcagtatggcattagaagaaactcttaggcaatatcaagcagccaaatctgtaatgaggtctgaacctgaagggtgtagtggaaccattgggaataaaattattatccctatgatgactgtcataaaaagtgattcaagtagtgatgccagtgatggaaatggttcctgctcgtgggacagtaatttaccagagtctttggaatcagtttctgatgttcttctaaacttctttccatatgtttcacccaagacaagtataacagatagcagggaggaagagggtgtgtcagagagtgaggatggtggtggtagcagtgtagattcactggctgcacatgtgaaaaaccttctgcaatgtgaatcctcactgaatcatgctaaagaaatactcagaaatgcagaggaagaggaaagccgggtacgagcacatgcctggaatatgaagttcaatttagcacatgattgtggatactccatttcagaattaaatgaagatgacaggaggaaagtagaagagatcaaggcagagttatttggtcatggaagaacaactgacttgtccaagggtttacagagtccacggggaatgggatgcaagccagaagctgtatgtagtcacattattattgagagccatgaaaagggatgtttccggactctaacttctgaacatccacaactagatagacacccttgtgctttcagatctgctggaccctcagaaatgaccagaggacggcagaacccatcatcatgcagagccaagcatgtcaacctttctgcatccttagaccagaacaactcccatttcaaagtttggaattccttgcagttaaaaagtcattccccatttcagaactttatacctgatgaattcaaaatcagcaaaggtcttcgaatgccattcgatgaaaagatggacccttggctgtcagaattagtagaacctgcttttgtgccacctaaagaagtggattttcattcttcatcacaaatgccgtccccagaacccatgaaaaagtttactacctccatcactttttcatctcaccgacattctaaatgcatttccaattcctctgttgttaaggttggtgttactgaaggtagccagtgtactggagcatctgtgggggtatttaattctcatttcactgaagaacaaaatcctcccagagatcttaaacagaaaacctcttccccttcatcatttaaaatgcatagtaattcacaagataaagaagtgactattttagcagaaggtagaaggcaaagccaaaaattacctgttgattttgagcgttcttttcaagaagaaaaacccttagaaagatcagattttacaggcagtcattctgagcccagtaccagggcaaattgtagcaatttcaaggaaattcagatttctgataaccatacccttattagcatgggcagaccaagttccaccctaggagtaaacagatcgagttccagactaggagtaaaagagaagaatgtaactataactccagatcttccttcttgcatttttcttgaacaacgagagctctttgaacaaagcaaagccccacgtgcagatgaccatgtgaggaaacaccattctccctctcctcaacatcaggattatgtagctccagaccttccttcttgcatttttcttgaacaacgagaactctttgaacagtgcaaagccccatatgtagatcatcaaatgagagaaaaccattctccccttcctcaaggtcaggattctatagcttcagaccttccgtctcccatttctcttgaacaatgccaaagcaaagcgccaggtgtagatgaccaaatgaataaacaccattttccccttcctcaaggtcaggattgtgtagtggaaaagaataatcaacataagcctaaatcacacatttctaatataaatgttgaagccaagttcaatactgtggtctcccagtcagccccaaatcactgtacattagcagcatctgcatctactcctccttcaaatagaaaagcactttcttgtgttcatataactctttgtcccaagacttcttccaagttggatagtggaactttagatgaaagattccattcattggatgctgcttctaaagcgaggatgaatagtgagtttaactttgacttacatactgtatcttcgagatcactggaaccaacctccaaattattgaccagtaaacctgtagcacaggatcaagaatctttaggttttctaggacctaaatcttcactggatttccaagtcgtacagccttctcttccagacagtaacactattactcaggacttgaaaaccataccttctcagaatagccagatagtaacctccaggcaaatacaagtgaacatttcagatttcgaaggacattccaatccagaggggaccccagtatttgcagatcgattaccagagaagatgaagaccccactttctgctttctctgaaaaattgtcatctgatgcagtcactcagataacaacagaaagtccagaaaagaccctattttcatctgagatttttattaatgctgaagatcgtggacatgaaattatagagcctggtaaccagaagctacgcaaagctcctgtcaagtttgcctcatcatcttcagtccaacaggttactttttctcgcggcacagatggccagcctttattattgccatataagccttctggtagtaccaagatgtattatgttccacaattaagacaaattcctccatctccggattccaaatcagataccaccgttgaaagctcccattcaggatccaatgatgccattgctccagacttcccagctcaggtgctaggcacaagagatgatgacctctcagccactgttaacattaaacataaagaaggaatctacagtaagagggtagtgactaaggcatccttgccagtgggagaaaaacccttgcagaatgaaaatgcagatgcctcagttcaagtgctaatcactggggatgagaacctctcagacaaaaaacagcaagagattcacagtacaagggcagtgactgaggctgcccaggctaaagaaaaagaatctttgcagaaagatactgcagattccagtgctgctgctgctgcagagcactcagctcaagtaggagacccagaaatgaagaacttgccagacactaaagccattacacagaaagaggagatccataggaagaagacagttcccgaggaagcctggccaaacaataaagaatccctacagatcaatattgaagagtccgaatgtcattcagaatttgaaaatactacccgttctgtcttcaggtcagcaaagttttacattcatcatcccgtacacctaccaagtgatcaagatatttgccatgaatctttgggaaagagtgttttcatgagacattcttggaaagatttctttcagcatcatccagacaaacatagagaacacatgtgtcttcctcttccttatcaaaacatggacaagactaagacagattataccagaataaagagcctcagcatcaatgtgaatttgggaaacaaagaagtgatggatactactaaaagtcaagttagagattatccaaaacataatggacaaattagtgatccacaaagggatcagaaggtcaccccagagcaaacaactcagcacactgtgagtttgaatgaactgtggaacaagtatcgggagcgacagaggcaacagagacagcctgagttgggtgacaggaaagaactgtccttggtggaccgacttgatcggttggctaaaattcttcagaatccaatcacacattctctccaggtctcagaaagtacacatgatgatagcagaggggaacgaagtgtgaaggaatggagtggtagacaacagcagagaaataagcttcagaaaaagaagcggtttaaaagcctagagaaaagccataaaaatacaggcgagcttaaaaaaagcaaggtgctttctcatcatcgagctgggaggtctaatcaaattaaaattgaacagattaaatttgataaatatattctgagtaaacagccaggttttaattatataagcaacacttcttcggattgtcggccctcagaggagagtgagctgctcacagatactaccaccaacatcctttccggcaccacttctactgtcgaatcagatatattgacccaaacagatagagaggtggctctgcacgaaaggagtagctctgtttccactattgacactgcccggctgattcaagcttttggccatgaaagagtatgcttgtcacccagacgaattaaattatatagcagcatcaccaaccaacagaggagataccttgagaagcggagcaaacacagcaagaaagtgctgaatacaggtcatcccctagtgacttctgagcacaccagaaggagacacatccaggtagcaaaccatgtgatttcttctgactctatttcctcttctgccagtagtttcctgagctcaaactctactttttgcaacaagcagaatgtacacatgttaaacaagggcatacaagcaggtaacttggagattgtgaacggtgccaaaaaacacactcgagatgttgggataactttcccaactccaagttccagcgaggctaaattggaagagaacagtgatgtgacttcttggtcagaagaaaaacgtgaagagaaaatgctctttaccggttatcctgaggacagaaagttaaaaaagaacaagaagaattcccatgaaggagtttcctggtttgttcctgtggaaaatgtggagtctagatcaaagaaggaaaacgtgcctaacacttgtggccctggcatctcctggtttgaaccaataaccaagaccagaccctggagggagccactgcgggagcagaactgtcaggggcagcacctggacggtcggggctacctggcaggcccaggcagagaggctggcagagacctactgaagccatttgtgagagcaacccttcaggaatcgcttcagtttcacagacctgacttcatctcccgctctggggagcggataaagcgcctgaagttaatagtccaggagaggaagctgcagagcatgttacagaccgagcgggatgcactattcaacattgacagggaacggcagggccaccagaatcgcatgtgcccgctgcccaagagagtcttcctggctatccagaagaacaagcctatcagcaagaaggaaatgattcagaggtccaaacggtaagaccaagaaaacaagagtacgtatacaagtgtaaaccaggccaccaagtggtcgggagctctggcttgcacccagaataaatgtattatactcaagtttaaacattatgagaaagttgtgagagtcatttctcacttatggcactgaaaaaaaaaaaagcacatcatggtatgaatgactcatatgcaaaagatgaaaaacttctcactaatttgcatgtcttaggctcctctttattagaaacctaaatgtaaataaagaatattttaggccaggtacggtggctcatgcctgtaatcccagcacttagggaggccgaggtgtgcagatcacatgaggttaggagttcgagaccagcctggccaacatggtgaaactccatctctactcaaaatacaaaaattagctgggtgtggaggcacacgcctgtaatcccagctactcagtaggctgagccgggaggatctcttgaacctgggaggcagaggttgcagtgagcttagatggtgccactgtactccagtctgggcgacagaacgagactccatctc

SEQ ID NO: 22270 - DNA, 6263 bp, Homo Sapiens
catcagcgggcgggggtgtcgccgaacaggctgctccgcagagcccgccgcgaccccgcgccgccccgccccgcggcctgcctgccagaggagccgagggggccgcccctcgcccaacctgcccgacatggggaaccccgggcccaggcgtgctggtcaccatgacaacagagacaggccccgactctgaggtgaagaaagctcaggaggaggccccgcagcagcccgaggctgctgccgctgtgaccacccctgtgacccctgcaggccacggccacccagaggccaactccaatgagaagcatccatcccagcaggacacgcggcctgctgaacagagcctagacatggaggagaaggactacagtgaggccgatggcctttcggagaggaccacgcccagcaaggcccagaaatcgccccagaagattgccaagaaatacaagagtgccatctgccgggtcactctgcttgatgcctcggagtatgagtgtgaggtggagaaacatggccggggccaggtgctgtttgacctggtctgtgaacacctcaacctcctagagaaggactacttcggcctgaccttctgtgatgctgacagccagaagaactggctggacccctccaaggagatcaagaagcagatccggagtagcccctggaattttgccttcacagtcaagttctacccgcctgatcctgcccagctgacagaagacatcacaagatactacctgtgcctgcagctgcgggcagacatcatcacgggccggctgccatgctcctttgtcacgcatgccctactgggctcctacgctgtgcaggctgagctgggtgactatgatgctgaggagcatgtgggcaactatgtcagcgagctccgcttcgcccctaaccagacccgggagctggaggagaggatcatggagctgcataagacatatagggggatgaccccgggagaagcagaaatccacttcttagagaatgccaagaagctttccatgtacggagtagacctgcaccatgccaaggactctgagggcatcgacatcatgttaggcgtttgtgccaatggcctgctcatctaccgggaccggctgagaatcaaccgctttgcctggcccaagatcctcaagatctcctacaagaggagtaacttctatatcaagatccggcctggggagtatgagcaatttgagagcacaattggctttaagctcccaaaccaccggtcagccaagagactgtggaaggtctgcatcgagcatcatacattcttccggctggtgtcccctgagcccccacccaagggcttcctggtgatgggctccaagttccggtacagtgggaggacccaggcacagactcgccaggccagcgccctcattgaccggcctgcacccttctttgagcgttcttccagcaaacggtacaccatgtcccgcagccttgatggagcagagttctcccgcccagcctcggtcagcgagaaccatgatgcagggcctgacggtgacaagcgggatgaggatggcgagtctggggggcaacggtcagaggctgaggagggagaggtcaggactccaaccaagatcaaggagctaaagccggagcaggaaaccacgccgagacacaagcaggagttcttagacaagccagaagatgtcttgctgaagcaccaggccagcatcaatgagctcaaaaggaccctgaaggagcccaacagcaaactcatccaccgggatcgagactgggaacgggagcgcaggctgccctcctcccccgcctccccctcccccaagggcacccctgagaaagccaatgagagagcagggctgagggagggctccgaggagaaagtcaaaccaccacgtccccgggccccagagagtgacacaggcgatgaggaccaggaccaggagagggacacggtgttcctgaaggacaaccacctggccattgagcgcaagtgctccagcatcacggtcagctctacgtctagcctggaggctgaggtggacttcacggtcattggtgactaccatggcagcgccttcgaagacttctcccgcagcctgcctgagctcgaccgggacaaaagcgactcggacactgagggcctgctgttctcccgggatctcaacaagggggcccccagccaggatgatgagtctgggggcattgaggacagcccggatcgaggggcctgctccaccccggatatgccccagtttgagcccgtgaaaacagaaaccatgactgtcagcagtctggccattagaaagaagattgagccggaggccgtactgcagaccagagtctccgctatggataacacccagcaggttgatgggagtgcctcagtggggagggagttcatagcaaccactccctccatcaccacggagaccatatcgaccaccatggagaacagtctcaagtccgggaagggggcagctgccatgatcccaggcccacagacggtggccacggaaatccgttctctttctccgatcatcgggaaagatgtcctcaccagcacctacggcgccactgcggaaaccctctcaacctccaccaccacccatgtcaccaaaactgtgaaaggagggttttctgagacaaggatcgagaagcgaatcatcattactggggatgaagatgtcgatcaagaccaggccctggctttggccatcaaggaggccaaactgcagcatcctgatatgctggtaaccaaagctgtcgtatacagagaaacagacccatccccagaggagagggacaagaagccacaggaatcctgacctctgtgaagagatcctggcatttctggtccaacccaagccagagaaccattaagaaggggccttcattctggattctccgacgcaacactgacgtcccagctgcgacgtactgtcactgatgagagactgggaagggaaaagcatatatatatagatatatagagatatagatatatatacaggaaacaccgcatccttgcactgctgctggggctggcagagcagttggctgacagcaacaaccgacatctgaacacctacatttcctttgcagacaaattgaagaactggtgggatttttttcaagaaaaaaaattatataataactataatcccttgctcacccctttcccccgccaaataagaaacgcaagccagaccacgatgattgtagaagtccctcccgccctggttctgcacgttacagttagcagacgagcaattccatttgttcttctccagcatctctaaggcccacttgaatgcaaaggaaaacacttgcacagcaaagcaagagaagtcacagcagcaagacacgcacagtcaaccattttccgagaaaaaaagaaaattccccacttggaaagaaagaggaggaacactggattcttactttctggatcttgacactgggctgcaaaacctaccttcctctctcccgcctcccctcaccctcaactctcaatgtcttgctgtcattttctgtctcggctccctcctcccccttcccccttcccccaccccacacccttcaccctctgtgtcctggtccttctgagggccactgcagatgactctcctttgaaatgagaaaaagaaaagaaagcaagaacagaaaacgaagccacaggaagggaagtagacattgtatgcttatggtttctcattatgaaggtgcagcttgtaggaggtttgtacggatgtgctttgaagttatgtatattacatataacaggaaaaaatattaataaacagtgctggtaagtatgaagctgacattctaaaattataattatctgactgtgattgatgtatcctgaggttcctagatctcactgaactggcccagctaaggagacctggactctgggtgtgggttggctcacagtaggggctgacgggttcagtgtagtaatactgtgtgtggtgtttgtaattggttgattggtggggaggggtggggggccctaatggagaggtgtgggtttggcaagaaagaagcaacacagatgtcgtccccaaaatgccagttcaagacaccttctccctgcccccctggtagtaacagtcagggcctggtctgtgctcaggtactgggtcccagtctgggactctgctgctgaagttgccacagtagaggtccctggcttagtccttatctccctacggggcttgccttggttttcagtcttctctctctttctctcttttttttttttttgccacattctgcccttccctgaccccattgtaataaccaactccatatccaaagggaggtggtgctctcagccattgtagaagatggtggctttaacctgactgtctaaaaattcccagctaagccttttcctctactctcttccttgttctgaatcatttcttcttctcaggccaaagtagccatggtaaggaggcttcatggggcagaccctgaaagatcaaaactgcatttgcaaagccctcccctgtcccaggacaaagctgagactgacgggtgatgttgctcataggctccagctctgcataagaccttggcttggagacctccctctcagtcaacagctgaactctgagcttgtgcccagaaattaccccaagaccacaggaacccttcaagaagctcccatcacaagcttggcattgctctctgccacacgtgggcttcctcaggcttgtctgccacaagctacttctctgagctcagaaagtgccccttgatgagggaaaatgtcccactgcactgcgaatttctcagttccattttacctcccagtcctccttctaaaccagttaataaattcattccacaagtatttactgattacctgcttgtgccagggactattctcaggctgaagaaggtgggaggggagggcggaacctgaggagccacctgagccagctttatatttcaaccatggctggcccatctgagagcatctccccactctcgccaacctatcggggcatagcccagggatgcccccaggcggcccaggttagatgcgtccctttggcttgtcagtgatgacatacaccttagctgcttagctggtgctggcctgaggcagggcaggaaatcagaatagcatttgcttctctgggcaaatgggaagttcagcggggcagcagaatcagtggcattccccctggtgcaggccggtgggtccactccaactccccctgagtgtagcagcacactttccatacaccaggttctttctacaatcctggtggaaaagccacagaaccttcttcctgcccttcttgagagttccccctctttctgggtcaagagctggagtggtggctccatcctctctgggccacttcggtctaggaactcatctttgcaggaaccaggagtcctgagcacactgaacacacctcagagggaggatccttgttgtggattttgcacctggctttggggcaggggtgaagtgaccaggcttagcttgtggagtttatgggccaccagggtttggggaaatcaccatcccgcggatgctgtgacctcccttctacggagatgcaggcagtgccacgagggaggaggggacctgcaaagctagaatctagggcactgtttcctccccatccttctctttgtagagaatagagacgtttgtcttgtctgtcttcaacctacttttccttttctcttttttgtttctcatcctctctgtgccacctctccacccaggaggccatgtagcatagtggaaaaagtccctgagggcggttaggagttctgggtgaccatcctggctcagctcctaactcaccatgtgacatcaggctatccccattccccctcttgggcctcagtttcccgacttgcaaaataagcagaaagaaccagatgctctccagggtctttttctactttgctatctcatgggtcttcattttctcttattttgttttctctggatcttttccatctgagggtacaggaagtaccaggacctgtttcagtttttgaatcctgcaagcacattccaagactggcctgaaactgcatgagcaacatcactcgaaataattttttttttcaaaagcaccttaacaaccaattgcgatgctgtcctgttcctttttactcacacccttctctcctttctcgtccccatgctcccccacctcagtgctccgtgctgtatgcgtgtgctctctgttcttgtatactcaatataagtgaaataaatgtgtttgatgctgaaccat

SEQ ID NO: 22271 - DNA, 5721 bp, Homo Sapiens
gaaacttcatggccacagccccaggccctgctggcattgccatgggcagcgtgggcagcctgttggaacggcaggacttctcccctgaagagccgcgggcggcacttgccgggtctcggggctcccgccagcctgatgggctcctccggaagggcttgggccagcgtgagttcctcagctacctgcacctccccaagaaggacagcaagagcaccaagaacaccaagcgggcccctcggaacgagcctgccgactatgccaccctctactaccgggaacattctcgcgcgggtgacttcagcaagacctcgctgccagaacggggtcgctttgacaagtgccgcattcgcccctcagtgttcaagcctacggcgggcaacgggaaaggcttcctatccatgcaaagcctggcgtcccacaaaggccagaagctgtggcgcagcaatggcagcctgcacacgctggcctgccacccgcccctgagccccgggccccgggccagccaggcccgggcacagctgctgcacgccctcagcctagatgagggcggccctgagcccgagcccagcctgtccgactcctccagtgggggtagttttggtcgcagtcctggtactggccctagccccttcagctcctcccttggccaccttaaccacctcgggggctccctggaccgggcctctcaaggacccaaggaggctgggccaccagctgtgctgagctgcctgcccgagccaccacccccctacgagttctcctgctcctctgccgaggaaatgggagccgtgctgcccgagacctgtgaggagctcaagaggggccttggcgatgaggacggctccaaccccttcacgcaggtgctggaggagcgccagcggctgtggctggctgagctgaagcgcctgtatgtggagcggctgcacgaggtgacccagaaggctgagcgcagcgagcgcaacctccagctgcagctgtttatggctcagcaggagcagcggcgcctgcgcaaggagctgcgggctcagcagggcctggctccggagcctcgggcccccggcaccctcccagaggctgaccccagtgcacgaccagaggaggaagcccgatgggaggtgtgccagaagacagcagagattagcctcttgaagcagcagctgcgtgaagcccaggcggaactggcccagaagctggcggagatcttcagtctgaagacacaacttcggggcagccgggcacaagcccaggctcaggacgcagagctggtccggctgcgcgaggctgtgcgcagcctgcaggagcaggcccctcgggaggaagccccaggcagctgtgagactgatgactgcaagagcaggggcctgctaggggaggcaggaggcagcgaggccagagacagtgctgagcagctgcgggctgagctgctgcaggagcgacttcggggccaggagcaggcgctgcgctttgagcaggagcggcggacttggcaggaggagaaggagcgcgtgctgcgctaccagcgggagatccagggagggtacatggacatgtaccgccgcaaccaggcactggagcaggaactgcgggcactgcgggagccccccacaccctggagtccccggctcgagtcctccaagatctgaggccagcagagcgagctgacagcagcaacactgtcagaaggtgccctgagacggccggctcagccttcccttgcactggttggggtggaacctgcagaggccagcccggggctggggaggcgcaaggagaggagggatccagtggggccgtgggctgggtagggtgccttggcaggagccaggacaaggccctcctggcagaggagcacctaggcagggcccagccctgcttcctggagtggatgtggcccagagaaggaggctgggggatcaccagccccaaggtcccgaagggcaggtcagagggagagaggctggagacctgggctggagccttcctccagggaaggaggctggggtgggaacactggcctcccccagaataaaaccatgttttctaccagaggctcagaatacgctgagcctgtgaccagaggatgatggatggtcgggattgaggctgttgacctgggcagtagctcctcccatggccagtggtcagtgggagggtgtgccctgcgcctgtctgcatacccactgggcatgtgtgttgggagcagaggagtcctactccttgcctcagccccacacggttccttagctgccgtgtgggctgaaattcctttctttagcaccagtggagttttcagaaggaacaacaccagggaatgccaaaaaaacaaagggcaagtcaaccaaggcattttgagaacatgaaatgtcttcttggtgggaaggctgggccccaggagtatccacaggctcaggccatgcccctccccgcacccacctcctgtctccctccctccctccataggagtggggggcccctagaagtgctctgcctcattccctgttcgtaggaaggtgcaggagaggaggtgggcaagcttatgggtttcttggtaaagagcctttaccacagcaaggaatgggaacatttccccatcagcaacggggctctagggcattattaagtaggggtgaaatatgattgatttgcattctggaaagctctcccaggaggaagcattccccaccccaccttgcctctgtcctgcgctgggctccaggacggtcagtcctcccagatccctgctctcagctaaggctggtccctaaaacccacacctgcctttggtctctcagaggcctggcttgccctctgggcctttgctcccccgctgggtgcccggcctggaacacaggttctgtctggctgtgtgagtggcgtctctcccttcctttgagggaagctcagctttcttacgcgctcatcgttggacgggctgccatgcattgcgtgcttactgggcgccaggtgctgtgctgggcccttgtgagtgtgggggcacaggctgaattagatgagctcctgccgcagggggccctgcacactgatgtcagctcaccagtctcttccctgacagggcagctcagggaacttctgagaagttatctgcagagagccccccctcactccctttggctaccctggccgtgcctggcagcccctcaggccccacaggtgggtcctggttgtgaagtggagttagtgcacatggatgtcaggggacgggtgtgaggcatgagctgggggggccccctttttcagggcagagaatgaggcgtgtgcactgtctgctgtggggatggtgtgtttatggccatgtaagtggcaggtgtgtgtaaagatgtgcttgtgggtggtgggtgtgtctgagggggtgtgtttgggagcctggcctccaaaagccagtgtctgggttggagacagtgcaggccccttcttggccccaccctctaccccattccttcctgtcagccccagtctgtcttggcactggccaggcttgggtggagcctgtgtcccagacagatcccctaggcctatctgagacccatgcaggcccacacctgagctcctgtctgcctgaggagggaaagggggagtggccaggtcaggcaggccagtcgtctacacacccccttggtacccattcccatttcacaaactcctccaaaccccaaaccccaaacggaaatctctgggacaatggctcctccagagggcccctcagagccaggtgctggccagatgccttgatcacagcctccatggccaggggcctgtcaagccaggggcccacatacctggtgccagggcccacctcggtataccagctcggcagaacagttccccacccagcgattagggagctgggctggccagtacagccagtggggagtgggtgggaggcaccaaaacttggcagctgtgccagaaaccaaagccaggcccagatgtagggggagggcacgagagctgaacctgagcctggggcgtctcggagctggatccccgtcagctcatccaggctggacaaaccagttcctgggtcccccagccggctgggtggctctggggccaaccgaccacaggtgtcactgatcacaggtgtcaccgtagtggctaccacctcagggcagcccctccctccagctggcggggcctcagcttcccagctgccctggcttagccttccctgcagcccctccccaacaggcttggtccgggcagcctgctctgcggaaggtggcagcctcctggtgctgggctccctgcctctggggcctccagtccttcactcagtgtcatcccttccagcagctccctgggcctcttggtccatcccttcaggcttctgacacactagtggcctcgagtcactgatagtggtgcctcctccttaccttggcaagcccttgtagccctctgagccctcatcctgcaggcagagcccctcagtgctctgagaaacctgccctgaactcaccgcctcccctgcctgggcactccctcctccctgcgcccacagcccccatgccaatctccgtcagctctttctgtgctgctgtaattgttggtttgcctgtctcctttgagctgtgggcattgccggggtagggtggtgtcttcaccacagctccagaaggcactggtgggatgtggagtcaggagcaaccagagaccccccaatactagaatgggtttgagcttggggtggggtggatggggaagacttactctgaatgttcgttcaccatccgtgggcaccaggtctgtgccaagcacagggactccaggggcagctgccattcgttccagtgatgtatttggggccttctcaggtgaggaagccaaggtggccaaggccctcggtcccctgccctgatagggcttacctgtgggtgggggagggagaccacacatgtcagaggtagtgaaggccgctccaaatagtgactggggccaggcaggcggaaaagagaacagaagagaatccagaagtgttcagacagaactagggacaacagaggggcctccatggtggcatgggtcagcagagcatggagcaggcagaggaagcctatctgtggggctgggtacatttctctgagactcacggaatgtaagtgttgaggtttctgcaaagagggcgcaggccctgcagtgacggttcagatattgataacccatcccccttggcaggtgggggcttaggcatccatattggattcagaaaagaaaaagaatgatgcttcttgcaacaaaaacaaaagtgattatgtcacgagaggagaggctggagggccatgggagttcccagctggctcactcatccgtccaggaggtgggtctcatggtttcattttgctttgggcttacttagagttttggcaaatgcagagttatgtaacgaacccaacaatgaagatacagttctgtcacccccccagcattctcctgtggccctctagtccaccccccgccccaccccagcccctggcaaccactgatctgctttcacaataaccgtatggggttttttctctttccttttttgtgagcggtatttaattcctttgctctaatatgtaatattagaacatattacaaagtagcaagaaaaatacgacattggtgtaaaaataatctacacctcatggaaagaatgaagagccagaaatagattctattctgtagaaaatcttacacaataaaggacttcaaaat

SEQ ID NO: 22272 - DNA, 6812 bp, Homo Sapiens
cggccgcgaccactaccaccactgagcaccgcttcttccgccggagcgtcatctgcgactccaatgccactgcactggagcttcccggccttcctctttccctgccccagcccagcatccccgcggctgtcccgcagagtgctccaccggagccccaccgggaagagaccgtgaccgccaccgccacttcccaggtagcccagcagcctccagccgctgccgcccctggggaacaggccgtcgcgggccctgccccctcgactgtccccagcagtaccagcaaagaccgcccagtgtcccagcctagccttgtggggagcaaagaggagccgccgccggcgagaagtggcagcggcggcggcagcgccaaggagccacaggaggaacggagccagcagcaggatgatatcgaagagctggagaccaaggccgtgggaatgtctaacgatggccgctttctcaagtttgacatcgaaatcggcagaggctcctttaagacggtctacaaaggtctggacactgaaaccaccgtggaagtcgcctggtgtgaactgcaggatcgaaaattaacaaagtctgagaggcagagatttaaagaagaagctgaaatgttaaaaggtcttcagcatcccaatattgttagattttatgattcctgggaatccacagtaaaaggaaagaagtgcattgttttggtgactgaacttatgacgtctggaacacttaaaacgtatctgaaaaggtttaaagtgatgaagatcaaagttctaagaagctggtgccgtcagatccttaaaggtcttcagtttcttcatactcgaactccacctatcattcaccgcgatcttaaatgtgacaacatctttatcaccggccctactggctcagtcaagattggagacctcggtctggcaaccctgaagcgggcttcttttgccaagagtgtgataggtaccccagagttcatggcccctgagatgtatgaggagaaatatgatgaatccgttgacgtttatgcttttgggatgtgcatgcttgagatggctacatctgaatatccttactcggagtgccaaaatgctgcgcagatctaccgtcgcgtgaccagtggggtgaagccagccagttttgacaaagtagcaattcctgaagtgaaggaaattattgaaggatgcatacgacaaaacaaagatgaaagatattccatcaaagaccttttgaaccatgccttcttccaagaggaaacaggagtacgggtagaattagcagaagaagatgatggagaaaaaatagccataaaattatggctacgtattgaagatattaagaaattaaagggaaaatacaaagataatgaagctattgagttttcttttgatttagagagagatgtcccagaagatgttgcacaagaaatggtagagtctgggtatgtctgtgaaggtgatcacaagaccatggctaaagctatcaaagacagagtatcattaattaagaggaaacgagagcagcggcagttggtacgggaggagcaagaaaaaaaaaagcaggaagagagcagtctcaaacagcaggtagaacaatccagtgcttcccagacaggaatcaagcagctcccttctgctagcaccggcatacctactgcttctaccacttcagcttcagtttctacacaagtagaacctgaagaacctgaggcagatcaacatcaacaactacagtaccagcaacccagtatatctgtgttatctgatgggacggttgacagtggtcagggatcctctgtcttcacagaatctcgagtgagcagccaacagacagtttcatatggttcccaacatgaacaggcacattctacaggcacagtcccagggcatataccttctactgtccaagcacagtctcagccccatggggtatatccaccctcaagtgtggcacaggggcagagccagggtcagccatcctcaagtagcttaacaggggtttcatcttcccaacccatacaacatcctcagcagcagggaatacagcagacagcccctcctcaacagacagtgcagtattcactttcacagacatcaacctccagtgaggccactactgcacagccagtgagtcaacctcaagctccacaagtcttgcctcaagtatcagctggaaaacagagtactcagggagtctctcaggttgctcctgcagagccagttgcagtagcacagccccaagctacccagccgaccactttggcttcctctgtagacagtgcacattcagatgttgcttcaggtatgagtgatggcaatgagaacgtcccatcttccagtggaaggcatgaaggaagaactacaaaacggcattaccgaaaatctgtaaggagtcgctctcgacatgaaaaaacttcacgcccaaaattaagaattttgaatgtttcaaataaaggagaccgagtagtagaatgtcaattagagactcataataggaaaatggttacattcaaatttgacctagatggtgacaaccccgaggagatagcaacaattatggtgaacaatgactttattctagcaatagagagagagtcgtttgtggatcaagtgcgagaaattattgaaaaagctgatgaaatgctcagtgaggatgtcagtgtggaaccagagggtgatcagggattggagagtctacaaggaaaggatgactatggcttttcaggttctcagaaattggaaggagagttcaaacaaccaattcctgcgtcttccatgccacagcaaataggcattcctaccagttctttaactcaagttgttcattctgcgggaaggcggtttatagtgagtcctgtgccagaaagccgattacgagaatcaaaagttttccccagtgaaataacagatacagttgctgcctctacagctcagagccctggaatgaacttgtctcactctgcatcatcccttagtctacaacaggccttttctgaacttagacgtgcccaaatgacagaaggacccaatacagcacctccaaactttagtcatacaggaccaacatttccagtagtacctcctttcttaagtagcattgctggagtcccaaccacagcagcagccacagcaccagtccctgcaacaagcagccctcctaatgacatttccacatcagtaattcagtctgaggttacagtgcccactgaagaggggattgctggagttgccaccagcacaggtgtggtaacttcaggtggtctccccataccacctgtgtctgaatcaccagtactttccagcgtagtttcaagtatcacaatacctgcagttgtctcaatatctactacatccccgtcacttcaagtccccacatccacatctgagatcgttgtttctagtacagcactgtatccttcagtaacagtttcagcaacttcagcctctgcagggggcagtactgctaccccaggtcctaagcctccagctgtagtatctcagcaggcagcaggcagcactactgtgggagccacattaacatcagtttctaccaccacttcattcccaagcacagcttcacagctgtccattcagcttagcagcagtacttctactcctactttagctgaaaccgtggtagttagcgcacactcactagataagacatctcatagcagtacaactggattggctttctccctctctgcaccatcttcctcttcctctcctggagcaggagtgtctagttatatttctcagcctggtgggctgcatcctttggtcattccatcagtgatagcttctactcctattcttccccaagcagcaggacctacttctacacctttattaccccaagtacctagtatcccacccttggtacagcctgttgccaatgtgcctgctgtacagcagacactaattcatagtcagcctcaaccagctttgcttcccaaccagccccatactcattgtcctgaagtagattctgatacacaacccaaagctcctggaattgatgacataaagactctagaagaaaagctgcggtctctgttcagtgaacacagctcatctggagctcagcatgcctctgtctcactggagacctcactagtcatagagagcactgtcacaccaggcatcccaactactgctgttgcaccaagcaaactcctgacttctaccacaagtacttgcttaccaccaaccaatttaccactaggaacagttgctttgccagttacaccagtggtcacacctgggcaagtttctaccccagtcagcactactacatcaggagtgaaacctggaactgctccctccaagccacctctaactaaggctccggtgctgccagtgggtactgaacttccagcaggtactctacccagcgagcagctgccaccttttccaggaccttctctaacccagtcccagcaacctctagaggatcttgatgctcaattgagaagaacacttagtccagagatgatcacagtgacttctgcggttggtcctgtgtccatggcggctccaacagcaatcacagaagcaggaacacagcctcagaaggtttctcaagtcaaagaaggccctgtcctagcaactagttcaggagctggtgtttttaagatgggacgatttcaggtttctgttgcagcagacggtgcccagaaagagggtaaaaataagtcagaagatgcaaagtctgttcattttgaatccagcacctcagagtcctcagtgctatcaagtagtagtccagagagtaccttggtgaaaccagagccgaatggcataaccatccctggtatctcttcagatgtgccagagagtgcccacaaaactactgcctcagaggcaaagtcagacactgggcagcctaccaaggttggacgttttcaggtgacaactacagcaaacaaagtgggtcgtttctctgtatcaaaaactgaggacaagatcactgacacaaagaaagaaggaccagtggcatctcctccttttatggatttggaacaagctgttcttcctgctgtgataccaaagaaagagaagcctgaactgtcagagccttcacatctaaatgggccgtcttctgacccggaggccgcttttttaagtagggatgtggatgatggttccggtagtccacactcgccccatcagctgagctcaaagagccttcctagccagaatctaagtcaaagccttagtaattcatttaactcctcttacatgagtagcgacaatgagtcagatatcgaagatgaagacttaaagttagagctgcgacgactacgagataaacatctcaaagagattcaggacctgcagagtcgccagaagcatgaaattgaatctttgtataccaaactgggcaaggtgccccctgctgttattattcccccagctgctcccctttcagggagaagacgacgacccactaaaagcaaaggcagcaaatctagtcgaagcagttccttggggaataaaagcccccagctttcaggtaacctgtctggtcagagtgcagcttcagtcttgcacccccagcagaccctccaccctcctggcaacatcccagagtccgggcagaatcagctgttacagccccttaagccatctccctccagtgacaacctctattcagccttcaccagtgatggtgccatttcagtaccaagcctttctgctccaggtcaaggaaccagcagcacaaacactgttggggcaacagtgaacagccaagccgcccaagctcagcctcctgccatgacgtccagcaggaagggcacattcacagatgacttgcacaagttggtagacaattgggcccgagatgccatgaatctctcaggcaggagaggaagcaaagggcacatgaattatgagggccctggaatggcaaggaagttctctgcacctgggcaactgtgcatctccatgacctcgaacctgggtggctctgcccccatctctgcagcatcagctacctctctaggtcacttcaccaagtctatgtgccccccacagcagtatggctttccagctaccccatttggcgctcaatggagtgggacgggtggcccagcaccacagccacttggccagttccaacctgtgggaactgcctccttgcagaatttcaacatcagcaatttgcagaaatccatcagcaaccccccaggctccaacctgcggaccacttagacctagagacattaactgaatagatctgggggcaggagatggaatgctgagggggtgggtgggggtgggaagtagcctatatactaactactagtgctgcatttaactggttatttcttgccagaggggaatgtttttaatactgcattgagccctcagaatggagagtctcccccgctccagttattggaatgggagaggaaggaaagaacagcttttttgtcaaggggcagcttcagaccatgctttcctgtttatctatactcagtaatgaggatgagggctaggaaagtcttgttcataaggaagctggagaactcaatgtaaaatcaaacccatctgtaatttcgagtgggtggagctcttgcttttggtacatgccctgaatccctcactccctcaagaatccgaaccacaggacaaaaaccacctactgggctctctcctaccctgccctcctcccttttttttacccctctcttttttattttttctttgctctttagaacccagtgaaaaataccagggtactggggtgcaactctttcttatgataggtcattagtgctttaagcaaaagatattagcagctttgactgcagcattagc

SEQ ID NO: 22273 - DNA, 6219 bp, Homo Sapiens
gtggtcgagccgcgcgcagggtgcgctcgtttgaactgcggtgacaccgagggttggggactcgaacccccgcttcgcagctcaggagcctgaggtccgaaagcttcgttccagagcccagcatgaatggatacgcggaatttccgcccagccccagtaaccccaccaaggagcccgtggagccccagcccagccaggtcccactgcaggaagatgtggacatgagcagtggctccagtggacatgagaccaacgaaaactgctccacggggcgggactcgcagggcagtgactgtgacgacagtgggaaggagctggggatgctggtggagccaccggatgcccgccagagtccagatacctttagcctgatgatggcaaaatctgaacacaacccatctacaagtggctgcagtagcgaccagtcttcgaaagtggacacacacaaagaactgataaaaacactaaaggagctgaaggtccacctccctgcagacaagaaggccaagggcaaggccagtacgctggccaccttgaagtacgccctcaggagcgtgaagcaggtgaaagccaatgaagagtattaccagctgctgatgtccagcgagggtcacccctgtggagcagacgtgccctcctacaccgtggaggagatggagagcgttacctctgagcacattgtgaagaatgccgatatgtttgcggtggccgtgtccctggtgtctgggaagatcctgtacatctctgaccaggttgcatccatatttcactgtaaaagagatgccttcagcgatgccaagtttgtggagttcctggcgcctcacgatgtgggcgtgttccacagtttcacctccccgtacaagcttcccttgtggagcatgtgcagtggagcagattcttttactcaagaatgcatggaggagaaatctttcttttgccgtgtcagtgtccggaaaagccacgagaatgaaatccgctaccaccccttccgcatgacgccctacctggtcaaggtgcgggaccaacaaggtgctgagagtcagctttgctgccttctgctggcagagagagtgcactctggttatgaagcccctagaattcctcctgaaaagagaatttttacaaccacccatacaccaaattgtttgttccaggatgtggatgaaagggcggtccctctcctgggctacctacctcaggacctgattgaaaccccagtgctcgtgcagctccaccctagtgacaggcccttgatgctggccatccacaaaaagatcctgcagtcaggcgggcagcctttcgactattctcccattcggtttcgcgcccggaacggagagtacatcacgttggacaccagctggtccagcttcatcaacccatggagcaggaaaatctccttcatcattgggaggcacaaagtcagggtgggccctttgaatgaggacgtgtttgcagcccacccctgcacagaggagaaggccctgcaccccagcattcaggagctcacagagcagatccaccggctcctgctgcagcccgtcccccacagcggctccagtggctacgggagtctgggcagcaacgggtcccacgagcaccttatgagccagacctcctccagcgacagcaacggccatgaggactcacgccggaggagagccgaaatttgtaaaaatggtaacaagaccaaaaatagaagtcattattctcatgaatctggagaacaaaagaaaaaatccgttacagaaatgcaaactaatcccccagctgagaagaaagctgtccctgccatggaaaaggacagcctgggggtcagcttccccgaggagttggcctgcaagaaccagcccacctgctcctaccagcagatcagctgcttggacagcgtcatcaggtacttggagagctgcaatgaggctgccaccctgaagaggaaatgcgagttcccagcaaacgtcccagcgctaaggtccagtgataagcggaaggccacagtcagcccagggccacacgctggagaggcagagccgccctccagggtgaacagccgcacgggagtaggtacgcacctgacctcgctggcactgccgggcaaggcagagagtgtggcgtcgctcaccagccagtgcagctacagcagcaccatcgtccatgtgggagacaagaagccgcagccggagttagagatggtggaagatgctgcgagtgggccagaatccctggactgcctggcgggccctgccctggcctgtggtctcagccaagagaaggagcccttcaagaagctgggcctcaccaaggaggtactcgctgcacacacacagaaggaggagcagagcttcctgcagaagttcaaagaaataagaaaactcagcattttccagtcccactgccattactacttgcaagaaagatccaaggggcagccaagtgaacgaactgcccctggactaagaaatacttccggaatagattcaccttggaaaaaaacaggaaagaacagaaaattgaagtccaagcgggtcaaacctcgagactcatctgagagcaccggatctggggggcccgtgtccgcccggcccccgctggtgggcttgaacgccacagcctggtcaccctcagacacgtcccagtccagctgcccagccgtgccctttcccgccccagtgccagcagcttattcactgcccgtgtttccagcgccagggactgtggcagcacccccggcacctccccacgccagcttcacagtgcctgctgtgcccgtggacctccagcaccagtttgcagtccagcccccacctttccctgcccctttggcgcctgtcatggcattcatgctacccagttattccttcccctcggggaccccaaacctgccccaggccttcttccccagccagcctcagtttccgagccaccccacactcacatccgagatggcctctgcctcacagcctgagttccccagccggacctcgatccccagacagccatgtgcttgtccagccacccgggccaccccaccatcggccatgggtagggcctccccaccgctctttcagtcccgcagcagctcgcccctgcagctcaacctgctgcagctggaggaagcccctgagggtggcactggagccatggggaccacaggggccacagagacagcagctgtaggggcggactgcaaacctggcacttctcgggaccagcagccgaaggcgcctctgacccgtgatgaaccctcagacacacagaacagtgacgccctttccacgtcaagcggcctcctaaacctcctgctgaatgaggacctctgctcagcctcgggctctgctgcttcggagtctctgggctccggctcactgggctgcgacgcctccccgagtggggcaggcagtagtgacacaagtcataccagcaaatattttggaagcattgactcctcagagaataatcacaaagcaaaaatgaacactggtatggaagaaagtgagcatttcattaagtgcgtcctgcaggatcccatctggctgctgatggcagatgcggacagcagcgtcatgatgacgtaccagctgccttcccgaaatttagaagcggttttgaaggaggacagagagaagctgaagctcctacagaaactccagcccaggttcacggagagtcagaagcaggagctgcgcgaggtccaccagtggatgcagacgggcggcctgcccgcagccatcgacgtggcagaatgtgtttactgtgaaaacaaggaaaaaggtaatatttgcataccatatgaggaagatattccttctctgggactcagcgaagtgtcggacaccaaagaagacgaaaatggatcccccttgaatcacaggatcgaagagcagacgtaacccctgccccacctcagcccggcagccagcgaggtacaccaggtggtgcttggaagagatgaaagatcttcatggctgtttccactgaaatggacacatatgctcatgttgctttttttgttttagaaaaaaaaacaacatagttttctgaaggggcgacttaaaactgtggagagtggggagagttcggaaagaaatatgtttttatatataaaatatatatgtggagttttgtgggatggggaagagattttagttgttatttaacttgagaaagactaagcgcctcttagtgtcagggaagttgcctcagtgctcccagaagtcctgtgactgtgacgagacctctgtctgctgcaccagctggggactctggcttccagagctttcccagggtgtttggatcagatcaaattttgtcctctcttggggactgctttttatctgaattatcatttagtcaaggtagagtgtttttttatacataccaaatggagatagcagcctctcctagttttatttcaaaacgtttcacattaaatggtgtgaagcgttgtttggcaaaccaacagctttggcttctggtgtggtcaatatttcagtctgacataggttttgtttgtagtgaacaaagttgaaacatttgctctggactaaagaagcctagtggtttgtgtggccaactccatcggatgaatgcacacgcagacagaccctctgtatatttctgcattattcttgtctccttttcagaccatgatggccaatatggagattaaaatatgtcatcagtcatctctttatggtgacttccctttgcaaaccaggctgtgaccaacacatgtgagacccagtcctgtttggttttcttccgttggaaccacccagacatctgcttccacccagccaagcccacatcacatctcctggccgagagcagccactgccactcagtctgacagcttgcgactgcatctgtattttcaggggtgcagtgagctcacctctcccactgcaccctgggttgggtgcacagccctcattcttttcatgagcccgacctctctcggagcagcttcaggcctctgccagtgtccccagcacttttaggtcatttggacacttggggaaaagtgaggccagtctgcccggctttttacaaaacctcatgttgcattgtatattccaaagatggttcagaaaatttaatattggtccctggtggaaattcaaagttatcactgaagaacagttgacttaaaattggaccaagactatgaggcttaaaagggaccagggttttctttttttttttttttttttttttttttagatggagtttctttttgcccaggctggagtgcagtggcgccatcttggctcactgcaacctctgcctcccaggttcaagcgattctcctgcctcagcctcctgagtagctgggaccacaggcgactgccaccacacccagctaattttttgtatttttagtagagacagggtttcaccatgttggccaggctggtctcgaactcctgacctcaagcgatccacccacctcggcctcccaaagtgctgggattacaggcgtgagccaccacgcccaactgggaccagggttttctgttttttgatggaggtgaaatctctttgtaatccactaggttttcatcgtaaaaccatcttatgcctgactattaaacctattcttcataaacacaagaacactttaatttttcgttaatttacaaagtaacatcagctgcctatgcctatgataaggtagcagtctgcattcttatggccattagatgttacaaactccttgcctctaaagtcagatcatgaagggataggtgttcatctaaggttacagttatgttaccgaaacacaaaactgccaaaatcttactctgctgttatgaatgtttaccatcagcattattttatcatttaatatgtgctcactgattgttaactgtagcttcagcgcgtgccaagcagttgacttaataggatcatcttgtgaatttgtttacgtgatgccaagcatcaagtcatgttttctttagtgtgtgtgcttacacaggtgttaaacagtttttctctattttaaactgagccttctttttaatatattcccgaagagatatgtaaataagctctcagagtttctgtgatgatttgttgagccttgctggacaagtggtttgtttgtgtgcaaaccaaactttctttacccagtgcaatagatttgtttgactgcttgtgtctttttatgacctgtttgccttttagaaaattggtaaataaagcaagtatattttt

SEQ ID NO: 22274 - DNA, 6336 bp, Homo Sapiens
cgccgctcaggccctggagcggacggttcctactgcggctgggcaccggctccgctcccgcgtctgcccgcgctccagctgcgcctggcccggccccggcccggctcggcgtggccccggcctccaagcgaaggcgccgctgccgctgggccgctcccagggccatgaggaagcggcggcagccactgcggcccgcgtcaaggacttctccagacaggttatgttacctgcagaggctgccctgaagctccctgtggcctggagactatgtacaagaggaatggtctgatggctagcgtgttggtcacctctgccactccacagggcagcagcagctcggactctctggagggccagagctgcgactatgccagcaagagctatgatgccgttgtcttcgatgtcttgaaagtgaccccagaggagtttgctagccagattacattaatggatatacctgtgtttaaagctatccagccggaggaactagccagctgtggatggagtaagaaggagaaacacagtcttgcccctaacgttgtggcctttacccggaggtttaaccaggtcagtttttgggttgtacgagaaattctaacagcacagactttaaaaataagggcagaaatcctcagccattttgtgaaaatagccaagaaacttctagaactcaacaaccttcattctctcatgtctgtggtatcagcattacaaagtgctcccatcttcaggctgacaaaaacctgggctcttttaaatcgaaaagacaagactacctttgagaaattggactacctgatgtcgaaagaagataattacaagcggacacgggaatatatccgaagcctgaagatggttccaagtattccctatctaggaatctatcttctggatttaatctacattgattctgcatatcctgcctcaggcagtatcatggaaaatgaacaaagatccaatcagatgaacaatattcttcgaataattgctgatttacaagtttcctgcagctatgatcacctcaccaccctgccccatgtgcagaagtacctgaagtccgtacgctacattgaagagctccagaagtttgtggaagacgacaactacaaactgtcgctcagaatcgaaccaggaagcagctctccaagactagtctcttccaaggaagatcttgcaggtccctctgctggctccggttctgcgaggttcagccggaggcccacctgtcctgacacatctgttgctggcagcctccccacacctccagtccccagacacaggaagagccacagcctaggcaacaatatgatgtgtcagttgagtgtagttgagagtaaaagtgcgacattcccatcggagaaagcaaggcacctactggacgacagtgtcctagagtcccgcagcccccgaaggggcctggctctgacctcctcctctgctgtcaccaatggactctccctaggcagtagtgagagctcagagtttagtgaagagatgtcttcagggctggaaagccccaccggcccgtgcatctgttctctggggaactccgcagctgtgcccaccatggaggggcctctgagaagaaaaaccctgctcaaggaagggcggaagcctgcgctgtcctcgtggaccaggtactgggtcatactctcaggatccaccctcctgtactacggagccaagtccttgcggggcacagacagaaaacactataaatccacacctggcaaaaaggtttccatcgtgggctggatggtgcagctgcccgatgaccccgagcacccagatatcttccagctgaacaaccctgacaaaggcaatgtttacaagtttcagactggttcccgatttcatgcaatactgtggcacaagcatttggatgatgcatgtaaaagcaacaggcctcaggtacctgcaaaccttatgtcatttgagtaagtctctgcaggacgtggcatgacttcagaggcttctgggaacccaggctgggcctggtggtgaagagcagtcctgggcacaggctgtgagccagggtgctgggaaactcacagctggactcaggggacacggcctgtggcctcaccatcccagagggcttcaccagtgtgggatccacctgtcagtccccagcgactctcatgacactcattctgcagcaccgcctcttggggcagtggtcagaccccacacgccctctctgggcccaccacctgcatctgcgactagagagcacccggcccacgttgggttctcagtgctttctactgcacagagtggacagcgctaactaacctgtgagaggggcccgagagaaggaacagctgtggaacaggctttttacaccccaagtgcatggggttgctcgcccacagggctgcctcagattttgtacaaccccgaagcgtcctctgcgtgtgcgtgctgtacgtgtgtgtgtgtgtgtgagcgagtgtgaactcttcaagaaacatgcattttggcacaagactcgtgacatcacacacttcattcgctttgaggccctgctttaaccttaagttatagccctgtccaccgaggaaggtcagggtgagagcctagattcctcctgtgtcaagggtccctcgcattcttttactgtaaacaaacaatgccttaaattgtgtcttgttttctgttcctatgggtgctattcatctggaaggcctgcttccaggcctctttgctgtcagcccttctgagacaggacctggcttcaggactgtggactgggctgctggcctgcttgcttcctcccttccccattcctagcagggcctgaggccctcctcttctcgcccttcccaccatgccagaatgggaagttgtgacgttgcagctccaaccgacgtgctcatagtgatcagctgtgcaggagccatgaggcaccaacctctccccgcagggcaaagcctgtgcccccatcatctcactcctttgcctgcactgccagggtggggcccaccaagattcctgatcatgacgggaagctgagtgaccctgaggccttaagcttccccagtcttggccccaaatgcagtcaccagcaagttttccattttccaagtccaagggcacaattgttgatgaccgtgtgacaatagagcgaagccccggggagtgaacggtccaacctctgcattcagttaggagctcttcacatgaatcacatccttatctgtcaccttgtgtcacattttaaagtgacttttattttgcacaaataatttttattcagaataataaatcactctttatcatagtatcttctcttccctcttcccctttagtttggatagcctaactctgagaagttaacccttaaacagttttctggaagagactgaatttctgggtccttgcagctgtgatggtttcagagctcagactgatcaggcatcaagctaccctcaagagtttctgggctggatgtttcagaacaacatctacaccagtaaagtgtaataggtcagtttcaaaacgaccaaaagacccaccactgtattttgaccaaataatgacaacttctttagaaatttgaatggcttggtgaggaaagtagttgtcaccagggcctcattttgtagttgagccttacaatgcttagtagttcatcttctttttgagcaaagactagaatactttcctcctaagagaaactcccaggtgataaaagttgatgccatcaaaccttgacaccgggtgctctgcacacccacgcggatgttgcacctcattctcccgatgactattcaaatcagcatctagaggctgaatgacaatgccaaacactccacctctgatcagaaccatgcagtgttaacactttaacctacattgaatctgattctacctgttaacttttaaaaagtcgtaagtttggatgaaagtgcaagatgtggaacatcaactacctattttccttgggtttttccactctgcaaactgtcctggtttttcacaccaatgaagtattatagatgccaatccaaaacctcagaatttcaggcaccacaaaaacaggtaattttctatcccttataagtttgtcttttctttcagaaacatctcttagcctaatttgaaatagcacaatcacaattcaaaatgtttagtcttctcactaattgagtctgcttccacgtcctctcccaggaacattcttagctcggactcttgaagaatctctttagattttgttggcaaaagccttatagaagcagtaagaggcttgaccacgccggaagagtcctggagctaaagctggaagacactcagctctctaagcaggggctcggccaaacatgggagttaagtgctgcttgtcttcccagtgttggtttgaaccctgtgagcctgagacagagagggccaggcaccaaccacaaggcgggaaagtccatgggtagaccctccccctggagggaagcatttctagtttttgctccttgactgtccagagtgtacaaatgttcataacgccattgaagggattatttcttgcatgcatatgctgaatttttttaagcaaatggatcatggcaccccaaaatgaaagttatagaaagctgtctacaactgtggagttggtagctggtaacattgttgtctcaagaacaactcacctctctccctaggactaatttttgtctctctcagttgaacatgttttgtcattcaagatcagtcaggtgcattctggcaactgacatacttgatggaggattgattcggtagagagcagtagaaatcttgttctaactgtgcctggtgagagactttggccccctccctccctataaggctgtggaacctgaggaagtagatacttgaagagattctgtttaggaagaaactcactctcttttgccagttgaatttatagagcattttttttcttaccaagatggccagtatcattttacccccacctcccaagccccaagaggtgtaccttttcagatgccattttacaggcggaaatgctccatgaaacaggaagccacttgcaagcaacatctgctctgttcctcaggtggggcccagagcccttccccgagactgctgatgtctgtaaccactggggagcactgccaaaaatacagctttctggtttgtgagcccataaatgacttaaatcagctttacatcatttttacatatcaagtggtttcatgttaaaaaacaaactcctagtcctttagaaataacagattctctgcacaaaaccacccattcattcatttattcattcacagcactagcaagtgctgcctatgctgagaacaagtcagatctgatccctgccctcatggacctgaccactcaacaaacagtccccaccacacctatctccttaggcaagactttgcctctctcctagtcctgagtataaatcctgtgcatagattcctctagaaaggcatcaaaaggctcaacagactgaatggcctcttggtctgcgaaaattcagttgcaatgaggatgaagtcactatcctagaggctgcttggcccagaagagccaggcacagagctgcagttgggcacgccaaggattccaaaggtggaatgagagagtagggtcaaactgtcacagtatctgctccataggtttctgtttttaatttcaatgttaaatacaactacaatatgagcgagaactgcattttcttgggtgttgagaacttgtaccatggacttcagaccgccttgcagccgtatgctgcacaagcgtgtacaccccctgggcagcctcaaaaccccgcttacagcagcaacacaggagatcatctgtccattttagaaccattaatctctttatccattgctgaacgactgtgactattcagtaacgaagtaatagtaattaattagtatggtataatctttaataaatttcgtgccaaaatgcatggttttccacttagcattcaaaatgttgcatagagagtagttttcaatttcttatgtactcttcaaagtaagttgaaaatcagtttctacattttaattcgtttcctgttaaatctgttgcactctcctgggctgtctttttctccagcagacccctgcatgcagttgtgtaaggactttctctaattcttgtgaatcgtctcacccgcagtaaccactgaacgtcaatcagccctccatggggttctttcgatttttggtgaagtattttgttacctcagtcttgtatcaagttgctgtatttttcagcttgttacattgataataattatttcactaattaaatactttaatgtacaaacatctttgtttactttgaaattaaatgtgttttccaatg

SEQ ID NO: 22275 - DNA, 7381 bp, Homo Sapiens
ccgtccgctaagtgcctgggctctcccgctcgcgtcccagtctgcgggcctccggggcagcggcgaggccggagcgtcgcggcggagaggacgagaccgggacaagaccagggcaggagggagccggccagccgcgagaaccccgcacgcccggcaagatgctgtcctggcggctgcagacgggccccgagaaggccgagctccaggagctcaacgcccggctctatgactacgtgtgtcgggtgcgggagctggagcgcgaaaacctactcctggaggaggagctgcgcggccggcgcgggcgagagggcctgtgggccgaggggcaggcccgctgcgccgaggaggcgcgcagcttgcggcagcagctggacgagctgagctgggccactgcgctggcggagggcgagcgggacgctctgcggcgcgagctgcgggagctgcagcgcctggatgcggaggagcgcgccgcccgcggccgcctggacgccgagctgggtgcgcagcagcgcgagctgcaggaggcgctgggcgcgcgcgccgccctcgaggcgctgctgggccgactgcaggccgagcgccgaggcctcgacgcggcccacgaacgcgacgtgcgggagctgcgcgcgcgcgccgccagccttaccatgcatttccgcgcccgcgccaccggccccgccgcgccgccgccacgcctgcgggaggtgcacgacagctacgcactgctggtggccgagtcgtggcgggagacggtgcagctgtacgaggacgaggtgcgcgagctggaggaggcgctgcggcgcggccaggagagcagactccaggcggaggaagagacgcggctgtgcgcgcaggaggcagaggcgctgcggcgcgaggcgctcgggttggagcagctgcgcgcgcggctggaggacgcgctgctgcggatgcgcgaggagtacgggatacaggccgaggagcggcagagagcgattgactgcctggaggatgagaaggcaaccctcaccttggccatggctgactggctgcgggactatcaggacctcctgcaggtgaagaccggcctcagtctggaggtggcgacctaccgggccttattggaaggagaaagtaatccagagatagtgatctgggctgagcacgttgaaaacatgccgtcagaattcagaaacaaatcctatcactataccgactcactactacagagggaaaatgaatggaatctattttcaaggcagaaagcacctttggcaagtttcaatcacagctcggcactgtattctaacctgtcagggcaccgtggatctcagacgggcacatctattggaggtgatgccagaagaggcttcttgggctcgggatattcttcctcggccactacccagcaggaaaactcatacggaaaagccgtcagcagtcaaaccaacgtcagaactttctctccaacctatggccttttaagaaatactgaggctcaagtgaaaacattccctgacagaccaaaagccggagatacaagggaggtccccgtttacataagtgaagattccacaattgcccgcgagtcgtaccgggatcgccgagacaaggtggcagcaggtgcttcggaaagcacacggtcaaatgagaggaccgtcattctgggaaagaaaacagaagtgaaagccacgagggagcaagaaagaaacagaccagaaaccatccgaacaaagccagaagagaaaatgttcgattctaaagagaaggcttctgaggagagaaacctaagatgggaagaattgacaaagttagataaggaagcgagacagagagaaagccagcagatgaaggagaaggctaaggagaaggactcaccgaaggagaagagtgtgcgagagagagaggtgccgattagtctagaagtatcccaggacagaagagcagaggtgtccccgaaaggtttgcagacgcctgtgaaggatgctggtggtgggaccggtagagaggcagaagcaagagagctacggttcaggttgggcaccagtgatgccactggttctctgcaaggcgattccatgacagaaaccgtagcagaaaacatcgttaccagtatcctgaagcagttcactcagtctccagagacagaagcatctgctgattcttttccagacacaaaagtcacttacgtggacaggaaagagcttcctggggaaaggaaaacaaagactgaaatagttgtggagtctaaactgactgaggatgttgatgtttccgatgaagctggcctggactaccttttaagcaaggatattaaggaagtggggctgaaaggcaagtcagccgagcagatgataggagacatcatcaacctcggcctgaaagggagggaggggagagcaaaggtcgtcaacgtggagatcgtggaggagcccgtgagttatgtcagcggggagaagccggaggagttttccgtcccattcaaagtggaggaggtcgaagatgtgtcgccaggcccctgggggttggttaaggaggaggaaggttatggagaaagcgatgtcacattctcagttaatcagcatcgaaggaccaagcagccccaggagaacacgactcacgtggaagaagtgacagaggcaggtgattcagagggcgagcagagttattttgtgtccactccagatgaacaccccggggggcacgacagagatgacggctcggtgtacgggcagatccacatcgaggaggaatccaccatcaggtactcttggcaggatgaaatcgtgcaggggactcgaaggaggacacagaaggacggtgcagtgggcgagaaggttgtgaagcccttggatgtcccagcgccctctctggagggggacctgggttccactcactggaaagaacaagctagaagcggtgaatttcatgccgaacccacagtcattgaaaaagaaattaaaataccccacgaattccacacctccatgaagggcatctcctccaaggagccccggcagcagctggtggaggtcatcgggcagctggaggaaacccttcccgagcgcatgagggaggagctgtccgccctcaccagagaggggcagggtgggccggggagcgtttccgtggatgtcaagaaggtccagggtgctggtggcagttccgtgaccctggttgctgaagtcaacgtctcacaaactgtggatgccgatcggttagacctggaggagctgagcaaagatgaggccagtgagatggagaaggctgtggagtcggtggttcgggagagcctgagcaggcaacgcagcccagcgcctggcagcccagatgaggaaggtggagcggaggccccggctgctggcattcgcttcaggcgttgggccacccgggagctgtacatcccttcaggcgagagcgaggttgctggtggggcctctcacagctcgggacagcgcactccccagggcccagtgtcggccactgtggaggtcagcagccccacaggctttgcccagtcacaggtgctggaggatgtgagccaggctgcaaggcacataaaactcggcccctctgaagtctggaggactgagcgaatgtcatatgaaggacccactgcagaagtggtggaggtaagtgcgggaggtgacctaagtcaggcagcgagcccgaccggagccagccggtctgtgaggcatgtcacgctgggtcccggtcaaagtccactgtccagagaagtcatcttcctaggccctgcccctgcctgtccagaggcatggggctcgccagaacctggcccagcagagtcttctgcagatatggacggatcagggaggcacagcacatttggctgcagacaatttcatgctgaaaaggagattatttttcagggccccatttctgctgcagggaaggttggtgattattttgcaacagaagagtcagtgggtacccagacttctgtcaggcaactccagttaggccctaaagaagggttcagtgggcaaatccagttcacagctccactttcagacaaggtggagttgggtgtcataggagattctgtacacatggaagggttgccagggagcagcacatccatcaggcacatcagcattgggcctcagaggcatcagaccacccagcagatagtttaccatgggctggttccccaactgggggaatctggtgactcagagagcactgtgcacggagagggctcagcagatgtgcaccaggccactcacagtcatacctcgggtagacaaaccgttatgactgaaaagagcaccttccaaagtgtcgtttctgaatctccccaggaggatagtgcaggggacacatcaggggcagaaatgacatcgggtgttagcagatcctttaggcacattcgactaggtcctacagaaacggaaacctctgaacacattgccatccgtggacccgtgtccagaacatttgtgcttgctggttcagcggactcccctgagctaggcaagttagcagacagcagcagaacgctaaggcacattgcaccagggcccaaagaaacttcgtttacctttcagatggatgtgagtaacgtagaggcgatccgcagccggacacaggaagcgggagctctcggtgtgtctgaccgtggttcctggagagacgcggacagtaggaatgaccaggcagttggtgtgagctttaaggcctctgctggggaaggagaccaggcccacagagaacagggcaaggagcaggccatgtttgataagaaggtgcagctccagagaatggtagaccaaaggtcggtgatttcagatgaaaagaaagttgccctcctctatctagacaatgaggaggaggagaatgatgggcattggttttaataagcagaaacattttgttttaatggcagcctgttggcgacgtgccaacatccaaaggccttaacttattttaagaggccgagggagtctatgaaaatctccccttttttacttttttaaagagtactcccggcatggtcaatttcctttatagttaatccgtaaaggtttccagttaattcatgccttaaaaggcactgcaattttatttttgagttgggacttttacaaaacacttttttccctggagtcttctctccacttctggagatgaatttctatgttttgcacctggtcacagacatggcttgcatctgtttgaaactacaattaattatagatgtcaaaacattaaccagattaaagtaatatatttaagagtaaattttgcttgcatgtgctaatatgaaataacagactaacattttaggggaaaaataaatacaatttagactctaaaaagtcttttcaaaaagaaatgggaaataggcagactgtttatgttaaaaaaattcttgctaaatgatttcatctttaggaaaaaattacttgccatatagagctaaattcatcttaagacttgaatgaattgctttctatgtacagaactttaaacaatatagtatttatggcgaggacagctgtagtctgttgtgatatttcacattctatttgcacaggttccctggcactggtagggtagatgattattgggaatcgcttacagtaccatttcattttttggcactaggtcattaagtagcacacagtctgaatgcccttttctggagtggccagttcctatcagactgtgcagacttgcgcttctctgcaccttatcccttagcacccaaacatttaatttcactggtgggaggtagaccttgaagacaatgaagagaatgccgatactcagactgcagctggaccggcaagctggctgtgtacaggaaaattggaagcacacagtggactgtgcctcttaaagatgcctttcccaaccctccattcatgggatgcaggtctttctgagctcaagggtgaaagatgaatacaataacaaccatgaacccacctcacggaagctttttttgcactttgaacagaagtcattgcagttggggtgttttgtccagggaaacagtttattaaatagaaggatgttttggggaaggaactggatatctctcctgcagcccagcaccgagatacccaggacgggcctggggggcgagaaaggcccccatgctcatgggccgcggagtgtggacctgtagataggcaccaccgagtttaagatactgggatgagcatgcttcattggattcattttattttacacgtcagtattgttttaaagtttctgtctgtaaagtgtagcatcatatataaaaagagtttcgctagcagcgcattttttttagttcaggctagcttctttcacataatgctgtctcagctgtatttccagtaacacagcatcatcacactgactgtggcgcactggggaataacagtctgagctagcaccaccctcagccaggctacaacgacagcactggagggtcttccctctcagattcacctggaggccctcagacccccagggtgcacgtctccccaggtcctgggagtggctaccgcaggtagtttctggagagcacgttttcttcattgataagtggaggagaaatgcagcacagctttcaagatactattttaaaaacaccatgaatcagatagggaaagaaagttgattggaatggcaagtttaaacctttgttgtccatctgccaaatgaactagtgattgtcagactggtatggaggtgactgctttgtaaggttttgtcgtttctaatacagacagagatgtgctgattttgttttagctgtaacaggtaatggtttttggatagatgattgactggtgagaatttggtcaaggtgacagcctcctgtctgatgacaggacagactggtggtgaggagtctaagtgggctcagtttgatgtcagtgtctgggctcatgacttgtaaatggaagctgatgtgaacaggtaattaatattatgacccacttctatttactttgggaaatatcttggatcttaattatcatctgcaagtttcaagaagtattctgccaaaagtatttacaagtatggactcatgagctattgttggttgctaaatgtgaatcacgcgggagtgagtgtgcccttcacactgtgacattgtgacattgtgacaagctccatgtcctttaaaatcagtcactctgcacacaagagaaatcaacttcgtggttggatggggccggaacacaaccagtctttttgtatttattgttactgagacaaaacagtactcactgagtgtttttcagtttcctactggtggttttgatattgtttgtttaagatgtatatttagaatgacatcatctaagaagctgattttgctaaactcctgttccctacaatgggaaatgtcacaagaatgtgcaaaaataaaaatctgagg

SEQ ID NO: 22276 - DNA, 5475 bp, Homo Sapiens
tgggaacaagactttggccatccagtttctcaagagtcctcttggtcacaggagtatagttttggtccctctgcagttttgggggactttggatcttccaggctgattgagaaagagtgtttggagaaggagagtcgggattatgacgtggaccatcctggggaggctgactctgtgcttaggggcagcagtcaagtccaggccagaggtcgagctctaaacatcgttgaccaggaaggttccctcctaggaaagggggagactcagggcctgctcacagctaaggggggtgttgggaaacttgtcacattgagaaatgtgagcacaaaaaaaatacccaccgtgaatcgtattactcccaaaactcagggcactaaccaaatccagaaaaacactccaagtcctgatgtgaccctggggacaaacccagggacagaagatatccagttccccattcagaagatccctctggggctggatctgaagaatcttcggctccccagaagaaagatgagctttgacatcatagataagtctgatgttttttcaagatttgggatagaaataatcaaatgggcaggattccacaccataaaagatgatattaaattttcccaacttttccagactctctttgaacttgaaacagaaacctgtgctaaaatgcttgcctcattcaaatgttccttaaaaccagagcacagagatttttgcttttttactatcaaatttttaaagcactctgctttgaaaacacccagagttgataatgagtttttaaacatgcttttagacaaaggtgctgtgaagaccaaaaattgcttttttgaaatcataaagccttttgacaagtacataatgagacttcaagaccggcttctgaagagtgtcacacctttgcttatggcctgcaatgcctacgagctaagtgtcaagatgaagaccctcagtaaccccctggacttggctcttgccctagaaaccaccaactctctctgccggaagtctttggcccttttgggacagacattttccttggcctcttctttccggcaggagaaaatcttagaagctgtcggcctgcaagatatagctccctcacctgctgcgtttccaaacttcgaagactccactttgtttgggcgagagtacatagaccacctgaaggcctggctagtcagcagcggatgtcccctccaggttaagaaagccgaaccagagccgatgcgagaggaggagaaaatgattcctcctacgaaacctgaaattcaggccaaggctccaagtagtctgagtgatgctgtcccccagcgagcagatcacagggtagtgggcaccatcgaccagcttgtgaaacgtgtcatcgaaggcagcctgtctcccaaagagagaactcttctcaaagaggaccctgcttactggtttttgtctgatgaaaatagtctggagtataaatattacaagctgaagttggcagaaatgcagcggatgagcgagaacttgcgaggagccgaccagaagccgacctcagcagactgtgcagtgagggccatgctgtactcccgggctgtccgcaacctcaagaagaaactccttccgtggcagcggcgggggctcctccgtgctcaagggctccggggctggaaggcgaggagagcgaccaccgggacccagaccctcctatcctcaggcaccaggctgaaacaccacggccggcaggctccaggcctctcacaggcaaaaccatccctgccagacagaaatgatgctgccaaggactgcccgccagacccagttggaccttctcctcaggaccccagcttagaagcctcaggcccatcccccaagccagcaggagtggacatctctgaagcacctcagacctcttctccctgcccatctgctgacattgacatgaagacaatggagactgcagagaaactggctagatttgttgctcaggtgggaccagagatcgaacaattcagcatagaaaacagcaccgataaccctgacctgtggtttctacatgaccaaaatagttctgctttcaaattctatcgaaagaaagtgtttgaactatgtccatcaatttgtttcacgtcatctccgcacaaccttcacactggtggtggtgacaccacgggttctcaggagagccccgtggacctcatggaaggggaagcagagtttgaagacgagccccctccgcgggaggctgagctggagagcccagaggtgatgcctgaggaggaggacgaggacgatgaggatgggggagaggaggcccccgctcctggaggggcgggcaagtctgagggcagcacccctgccgacggccttcccggcgaggctgccgaggacgacctggctggagcacctgccttgtcacaggcctcctcaggtacctgcttccctcggaagaggatcagcagcaagtcattgaaggttggcatgattccagctcccaagagagtgtgtctcatccaggagccaaaagtccatgaaccagttcgaattgcctatgacaggcctcggggtcgtcccatgtccaaaaagaagaaacccaaggacttggacttcgcccagcagaagctgaccgataagaacctgggcttccagatgctgcagaagatgggctggaaggagggccatggcctgggctccctcggaaagggcatcaggagccggtcagcgtgtacgcagcaggcagcctggggtgggagtgggtggggcctcagtccttccacctgcagcctgccgcttggctccttcacagccaagatggcttacagctggcagttgatttttgttttttaaacagaaggcatcttcagatgagaagctgatcatttacatgtgcaggtgtttacagggctcctttctgtcctggtgtagattttttaaccagcttgttggccctggtcattttggccacatttgtgaccatcataaaagctaagtggtatttctgtgtagtttccgtctggaactgctttcccattcccgggaacccatagccgggccagccagggtcccgaacacaggcccaaagtttattaaaccccgatcataacctccagcaggcatttcatttaatactgagcttagttcctgctgggtaaggcattccgaggtaaccagggccctctgggcaccccctcaaaagccagctcttcgagggtgagtactccttgtttctactgtgagtcgcgtcttgattttccctttctttgatgtctcagtgtgtgtcccaaacacctgcatctcatggactgtttgtgcccatgcccagttcctggcatgccaggccctgggctcaggtgcacaactgactctctttttcactccctaggggaaccccctcggaaggggaagggttgggtgctgacgggcaggagcacaaagaagacacattcgatgtgttccgacagaggatgatgcagatgtacagacacaagcgggccaacaaataggtatgttcacaggccagtgtgtaaggccgtctgccctcgctggcgtgctggtatgcagagaaatttcccccaacaaagttgatgttccctgctcccccaaaaatgccacacacaaaaaaaatcacaaaattctgtgagggaaacaaaagggtctatggatgtggatatgccccattcttaccttccaggtttgctgaaggagcaaacctcacactggccaagggcagatgcgcatggcctgcctggtgccccggctgtgagcccctcaaggcctccaggccagcctccgtggatgtgcgtgtggaaataggccacgcctgtctcttctcttgctcaagttttctctcacagatgacagccacctaccacataacatgaccagcaaacggactgttcctagtccagagggccttgccatcatgcaagtggaagggcgactgtgacagccactgccacagaggatggcagttggctgtgtccctttgtgagggtcttcaaatccttttccttctgcagggccttgggcctgtaaatatcctcatctttctattcttttttttttttagttgccccctcacctaatttccacctcagttttgaacaaaatcgttctcttcctgaatagatcaaaaccactgatgtgaaagataagccttgaagcagcaattgcccttaaaacatcatccctgccctggatcggcctggagccagtgcccaagtacggtttggtgtgtacatgaaaacaaacgtctctgcagtctctggggcggaggtttcgctggcttttctttctctcaaagaaaaaaacatgcaccattttcaatgtgcttttgcctctcctctctgttcacatgcttttagcagcaagtcccctccaaatctgtcttggttccccttcagaaggtggcgctgcccccgaaaggcacctcagcctgtgagtgctgaggaaccagctcctctggctgattttccagttggactggccattgctctccagaagtgctctgttagcaaacgtgatgtggaaacgatcacagatggtgttttctcgttgttcgccagaatttatacgggggagacaaattcccggtaattaccaagtctgcactcgggtaccaaagctctgaagctctctgaacagttgccatacttgagttgatgaatgtgttattcatggtgtctcatctcatcaatgcatcttgagagacttaatgaaattttagcaacagtatagaatagctctatcgggtggggagtaatcattaaacagatgaaatcggccccagatttacatgtctctttagaatccacagtgtaagcaaactacagttacaaagggatgggggttgtaaaccctctgagactctgcacttttcgcacgtatggcatcgtcaagtgctgtcttattacagcctttgtaaggagaggcaggctcctcctggggtgggctctgcagctgctctatttccaggcatgtgatcgcccccgctctccagattccccagcactctgctgcgtgtaactccactcaattctccactcatccttccttgtgaagcaggatcgttgaagttttaagtatgggcaaaaatctggaaaacttaggatccctctgacaccccaggattaggggacacagcagtggctagggcatcagccacagaactgagcgggaaatgccacttgtattggctgtaaagaaatcctggctttgggccaggcacagtggctcaagcctgtaatcccagcactttaggaggttgaggcggatggatcacctgaggtcaggagtttgagaccagcctggccaacatggtgtaaccccgtctctactaaaaatacaaaaaaattagccaggcgtggtagcgggcacctgtaatcccagctactcaggaggctgaggcaggagaatcacttgaaccggggaggcagaggttgcagtgagctgagatcatgccactccactccagcctgggcgacagagcaagactccatctcc

SEQ ID NO: 22277 - DNA, 5704 bp, Homo Sapiens
gagtcctgggaaaggcgcatgcgctctcattgcagcctcggcgtttgtagaagaggagcatctgctccagatggaaaatgggtaaggaacaatcaaattcaattcgggaagaatatagaggtggtaataattggtaaaagtctgcagggttttttttaaccaaaggaaactggtttgagaaaattgtgaaatcagcattgaaatttgttacctactccaatcaagatttgcaaactacaaaaaaatcattctgaagctttcacctataaatatataccaagataatttcagataagaatgtccagcaaggaagtgaagactgctctaaaaagtgctagagatgcaatcagaaacaaagaatacaaagaagctttgaaacactgtaagacagtgttaaagcaagagaaaaataactataatgcctgggtttttattggcgttgctgcagctgaactagaacaacctgatcaggcccagagtgcctataaaaaagctgctgaattagagccagaccaattactagcttggcaggggttagcaaacttgtatgagaaatataatcacataaatgctaaggatgacttgcctggtgtttaccaaaagctcctggatctttatgagagtgttgacaagcagaagtggtgtgatgtctgcaagaaacttgtggatctatattaccaagaaaagaaacacctagaggtggctcgaacatggcacaagttgataaaaacacggcaggaacaaggtgcagaaaatgaagagcttcatcaactatggagaaaattgactcagttcctggctgaaagtacagaggaccagaataatgaaactcagcaattgctttttactgcttttgagaatgcactgggattatcagataagattcctagtgaagatcaccaagtactttataggcatttcattcagagtttatccaaatttcctcatgagtctgctagattgaagaaggcctgtgaaggaatgataaacatctatcctactgtacagtatccattagaagtgctttgtttgcatttaattgaatcaggaaatcttactgatgaggggcagcagtattgttgtagattagtggaaatggattcaaaaagtggtccaggcctcattggcttaggcattaaagcattacaagacaaaaagtatgaagatgctgttaggaacctaacagaagggttaaaggaaagccctgtctgcacaagtggatggtatcatctggcagaagcccaagtcaaaatgcatagacctaaagaagctgttctttcatgcagtcaagctctgaagatcgtagataatcttggtgcgtctggtaacagtctttatcagaggaatctttgtcttcatttgaaagcagaggctttgattaaactctcagattatgactcttcagaggaagcaattcgtacgcttgatcagatttctgatgcagataatatcccaggacttttggttctcaaaagcttggcctatcggaacaaaggttcatttgatgaagctgcaaagattatggaagaccttctctcttcttaccctgacctagctgaagttcatgcccttgaggctttgattcatttcaccaaaaaggactatctacaagcagaaaaatgttttcagagagctcttgagaaagataccgaagttgcagaatatcattaccaacttggattaacatactggttcatgggtgaagagacaagaaaagataaaacaaaggctcttacccactttctgaaggctgcaagactggatacatatatgggcaaagttttctgctatttaggtcattattatagagacgtagtgggagataaaaacagagctcgtggatgttataggaaagcctttgaattagatgacactgatgctgaatctggagctgcagcagttgacctaagtgtggagcttgaagatatggaaatggctttagctatcctaacaacagtaactcaaaaggcaagtgctggaacggcaaaatgggcctggcttaggcgaggactatactatttgaaagctggtcagcattctcaagcagtggctgatttacaggcagcattaagagcagacccaaaggacttcaattgttgggaatcgttaggagaagcatacttaagcagaggaggctacacaacagccttgaagtccttcacaaaagccagtgagctgaacccagaatccatatacagtgtgtttaaggttgcagcaatacagcaaatcctaggcaaatataaggaggctgtagctcaataccagatgatcattaaaaagaaagaagattatgtgcctgctttaaaaggtttgggtgaatgccatcttatgatggcaaaagcagctctagttgattatcttgatggaaaagccgtagactacatagaaaaagcactggaatattttacttgtgctctacagcatcgagctgatgtgtcctgcctctggaagctagctggggatgcttgtacctgtctgtatgctgtcgcaccatctaaagtgaatgttcatgttttaggagtccttctaggtcagaaagaaggaaaacaagtattaaagaaaaatgagctcctccaccttggaggaaggtgttatggtcgtgcattaaaactgatgtctacatctaatacatggtgtgaccttggaattaattattatcgccaagcacaacatctagcagaaacaggcagcaacatgaatgatcttaaggagttgctggagaaatctttacattgtctgaaaaaagcagtgagactcgacagtaataatcacttatactggaatgctcttggtgtggttgcatgttacagtggtattggaaattatgcccttgctcagcactgtttcatcaaatcaatccagtcagaacaaattaatgctgttgcatggaccaacttgggagtgttatacctcacaaatgaaaacattgagcaagctcatgaggctttcaaaatggctcaatcccttgatccatcttatttaatgtgctggattggacaagctcttattgctgaggcagttggaagttatgacaccatggatctcttcaggcacactacagaactaaatatgcatactgaaggagcattaggttatgcgtattgggtctgcacaacattgcaagataaaagcaacagagaaacagagctgtaccagtacaacatcctccagatgaatgctattccagcagcacaagttattttgaataaatatgtagaaagaattcagaattatgccccagctttcacaatgttgggttacttaaacgaacatctacaactgaaaaaggaagcagcaaatgcataccaaagggcaattttgttgttacagactgcagaagaccaagatacttacaatgttgcaataagaaattacggcagattgttatgttccactggtgaatatgataaagctatccaggcttttaagtcaacaccccttgaagtgttagaagacatcataggttttgcattggctttattcatgaaggggctttataaagagagcagcaaagcctatgagagagccttgtctattgttgaatcggagcaagacaaagcccatatcttgacagctctggcaataactgaatataaacaaggaaaaacggatgtagccaagacattgctatttaaatgctctatcttaaaggaaccaaccacagaaagccttcaagccctgtgtgctctagggttggcaatgcaggatgctacactgtcaaaagcagcacttaatgagttactgaagcacatcaaacacaaagacagtaattatcagaggtgccttcttacatcagcgatttatgcactccaaggccgcagtgtggctgtgcaaaaacaaatatctaaagctgttcacagcaaccctggtgaccctgctctttggtctctgttgtctcgagttgttgcacagtatgctcaacgaaatgcaaagggaggtgttgtagcaggaaatgtggctcatattctggactcaaatcatggaaagaaggcattactgtacactgcggtaaatcagttggctatgggaagcagttcagcagaagatgaaaaaaatactgcactaaagaccattcagaaggcagctctcctttctccaggtgatcctgctatctgggctgggctaatggcagcctgtcacgctgatgataaactggccttagtgaacaacactcagccaaagaggatagatttatacttggcactgttatctgctgtttctgcttcaattaaagacgaaaaattctttgaaaattacaaccagtcccttgaaaagtggtctctctcacaagctgtcactggtctaatagacacaggaagaatatctgaagctgaaactctctgcacaaagaatttaaaaagtaaccctgatcagccagccgttatcttacttttgagacaagttcagtgtaaaccactcctggagtcacaaaagccactcccagatgctgtacttgaagaactacaaaaaacagtcatgtccaactcaacctctgttccagcttggcagtggctggcacatgtgtatcaatcccaaggaatgatgagagctgcagagatgtgttacagaaagagtctacaattggcatcccaacggggcagttggagtgggaagctctcaagtctgttgagactagcactacttgcattaaaagtctgtatggctaacatttccaatgatcactggccatctttggttcaagaggctacaactgaggccttgaagctttgcttttgtccactggctgttcttttacaagctttgttacaattcaaacgcaaaatgggggcaagagagacacggcgtcttttggaaagagtggtatatcagcctgggtatcccaaatctattgcatcaactgcacgttggtacctactgagacacttatatgccaaagatgactatgagcttattgacgtgctggtaaacaatgccaaaactcatggagatacaagagcattggaactgaatcagagattgtcctcacaataacattggattattttatagtaaggaagcaaagaaaaagctgtaagaatgaagcaatgaatcaagacttctacccaaagcaacatttttttaaactatatttattccttttctaaaggaatctagagaagttgaagtttttaagttaggaatgcaattttctgttaactccaaacctgattttaatctgaaaaaaaaaaaatttaatttgggaaaaccagaatgaaaggaaaaccattattgccttggttgcttaacattatttgtaaaccattattttctgcatcttgcatggtgcacaatagaatatcttttactgtaatcccttacaataaagccttaatagccattttctatgtaatatgcaaaagtagattagcacaatgcacaattttcttttgttaaaaatcaaattcaaagatttaattcttgctatgaattctaaagttcggcaaaccaattcatcataaaatccaaataatcttgtaacctatttatctagtgattcatctccaattctgttgaaaaagcataatataaatgttgatgagactagactctaatggatatgtttatataattccaaacactcaggtgtgtgaatgcatttaaaaacattaatggaaaataatgctgataatatttaattgatcatgcaattccttcaattatgatggaaagacttgaactttctgaaataaaacaaaaatacagc

SEQ ID NO: 22278 - DNA, 4408 bp, Homo Sapiens
gggcgcggaggcgaccgccatggcgttcctcaaactccgtgaccagccatcactggtgcaagctatatttaacggagatcctgatgaagttcgagcactaatatttaagaaagaagatgttaactttcaggacaatgaaaagcgaaccccattgcacgccgcagcttaccttggagatgcagaaatcattgaacttcttattttatctggagctagagttaatgccaaagacagcaaatggttgacacctttacacagagcagttgcatcttgtagtgaggaagcagttcaggtacttttgaagcattctgcagatgttaatgctcgagacaaaaattggcaaacccctttacatatagctgctgctaataaagctgtaaagtgtgctgaagctttggtacctcttctgagtaatgtaaacgtatctgatcgagcagggaggactgcattacatcatgcagctttcagtggacatggtgagatggtcaaactactcttgtctagaggtgccaatattaatgcttttgacaagaaagataggcgtgctatccattgggcagcatatatgggtcacattgaagtagtgaaattgcttgtgtcgcatggagctgaagtgacatgcaaggataaaaagtcttatacacctcttcatgcagcagcctctagtggaatgatcagcgtagtcaagtaccttctagatcttggagttgatatgaatgaaccaaatgcctatggaaatacacctcttcatgtagcctgctataatggacaagatgttgtagtgaatgaacttatagactgtggtgctattgtgaatcaaaagaatgaaaaaggatttactcctttgcactttgctgctgcatcaacacatggagcattgtgtttagagcttctagttggcaatggggccgatgtcaatatgaagagtaaagatgggaaaaccccactacacatgactgctctccacggtagattctcccgatcacaaaccattatccagagtggagctgtaatcgactgtgaggataagaatggaaatacccctttgcacatagcagcacggtatggccatgagctgctgatcaacactcttattacaagtggtgctgacactgcaaagcgtggcatacatggaatgttccccctccatttggcagccttaagcggcttttcagattgctgcagaaaacttctttcttcaggatttgatatagataccccagatgattttggcaggacttgtctacatgcagctgcagctggagggaatttggagtgcctaaaccttctgctgaatactggtgcagactttaataaaaaggacaaatttgggagatctccactgcactacgctgctgccaactgcaattaccagtgcctgtttgctcttgtgggatcaggagcaagtgtgaatgaccttgatgaaagaggctgcacacccctgcactatgcagctacatcagacacagatggcaagtgcctggaatacttattaagaaacgatgcaaatccagggatccgtgataagcaaggatacaacgcagttcattattcagctgcttatggtcaccgtctatgtcttcagctgattgcaagtgaaactcctctagatgttttaatggaaacctcaggaacagacatgctgagtgattcagataatagagcaacaataagccctttacacttggctgcctatcatggtcaccatcaagcactggaagtgttggtacagtctttgttagatcttgatgtcagaaatagtagtggaagaacacccctagatcttgcagcttttaagggccatgttgaatgtgtggatgtactcattaatcagggagcctcaatcttagtaaaagattacattttgaagaggacacctattcatgcagcagcaacaaatggtcattcagaatgcttacggctattaataggaaatgcagaaccacagaatgcagtggatattcaagatggaaatggacagacgcctctgatgctatctgttctcaacgggcacacagactgtgtttactcattgctgaacaaaggagcaaatgtagatgccaaagataagtggggaaggacagcgttgcatagaggggcagttacaggccatgaagaatgtgtagatgcattacttcaacatggtgctaagtgcttacttcgggatagcaggggccggacgcctatacacctgtctgctgcctgtggacacattggtgttcttggagcccttttgcagtcagcagcatctatggatgcaaatccagccacagcagacaatcatggatatacggcacttcactgggcttgctacaatggtcacgagacatgtgtagaactgcttttagaacaggaagttttccagaaaacggaaggaaatgcttttagtccattgcattgtgccgtgataaatgacaacgaaggtgctgctgagatgttaattgatacattaggtgccagcattgtgaacgccacagattcaaaaggaagaactcctctccatgcagccgccttcacagaccatgtagagtgtttacagctgctgctcagccataatgctcaagtcaattctgtggactctacagggaaaacacctcttatgatggctgcagaaaatggacaaacaaatacagttgagatgctggttagcagtgctagtgcagaactgactttacaagataacagtaaaaatactgccctccatttggcttgtagcaagggtcatgaaactagtgccttgttaatactggaaaagataacagatagaaacctcatcaatgcaaccaacgcagccttgcaaacacctctgcatgttgctgcccgaaatgggctaacaatggtggttcaggaacttttgggaaaaggagcaagtgtgcttgcagtagatgaaaatggctataccccagctttggcctgtgctcccaataaggatgtggctgattgcctggctctcattttggccaccatgatgcctgtctcatcaagtagtcctttatcatccttaacattcaatgccattaaccgttataccaacacctcaaaaacagtcagctttgaagctttgcccatcatgaggaatgaacctagctcctattgcagtttcaataacattggaggggaacaggagtacttatacactgacgtggatgagctcaacgactccgattctgagacctactgagaggctgaggaggagggagttctcacagtaaagcttcaaactgtgctttttcaggaaaaaggcactttgatattcacgtagaaattcaacctaagaggaaagatcccacagtgagccaatgttaagagatctgatggcattaggaggaagagttttaaaggaattctcttctgaattccctgagggaattttctagaatctcagaattgaaagagacctgaggttcatccagtctctaacctcttaacaaatgcaggagtcccttctacaagggtgatctttccaccttgaacacttccaagtgactctacctcaccaagcagtccattcagttgttgagcagctctaactgttagaaaggtcttccttagatggagttgaagcctccctcccggtaacttctgtctttgggcctgggtctgtcctccaagagaaccctgagaatgttggaaggatgaatctcgcacattctgccatgtcttctcttttacaggctgtttgacttctctgctgaagtgatttccagaaggactcatttgacacactattagatttaccacatctaatgaaatccaaggtgtagctataaagtgacaagctgtttttaatttatcacatacaccagaacttctatcctgcatcacttatatgtaaatgatgctgttaccaaaaacattaaggtagttcttgcgaatgccaccccactaagaaaactatttcattacttttgtaatccatctgtgagagtctgccccccagcttaaccacttcctttgatctgcacccaatgaagggaaaccccaaagtactgtctcaaatggtatttgaactacgccagtattgttggaataagtacattaattacttgaatgaatgaacacagcaccgtagaaatttcctttatggttacaccttgtatgtctaaagcattcaggccctgttctgtagtgtttcttatcctcacacagagtagaaaagcctgtttgctttatttaacttatacataaaagatgacatctgaaatatctgatgtgtattataataccagcttctgctctagaactactttgggtgaaatggtggtaatagcaaatgacctcctttaacaagacactcatctcaaacaatgccatttagttcaggagatctctaagtgtagctgtaaattttggggttaatttggcttatattggaccttttaaaagaaataaagttttttaatgcaat

SEQ ID NO: 22279 - DNA, 5471 bp, Homo Sapiens
ccggggtcccctttcacccaagtgagccagctcaggctgtctgcaaagccggaggtgcgggcagctccgggcattgcattggtgcggaggcttttatatgccagagaaccctgagtgtgcccctgacatgacaaggagccgtcgtcgttaggactaccgaccagactcccggaaatcatgttggtaggatcccagtctttttcgcctggagggcccaatgggatcattagaagccagtcctttgcgggtttcagcggcctccaggaaaggcgatccaggtgtaactccttcattgaaaattcctccgctctcaagaagcctcaggccaaactgaagaaaatgcacaatttaggccacaaaaacaacaatccccccaaagagcctcagcctaaaagggtggaagaagtctacagggccttgaaaaatggacttgatgaatatctggaggttcaccagacggagctggacaagttgacagctcagttaaaagatatgaaaagaaactctcgcctgggtgtactgtatgacctagacaagcaaattaaaacaattgaaagatacatgagacgcctggagtttcatataagtaaggtagatgaactctatgaagcttattgtatccagcgacgcctccaggatggtgccagcaaaatgaagcaagccttcgcaacatcccctgccagcaaagctgcccgggagagtctgacagagatcaatcggagcttcaaggagtacacagagaatatgtgcaccattgaagtggagctagagaatctgctgggagaattctccatcaagatgaaaggtctggctggctttgcacgcctctgtcctggagatcaatatgaaattttcatgaagtatggccggcagcggtggaaactgaaaggcaaaatagaagtaaatggcaagcagagctgggatggagaagaaacagtttttctgcccctgatagttgggttcatctccatcaaggtcacggagctcaaagggctagcaactcacatcctggtaggtagcgtgacctgtgagaccaaagagctgtttgcagcccgacctcaggtagtggctgtcgacatcaatgaccttggtaccatcaaactgaacctggaaatcacctggtatccatttgacatggaggacatgaccgcatcctcaggcgctgggaacaaggcagcagcccttcagaggagaatgtccatgtacagccagggtaccccggaaacgcccaccttcaaagaccactccttctttaggtggctgcatccttccccagacaagcccaggcggctgtctgtcttgagtgccttgcaagacactttctttgccaagctgcaccgcagccgctccttcagtgacctgccctccctcaggccgagtcccaaggccgtgctagagctctattcaaatctacctgatgacatctttgaaaatggaaaggcagccgaggagaaaatgccactgtcgctcagcttcagtgacctgcccaacggggactgcgccctcacctcccactcaacaggctccccttccaactcaacaaatccagaaattaccatcacccctgcggagtttaacctcagcagcttggcctcccagaatgagggtatggatgacaccagctcagcatcttccaggaactccctgggagaaggccaagagccaaagtcacacctgaaggaggaagacccagaggagcccagaaaacctgcctcggccccatctgaggcttgccgccgacagtcctcaggtgctggggctgagcacctgttccttgagaatgatgttgcagaagcacttctgcaagagtctgaggaggcctctgagctcaagcctgtggaactggacacttcggaaggaaacatcacaaagcagctggtcaagaggctcacatctgcagaggtgccaatggccacagacaggctgctctctgagggttctgttggtggagaatctgaaggctgcagatcctttctagatggaagcttagaggatgcttttaatgggcttttacttgcattagaaccacataaagagcagtataaagagtttcaggatctgaaccaagaagtcatgaatttggatgatattctaaaatgcaagccagcagtaagccgcagcaggtcttccagtttaagtctcacagttgaaagtgctttagaaagctttgatttcctgaacacctctgattttgacgaggaggaggatggtgatgaggtttgtaatgttggcggaggtgctgactcagtattttcagacactgagactgagaaacacagttacaggtcggttcacccagaagccagggggcatctcagtgaagcgctcactgaagacacaggagttgggaccagtgtggcaggaagtcctctcccactgaccacaggcaacgagagcctggacatcaccatcgtcaggcacctccagtactgcacccaactcgtgcagcaaattgttttctcaagcaaaaccccatttgtggcaagaagtctcttagagaagctttctaggcagatccaagtgatggagaaactcgcagctgtcagtgatgagaacataggaaatatcagttctgttgtggaagccataccagaatttcacaaaaagctgtctttgctgtcattctggaccaagtgctgcagccctgttggtgtctaccacagcccagcggacagagtgatgaagcagctggaggccagctttgccagaactgtcaacaaagaatatccaggacttgcagacccagtgtttcgaaccctggtgtcccaaattctggaccaggctgagcctctgctttcctccagcctgtcctcggaagtcgtcactgttttccagtattacagttacttcaccagccacggcgtcagtgacctggagagttacctgagccagctggccaggcaagtttccatggttcagactctgcaatcactaagagatgaaaaactgctacaaaccatgagtgaccttgctcccagcaacctcctggcccagcaggaagtactcaggactctggctctgctattaaccagagaggacaacgaagttagcgaggctgtgacgctttacttggcagcagcctccaaaaatcagcatttcagggaaaaggccttgctctattactgtgaagcactaacaaagacaaacctccagctccagaaagcagcttgcctggctctgaaaatccttgaggctactgaaagcattaaaatgctggtgacattgtgtcaatctgatactgaagaaatcagaaatgtggcctcagaaaccctcttgtctctgggagaagatgggcggctggcatatgaacaattggacaaatttcctcgagactgtgttaaagtcggaggtcgtcatggaactgaagttgccacagccttttaattacagattaactgcctaacagctgtcttaatatctggcccttttcatcaggatggtgctgtggtttgggctggaaattgtttagagcctgagagacacgacaactgaaataaaaatgtaggccaggtgcagtggctcatgcctgtaatcccagtactttgggaggccaacgcaggagaattgcttaagcccaggaggttcaagaccaacctgggcaacatagcaaggccctgtctctacaaaaaaaatagtttaattagtcgggcgtggtggcatgcacctgtagtcccagctacttgggaggctaaggtgggaggattgcttgagcccagaagattcaggctgcagtgagccataattgccccactgcactccagactgggtgacagagcaaaaccctgtctcaaaaaacaaaacaacaacaacaactaaaaaaacatgttatagaaagaattcagagtctcgtttcacagtacctatctacttttcctttggccaatatagaatagggctatggtataattcaaatagattacatcgtcgattgtgtctaataatactcagtgaaagagtccatcttatcttaatatgtatgaaatttaaaaatagccatctttgtacttttttgcaagtttctctataagcttgaaatagtcatgtgatacttcgacaaacatcatatgccttgcagtttttctcggtcgtgttctcagggttgagtagtccccttagctacctaactttactttcaatacaaagcacaaaaaagaatacttcaaataaaagtttgcctgcagaacctggcaaaatgacccattatgagagtttagatgttttaattttatgtgctcccagctactctggagtctgaggtgggaggatcacttgaggcagaggttgcagtaagctgagattacactactgcactccagcccatgtgacagaggaatgagagccagtctcaaaaaaaaaaaacaaaaaactcccataatttattttgtttcttttccccatcctgaaaattcccaaatcatgtttccattatggaaaaatgataagtaaatgactaagaactacattaagattatgcctatacacttaaacaaaaaactcaaagcttatgctttttttttttaattaatgagagctattttttatgatattcttaccataggggtgttttgctgctaagacaaatcaaaaccaaaagctgtagattcacaaacctgtgatgctctttgaggtggaggaacctagaagtcagagaaatcctaatggagtaggagtggaggaacatttaaagtggtccctccttctgtaaaaatgaccgtgggattagaaagaaggacatcctgaggggtggttactgcccccagggaaatcactcactggtaggattccctggccaaatagttcaaacatcaggtcccattattgcttcagtatcagagatgcaagttcattaagcaaagtacaagaccattcagtagctcttattaaaatatcttttcttcctctaaagagtgtacaaggtggggtatgccaaggtatcaaaacaatatatgtgagtgtaatttaaactgtggaatatcaactgtactatggacgtgtttgtatcatttagatgtcattttaaatatttacattttagcaagacttttaaaaaggactcatttcatttcaaagtgcaaattgtttgccaggcttctggcaaatggttctttcaactgtgaacttatagtgtacatatctgtatatttataaatattatatatattcatacatccttcagtttaaaggtacattgtacagtctgtagttaggaggtatagcctatagcttatgttaaatggttgaaatggttctttttatagaaagtcaaacacagatgttacaggattttgtgtttggtttgtcatttttttattttttattttgactattgcatgagtaattaattccagatcttttgtattcacttctgtattttatgtttggttgaggggtgcttttagttgtgtggcatttgtattcattgatctttcagtcatgtaagttaaaataaaaattatttttgaattactagc

SEQ ID NO: 22280 - DNA, 1151 bp, Homo Sapiens
  misc_feature (27)..(27): n is a, c, g, or t
  misc_feature (914)..(914): n is a, c, g, or t
gcacgagctagaacgaagtacagtgtntttctcagattacatgacattagtcaaccaatttagttgtaacacaaagtgagaaagccttaggtgttgaaggagtgtgaaaataaaaatctcttttcatgcagtttctgcttcattttccaaggattataatatgctgagtaaacttttggcactaaggaagccagctacaggccacgtaatgaaaactattcagaaaacagttcagcaaatactactatttgaatacagttcaaatcgtatttatataaatactctgcctacattatttaacccaaactggattattcaccattctttgaagatgccttgtgttttctgttatctacttctgctcgtgcagtttacttacaccttcaccctttcaaatcctaactcttcttcaagggcctgattcagattttaactttttaaaggctatctgaatcattcaaggagaagataccctttctctcataaaaacacttagagcaaactaccactattaaatcacttattgcatactgcctcagagccatgtgtccagttattctggtttttatctggtacccacacacacataatacttagtacatttccttatatgtaaataattagtaatgtaacacatcgtgtgaatgaaattgtgattagcaaagtatgacagctaaaaacaaaggaaattttgtatagtttaagtttttgtacagcagaaggtaatggaaaatatttgcaacatatgacagtgtttttaatgtcttaagtatatgaagaatttgtttcaattggtaagaaaagaccaactgaaaaataggcaaaacataccaaatttcgattcacaaaaagatacaaatggccaacaaaacatgaaacaccttgaaccccattggttacaaaaaatacaaatnaaaacaatgctgactgacaataaaaataatgtacatcttgctattatcagagttgtggggaaacctgtcatattttggtgaatagaatatgagttggtatatcacttttagggggccatttggcaatatcaaaaaccttgaaacgtaagtataaacttcagtttgttcgtataacctgtcattcacatattgagtgcctactatgtcctaaatattggaataacactaataaagctc

SEQ ID NO: 22281 - DNA, 5050 bp, Homo Sapiens
agaagaaggggagaggaggttgtgtgggacaaggtgctcctgacagaaggatgccacagctgagcctgtcctcgctgggcctttggccaatggcagcatccccgtggctgctcctgctgctggttggggcctcctggctcctggcccgcatcctggcctggacctataccttctatgacaactgctgccgcctccggtgtttcccgcaacccccgaaacggaattggttcttgggtcacctgggcctgattcacagctcggaggaaggtctcctatacacacaaagcctggcatgcaccttcggtgatatgtgctgctggtgggtggggccctggcacgcaatcgtccgcatcttccaccccacctacatcaagcctgtgctctttgctccagctgccattgtaccaaaggacaaggtcttctacagcttcctgaagccctggctgggggatgggctcctgctgagtgctggtgaaaagtggagccgccaccgtcggatgctgacgcctgccttccatttcaacatcctgaagccctatatgaagattttcaatgagagtgtgaacatcatgcatgccaagtggcagctcctggcctcagagggtagtgcccgtctggacatgtttgagcacatcagcctcatgaccttggacagtctgcagaaatgtgtcttcagctttgacagccattgccaggagaagcccagtgaatatattgccgccatcttggagctcagtgcccttgtgacaaaaagacaccagcagatcctcctgtacatagacttcctgtattatctcacccctgatgggcagcgtttccgcagggcctgccgcctggtgcacgacttcacagatgacgtcatccaggagcggcgccgcaccctccctagccagggtgttgatgacttcctccaagccaaggccaaatccaagactttggacttcattgatgtactcctgctgagcaaggatgaagatgggaagaagttgtccgatgaggacataagagcagaagctgacacctttatgtttgagggccatgacaccacagccagtggtctctcctgggtcctgtaccaccttgcaaagcacccggaataccaggagcgctgtcggcaggaggtacaagagcttctgaaggaccgtgagcctaaagagattgaatgggacgacctggcccagctgcccttcctgaccatgtgcattaaggagagcctgaggctgcatcccccagtccctgccgtctctcgctgctgcacccaagacattgtgctcccagacggccgggtcatccccaaaggcattatctgcctcatcagtgtttttggaacccatcacaacccagccgtgtggccggaccctgaggtctatgacccctttcgctttgacccaaagaacatcaaggagaggtcacctctggcttttattcccttctcagcagggcccaggaactgcatcgggcaggcgttcgcgatggcggagatgaaggtggtcctggggctcacgctgctggccttccgcgtcctgcctgaccacaccgagccccgcaggaagccggagctggtcctgcgcgcagagggcggactttggctgcgggtggagcccctgagctgagttctgcagagacccactctgaccccactaaaatgacccctgattcatcaaaagtgaggcctagaattaccctaagaccctgttccacagtcctgtattccatcctagatatctactcaaaataattgagacaagtgttcaaacagaaagacgcttgtgcggaatgttcatggcagccctattcacagtagcccaaacgatgaaaacaccccaagctatatattaccagataaaaggataaacacaatatggtccatccatacactggagtattacacagccataaaaaggaatgaagcagtgatccccactacactgtggatgaaccttgaatgcatgatactgaatgaaagacatcagatgcaaaaggtcacatagtgtactgtccttttatatggaaatttccagaacaggccaatctgaagagatgtatagtggattggtggctttcagcagctgtggggaggtgggactgaggagcgactgctaatcaggatggggttttctcctgggatggtgaaaatgttccggacctagatagtgatgaaggtagcacgacactgtgagtgcactaaatgctattgaattagacactttagaatggttgaaatagtgatttttatgtgaattctacctaaacatgctattacagctcatatatactttttccatctggattcttcacaaaagaatatgttgtgagcatctttccatgatattaaatcatcttaggaaacattattttgtgttcttcaaaatgtgcatgttaagtattcaaatcagtcttaaatttttaaaaatatgtaattttagaaaataatttaaaaggttttgtttcagtttgtaagatttcttttctggcactttaatggcttgaggtatcattatcagttacaaattgagttattcttcatcaaatgacttttggagtagagattttatttttatagcaatagatgcacagatattcctgtaagatacaggtgtggttagacacttttctagaacaggcatgccctgcaaactccacagacactgactgtttttgtcctatgaacaagcagaccactgagaagggagaaggtgacattttagctttcccaggtaaaagtggttttcatcctcacaccaattttatggactggacgttaactctcttgctcaaggtcactctgtgagtggaagagtggggataaatctggttcgtttggcatcagaggccatgacttttcctaccacagaagtaattttcaaagtaagtctctgccctaggcacatcagatcacctggggaccactccagagtgagtagacaagactttgacaggggtgcctaatttttttttttttttttgagatggagtctcgctctgttgcccaggctggagtgcggtggcatgatctcggttcattgcaacctccgcctcctgcgttcgggtgattgacctgtctcggcctcccgggtggctgggattgcaggcacccaccaccacgtccagctaattgttgtatttttgatagaggcggggtttcgccatgttacactggctggtgttgaactcctaacctcaggtgatccacctgcctcggcctcccaaagtgctgggattacaggcctggccccagtttgatagtttgttatcatgttatacgtacacttagaataatgatccagccatctcattctaacagcaatgagaacttaggctcccctctctactaaagtacaaaagttagctggtcgtggtggtgcgggcctgtggtcccagctgctcgggaggttgatgcaggagaatcacttgaaacccacaggcggaggttgcggtgggctggggtggtgccactgcgctccagcctgggggagggggacatagcgagactcggtctcaaaaacaaaacaaaacaaaacaaaacaaaacaaaacaaaacaaaacaaaacactgccaaactgtttccaaagcatctgcatcgtgtttaatttccataagtaacgtatgagaattctaggtcctccaaataattagcagtccttcgtagggtcagtttttgtttcagccttccttatgggtatgctgtggcatatccctgagattttaattcgcattttccagtgactaagggtgttgaaccactcgtgccttcctgtgcctatttgacactcctatattttctttggagaagagtctgttcaatcatctgctcattaaattttccttcgattgtttgccttcttattgttggattttgagagttctatgtacaagtcctttgtcagtcgtgtgatttgcaagtcttcttcctagactctgaagtttctttctttcatagagcaaatgttttaaatttttatgaggtaagacttctcagcattatttttggtgaattatgtttatactgccatatataggaactctttgcttaactggaggtcatggagattttctcctacattttcttttaaaagttttatagtttcagagtttacatgtaattccataatctccatttagttaaattttgtgtggggtgtgaactgtggtttaactgttttcttgtatatggatatccaattgtttcacacaatttttttgaaaagaatatccttggcagggcacggtagctcacacctgtaatcccagcactttaggaggtcaaggtgggcagatcatgaggtcaggagtttgagaccagcctggccaatatggtgaaaccacgtctctattaaaaatagaaaaattagccaggcgtggtggtgtgtgcctgtattcacagctgcttggatggctgaggcaggagaatcgcttgaacccaggagtcagaggtttcagtgagccgagattgtgccactgcactccagcctgggtgaaagagctagattctctctctcaaaaaaaaaaaaaaaaaggaaagaaagaaagaaaagaaaagaaaatccctttttgctttaacttgcccttgcaggtttgtagaaactcaattgttgaaatttgggtggataaatttctggattttctatctattccatgttggaccaataccacactgccctagtcactgttgcattatagtatatctttaaaggagtaatgggaatccttcaactacatttttttccccaataatttttggctattctgcttcttttgtgtttctatgtaaattttatcatcagtgtgtctatttctacaaatagtcctgatagggtttgaattgggatttctgtgaatctatagatcaatctgaggagacttaataatgatattgattctcccaattcatgaatatagtatacccctgtatttatttgttttcttgaatttcttttatcattgttttgtagttttcaccatgacagtcttgcacatattttgttaaatgtacagctgagaatttaattttttctggtgtacaatgctaataaaatggtgactttaaaag

SEQ ID NO: 22282 - DNA, 3763 bp, Homo Sapiens
gaggatccgggtaccatggggcgggaggagtaaagatggcggcgcgagggtctccgccctctgctccgggctgaagcgctctgagagaggcggcagcggcaactcgagccccaacagtaatttagtgttggtagttttggcagcagctgccgaggccggagcaatggcggaactggagcacctaggagggaagcgggcagagtcggcgcgaatgcggcgggcagagcagcttcggcgctggcggggctcgctgacagagcaggagcctgcggagcgacgaggcgcggggcggcagccgctgaccaggcgcgggagccccagggtccgcttcgaggacggtgctgtctttctggccgcctgctctagcggggacaccgacgaggtgagaaagcttctggcaagaggtgctgatatcaacacggtcaacgtggacggcttgacagccctgcaccaggcatgtattgatgaaaatttggacatggtgaagtttctggtggagaacagagccaatgtaaaccagcaagacaacgagggctggacaccccttcatgcagcagcttcctgtggctatctcaacatagcagagtatttcattaatcacggagccagtgtaggtattgtcaatagtgaaggtgaagttccctctgaccttgcagaagagccagccatgaaggatcttcttctggagcaagtaaagaagcaaggaattgatctagagcagtcaagaaaagaagaagagcagcagatgttgcaggatgcccgccagtggctcaacagtgggaaaatagaggatgtgaggcaggctcgctcaggggctacagcccttcatgtggctgctgccaagggctactctgaagtcctcagacttttaattcaggctggctatgaactcaatgttcaggattatgatggctggactcccctccatgctgctgcacactggggagtgaaggaggcttgctccatcctggcagaagcactttgtgacatggatattcgaaataaactgggccagacaccatttgatgtggctgatgagggtctcgtggagcatttggagttgctccagaagaagcagaatgtgcttcgaagtgaaaaggagacacggaataaactcattgagtcagatctgaacagcaagattcagagtgggttctttaagaacaaagagaagatgctctatgaggaggagacacctaagtcccaagaaatggaggaagaaaataaagaatctagtagctccagctcagaggaggaggaaggtgaagatgaagcttctgagtcagaaactgagaaggaggcagataaaaagccagaagcctttgtcaatcattccaactctgaaagcaagagtagtatcacagagcagataccagcaccagctcaaaataccttctctgcctcttctgctaggaggttctcttctggcctttttaacaagccagaagagcccaaagatgaatctccttcttcatggagattgggactgagaaaaactggcagccacaacatgctgagtgaggtggccaattccagggaacctataagggaccgaggctcttccatctatcgctcctcttcaagccctcgaatttctgctctactggacaacaaagataaggagagagaaaacaaaagctatattagttcactagcaccccggaagctcaacagcacaagtgatattgaagaaaaggagaacagagaatcagctgttaatctagtgaggagtggctcctatacccggcagctatggagggatgaagcaaaaggaaatgaaatcccacagacaattgctccctccacctatgtatcaacttacttgaaaaggactcctcacaaatcccaggccgacacaacagcagagaaaacagcagacaatgtctcttctagcaccccgctctgtgtgatcaccaatcgccctcttcctagcactgccaatggggttacagctactcctgtgctctccattactggaacagattcctctgtggaagccagggagaagaggaggtcctatctgactcctgtacgggatgaggaagcagagtctttacggaaagcacgctccagacaagctcggcagacacgaaggtctactcaaggtgtcaccctaacagaccttcaagaagcagaaaggacattcagccggtcgagggcagagaggcaagctcaggagcagcctcgtgagaagcccacagacactgaagggcttgaggggagccctgagaagcatgagccctcagcagttccagcaacagaagctggggagggccagcagccctggggcaggagtctggatgaagagcctatctgtcatcgcctgaggtgcccagctcagccagacaaacccaccacgccagcatctccttctacgtcaagaccctcactctacaccagttcccacctgctatggacaaatagattttcagtccctgattctgagagttcagagactaccacaaacactacaactgcaaaggaaatggacaaaaatgagaatgaagaagcagatttggatgagcagtcctctaagaggctgtccatccgagagaggaggcggcccaaggaacgacgaagaggcacaggcatcaatttctggacaaaggatgaggatgaaactgatggctctgaagaggtcaaagaaacgtggcatgaaagactttctaggttggaatcgggaggtagtaatcctacaaccagtgattcttacggtgaccgggcttcagcaagagcccgtcgggaggcccgggaggcccgcctagccaccctgaccagccgtgtagaagaagacagcaacagagattataaaaaactctatgagagtgctctgactgaaaaccaaaaactgaaaacaaaacttcaggaagcccagctagagctagcagatataaagtccaagcttgagaaggtggcccagcagaaacaagaaaagacctctgaccgatcatcagtgctggagatggagaaacgggagaggcgagccttggagcgcaaaatgtcagaaatggaggaagaaatgaaggtgttaacagaactgaaatccgacaaccagaggctgaaagatgaaaatggtgccctcatcagagtcatcagcaaactgtccaagtaggctaggctccagatttatgaggaaagaaagggacagcatttgctgcccccacccctcttttccagtccttgccttccaaccaaaagaaatggatgttttggtggaaggacacttctttctatcaccctctttagtcacctctatacactctacattttctctgcactttcaatgccctgttcttccaaacccctatcccaagttttatgacagttttaattgaagcatgattgtggtaattcgagccatctggagaatgctctggggagtacaccaggctcagctgtggacccctcaacttcctgctgctcagctactttgtccacattggatttggtccaaacatgtaagacttctaccctaatcagtatccttcagctttttacattaacccagtgtcctctgatataggtgagtcttgtggtagccactccaggatcctgattggggtgccaagagaaacagcaggatgttgaattgatcatcagatgccctctggaatggttagcatccaaggtgacagtgactgcattgaggcgctctattcttcttcacctctcaggaactgacttttattttttctatcaacacccagtaatctccctaactagttttaacccttattcctccctcatacctagccatttcccg

SEQ ID NO: 22283 - DNA, 3548 bp, Homo Sapiens
tggccgaagcagggggacagcaagggacgctcaggcggggaccatggcggacggcggctcggagcgggctgacgggcgcatcgtcaagatggaggtggactacagcgccacggtggatcagcgcctacccgagtgtgcgaagctagccaaggaaggaagacttcaagaagtcattgaaacccttctctctctggaaaagcagactcgtactgcttccgatatggtatcgacatcccgtatcttagttgcagtagtgaagatgtgctatgaggctaaagaatgggatttacttaatgaaaatattatgcttttgtccaaaaggcggagtcagttaaaacaagctgttgccaaaatggttcaacagtgctgtacttatgttgaggaaatcacagaccttcctatcaaacttcgattaattgatactctacgaatggttaccgaaggcaagatttatgttgaaattgagcgtgcgcgactgactaaaacattagcaactataaaagaacaaaatggtgatgtgaaagaggcagcctccattttacaggagttacaggtggaaacctacgggtcaatggaaaagaaagagcgagtggaatttattttggagcaaatgaggctctgcctagctgtgaaggattacattcgaacacaaatcatcagcaagaaaattaacaccaaatttttccaggaagaaaatacagagaaattaaagttgaagtactataatttaatgattcagctggatcaacatgagggatcctatttgtctatttgtaagcactacagagcaatatatgatactccctgtatacaggcagaaagtgaaaaatggcagcaggctctgaagagtgttgtactctatgttatcctggctccttttgacaatgaacagtcagatttggttcaccgaataagtggtgacaagaagttagaagaaattcccaaatacaaggatcttttaaagctttttaccacaatggagttgatgcgttggtccacacttgttgaggactatggaatggaattaagaaaaggttcccttgagagtcctgcaacggatgtttttggttctacagaggaaggtgaaaaaaggtggaaagacttgaagaacagagttgttgaacataatattagaataatggccaagtattatactcggataacaatgaaaaggatggcacagcttctggatctatctgttgatgagtccgaagcctttctctcaaatctagtagttaacaagaccatctttgctaaagtagacagattagcaggaattatcaacttccagagacccaaggatccaaataatttattaaatgactggtctcagaaactgaactcattaatgtctctggttaacaaaactacgcatctcatagccaaagaggagatgatacataatctacaataagggtcttagtgctttagaaaaaagttaaaattggaagtcattaaaaaaagactgttataatggtgtatatgttggggttttttttctaagcttctttgtcttaaattttaaaatagtgaatatgtttgagactccctttgacctttcagttccccaagttcattgttaactttgcatttgcaattggtgcaaaaatacagatttctgtcgtctgaatacacaaaaagttgtgtcataacttacccagatatgtttttctatcatttgaaacctttttagctactgtttgttttcattcaactaacaaacatattccaataataaaagcagtatatacatatttcctttctacagttacctctgattctcaacattttgtggggtagtgatttggcaagtgttttttaaataaaacaaatctcattgtaaagttatcagtcatttagtagaatagaaaagcaacatagagcatacaagaacatttgggatagagttgtgatttgtgaagaatttgtactttgatattgtggcggaaagtctagactgagtgtgtatgctggtaaactgtagacttttttttttttttttgagtccggctggttccaatcacagtagcttgattgctttcagccctcatcctctcacttgatcagttgttcaacagaatcagctgacataattgacacagtttattgggtgttaagtccgctctatagggatagtgactacttttttttttttttttttttttgctcttcttcctctcccctttctttatatgggtttaaatttaacataaagttgtttttataaggcttatttgtggctttaacttgtaagtctgattacatcattattgttccaaattcattatctctgtaggaacttttagttccattatatgaacactggataacctaattttttttaatgctttaaaaaaatggcaaaaagacgtcaggccaccctcatagtaagtggtgtagtattaaaatattttcacggaattaaaagtagcttgctgtcaaagaaacacctgagatgaattggtgtgaacgaattttgcaagtttaatttgatttatttcagagaaaatagaaaaaacaatgttagaaggttatttaaaatgatacttaaataaagaaagtgtgaggtctactttaaaaaaattcaaatgaagagaaaaagaaaaacagcattctagaaatggcatttctcctaattaattttccacttaatggaagattatcaattgtcctattttatgatcccaggactgaagacagttgtgggatatctgtcatatttatcctgtgagtcattgtgaataatgacatacagtactgaagtaatctgattttattctttggaaattcaatgcattggtcacactaataacatcaacatctgctatcacttatctttttaaaactaaccaaaaaaggctgggattacaggcatgagccactgcacccaactcctctttcgtctttctttaacacacactaggctctttgtgtattatgattcagtgctatttgtaactgtgtcccagtgaccaaattgcactcgactcgatcagctgttcatccatttcgtgttttttcctgtcaaacattaatccagcaaatatatgaggtatttaccaatttattttcttagtattacaaaataattcattagcataaagtacaatagtgaaatatttgagttgttcggaacctcaattaatcctgttttacatttcagacctaaagctggcaatcaggagaagaagcactttgttttaaatgtggagaagataacacttgattccatttcattgtcattagtgtattaaccagcaggagaggtgatgagccatttttcaaatgaaataccttttatttccatataatttttttattttagagttcaatagctgtttctatgattatcctcaatttccatatgttactgaatctgaaaaacatctttaaaattcaaacagttccattttctctcttgtaagtgttaaatgtgataaaagtacatattttaaattgttttcagctcttggatatagcagcaataaaaacactaatttgtgggtatttaagaaaacctggagaataaactcatactttaaaagatc

SEQ ID NO: 22284 - DNA, 2921 bp, Homo Sapiens
cagcgagcgccgtcgtctgcccgggcccgcccatcggggtccccaaccccatccggaccccgccgcccgagcgcgcggccccggaagcacccgcctcccggcatggtgctcaaggccttcttccccacgtgctgcgtctcggcggacagcgggctgctggtgggacggtgggtgccggagcagagcagcgccgtggtcctggcggtcctgcactttcccttcatccccatccaggtcaagcagctcctggcccaggtgcggcaggccagccaggtgggcgtggccgtgctgggcacctggtgccactgccggcaggagcccgaggagagcctgggccgcttcctggagagcctgggtgctgtcttcccccatgagccctggctgcggctgtgccgggagagaggcggcacgttctggagctgcgaggccacccaccggcaagcgcccactgcccccggtgcccctggtgaggaccaggtcatgctcatcttctatgaccagcgccaggtgttgctgtcacagctacacctgcccaccgtcctgcccgaccgccaggctggagccaccactgccagcacggggggcctggctgccgtcttcgacacggtagcacgcagtgaggtgctcttccgcagtgaccgctttgatgagggccccgtgcggctgagccactggcagtcggagggcgtggaggccagcatcctcgcggagctggccaggcgagcctcgggacccatttgtctgctgttggccagcctgctgtcgctggtctcagctgtcagtgcctgccgagtgttcaagctctggcccctgtccttcctcgggagcaaactctccacgtgcgaacagctccggcaccggctggagcacctcacgctaatcttcagtacacggaaggcggagaaccctgcccagctgatgaggaaggccaacacggtggcctctgtgctgctggacgtggccctgggcctcatgctgctgtcctggctccacgggagaagccgcatcgggcatctggccgacgccctcgttcctgtggctgaccacgtggccgaggagctccagcatctgctgcagtggctgatgggtgctcccgccgggctcaagatgaaccgtgcactggaccaggtgctgggccgcttcttcctctaccacatccacctgtggatcagctacatccacctcatgtcccccttcgtggagcacatcctttggcacgtgggcctctcggcctgcctgggcctgacggtggccctgtccctcctctcggacattatcgccctcctcaccttccacatctactgcttttacgtctatggagccaggctgtactgcctgaagatccatggcctgtcctcactgtggcgtctgttccgggggaagaagtggaacgttctgcgccagcgcgtggactcctgttcctatgacctggaccagctgttcatcgggactctgctcttcaccatcctgctcttcctcctgcctaccacagccctgtactacctggtgttcaccctgctccggctcctggtggtcgccgtgcagggcctgatccatctgctggtggacctcatcaactccctgccgctgtactcactgggtcttcggctctgccggccctacaggctggcggctggcgtgaagttccgtgtcctccggcacgaggccagcaggcccctccgcctcctgatgcagataaacccactgccctacagccgcgtggtgcacacctaccgcctccccagctgtggctgccaccccaagcactcctggggcgccctgtgccgcaagctgttccttggggagctcatctacccctggaggcagagaggggacaagcaggactgagggaactgctggctcgcctggcaccaccacacggccacagccagccatctgctctgccagggtggcaccagctcagctggcgcatgtcccgtgctttgtggacgctgctgtgtgctcctgaacacggcaggccctgctatcacaccttgggcttggaggtcattgggagtgagcagatgtgggggtggccagccaggctggccgcactccatcactggcactgcctgccttgggacccgcttcccacctgctgcggtcaccatggtggcgagcacagcaaccccaggtgtccagagcactgccccatgcccaccctgcatacccaggtccagagggtccgtccaccacagcagccccaggtggagggctggtctccctgggggctccccagtggctctgccctggctgtgggggtggagggaccttgccaggatgaaccctccagtcccaggcaccctctagctccctcagccgaacagcaccctgcatctgggggattgaagcagtcgctgacccccgtccccagcgggcccgggccctcactccctgaaccacacggggtttatttgcggatgttccctggagaggtcgctttgtgaagaaaccatcagcaggctgtgagcatcgccaggctgctgtgggggcgggagcagcctcagtgtcaagggcctgcccactgacccagccgtacctattcgtccacggtgccccgtagcagcaggtcctgcggccaaatctgtctcccttcatgggcctcccagggaaggaggaagccctgctgtgcagacacctctgtggccccccaggggtgtgagcggcctggggagggggccgtggcactgaggccgaaagtgcctgccagacggcacggtctgggtgcgggtgttccctgtgagcccgagtccgcttcaggaggggagcctgcaggtgccggctggtgaggggatgacgcgctgtgggtgggaggaggcagcgcccatctcagcagcaccaggactgcctgggactccctggcaacccagcaccggggaagccgtcagctgctgtgacaataaaacctgccccgtgtctgg

SEQ ID NO: 22285 - DNA, 2922 bp, Homo Sapiens
ggacaccgggccatgcacgcccccaactgaagctgcatctcaaagccgaagattccagcagcccaggggatttcaaagagctcagactcagaggaacatctgcggagagacccccgaagccctctccagggcagtcctcatccagacgctccgctagtgcagacaggagcgcgcagtggccccggctcgccgcgccatggagcggatccccagcgcgcaaccaccccccgcctgcctgcccaaagcaccgggactggagcacggagacctaccagggatgtaccctgcccacatgtaccaagtgtacaagtcaagacggggaataaagcggagcgaggacagcaaggagacctacaaattgccgcaccggctcatcgagaaaaagagacgtgaccggattaacgagtgcatcgcccagctgaaggatctcctacccgaacatctcaaacttacaactttgggtcacttggaaaaagcagtggttcttgaacttaccttgaagcatgtgaaagcactaacaaacctaattgatcagcagcagcagaaaatcattgccctgcagagtggtttacaagctggtgagctgtcagggagaaatgtcgaaacaggtcaagagatgttctgctcaggtttccagacatgtgcccgggaggtgcttcagtatctggccaagcacgagaacactcgggacctgaagtcttcgcagcttgtcacccacctccaccgggtggtctcggagctgctgcagggtggtacctccaggaagccatcagacccagctcccaaagtgatggacttcaaggaaaaacccagctctccggccaaaggttcggaaggtcctgggaaaaactgcgtgccagtcatccagcggactttcgctcactcgagtggggagcagagcggcagcgacacggacacagacagtggctatggaggagaatcggagaagggcgacttgcgcagtgagcagccgtgcttcaaaagtgaccacggacgcaggttcacgatgggagaaaggatcggcgcaattaagcaagagtccgaagaaccccccacaaaaaagaaccggatgcagctttcggatgatgaaggccatttcactagcagtgacctgatcagctccccgttcctgggcccacacccacaccagcctcctttctgcctgcccttctacctgatcccaccttcagcgactgcctacctgcccatgctggagaagtgctggtatcccacctcagtgccagtgctatacccaggcctcaacgcctctgccgcagccctctctagcttcatgaacccagacaagatctcggctcccttgctcatgccccagagactcccttctcccttgccagctcatccgtccgtcgactcttctgtcttgctccaagctctgaagccaatcccccctttaaacttagaaaccaaagactaaactctctaggggatcctgctgctttgctttccttcctcgctacttcctaaaaagcaacaaaaaagtttttgtgaatgctgcaagattgttgcattgtgtatactgagataatctgaggcatggagagcagattcagggtgtgtgtgtgtgtgtgtgtgtgtgtgtgtatgtgcgtgtgcgtgcacatgtgtgcctgcgtgttggtataggactttaaagctccttttggcatagggaagtcacgaaggattgcttgacatcaggagacttgggggggattgtagcagacgtctgggcttttccccacccagagaatagcccccttcgatacacatcagctggattttcaaaagcttcaaagtcttggtctgtgagtcactcttcagtttgggagctgggtctgtggctttgatcagaaggtactttcaaaagagggctttccagggctcagctcccaaccagctgttaggaccccacccttttgcctttattgtcgacgtgactcaccagacgtcggggagagagagcagtcagaccgagctttctgctaacatggggaggtagcaggcactggcatagcacggtagtggtttggggaggtttccgcaggtctgctccccacccctgcctcggaagaataaagagaatgtagttccctactcaggctttcgtagtgattagcttactaaggaactgaaaatgggccccttgtacaagctgagctgccccggagggagggaggagttccctgggcttctggcacctgtttctaggcctaaccattagtacttactgtgcagggaaccaaaccaaggtctgagaaatgcggacaccccgagcgagcaccccaaagtgcacaaagctgagtaaaaagctgcccccttcaaacagaactagactcagttttcaattccatcctaaaactccttttaaccaagcttagcttctcaaaggcctaaccaagccttggcaccgccagatcctttctgtaggctaattcctcttgcccaacggcatatggagtgtccttattgctaaaaaggattccgtctccttcaaagaagttttatttttggtccagagtacttgttttcccgatgtgtccagccagctccgcagcagcttttcaagatgcactatgcctgattgctgatcgtgttttaactttttcttttcctgtttttattttggtattaagtcgttgcctttatttgtaaagctgttataaatatatattatataaatatattaaaaaggaaaatgtttcagatgtttatttgtataattacttgattcacacagtgagaaaaaatgaatgtattcctgtttttgaagagaagaataatttttttttctctagggagaggtacagtgtttatattttggagccttcctgaaggtgtaaaattgtaaatatttttatctatgagtaaatgttaagtagttgttttaaaatacttaataaaataattcttttcctgtggaag

SEQ ID NO: 22286 - DNA, 4299 bp, Homo Sapiens
gcgggcctccctgtaccctctccttccctcacctctttcctccccacctcccctcttctcggtttcctcccccatccccttgactctcccctcccagccctcgctctctcgctcgccctcagcggggcccccgccatgacggaggcgggtgccggtgccgttgccgccgctgccgtcgcagggggggagtcgggttcccagaaagtagcttgatgagtgtccaaagtagcagtggaagtttggaggggccgccatcttggtcccagctctccacgtctccaaccccgggctcggcggcggcggccaggtccctgctgaatcacacgccgccatccgggaggcccagggaaggtgcaatggatgagcttcatagtctggatccaagaaggcaagagttattggaagctagatttactggagttgcaagtgggagcactggaagtacgggcagttgcagtgttggagctaaagcctcaacaaataacgaaagctctaatcacagttttggaagcttggaatctttaagtgataaagaatcagagacaccggagaagaaacaatcggaatcatccaggggaagaaagagaaaagcagaaaaccagaatgaaagtagtcaggggttccccaacctcccggtcttccagtccttggcctattgggaaatgggtcgtacagcaggaggaaaaagtattgggggacgtggccacaaaattagcgactattttgaataccagggtggaaatggctcaagtccagtaagaggcatacctcctgcaatccgttctcctcaaaattcacattcacattccactccttcctcatctgttcgaccgaatagcccttctcctactgcattagcatttggggaccaccctattgtacaaccaaagcaattatcctttaaaattattcagactgatctcacgatgctgaaattagcagcattagaaagtaataaaatcctagacctggaaaagaaggagggacgtatagatgatttgctcagggccaactgtgatctcagacggcaaatagatgaacaacaaaaattacttgacaaatacaaggaacgattaaataagtgcatatcaatgagcaagaaacttcttatagaaaagagtacacaagaaaagctgtcaagcagagagaagagtatgcaagatcgattacgcctcgggcactttacaacagttagacatggcgcttcatttactgaacaatggacagatggttttgcatttcagaatcttgtgaagcaacaagaatgggtgaatcagcaaagggaagatattgaaaggcaaaggaaacttctagccaaacgcaaacctcccacagctaataattctcaggcaccctctaccaattctgagccaaaacaaaggaaaaacaaagcagtcaatggagctgagaatgatccctttgttagaccaaatttgccacaactgttgacgttggcagaatatcatgaacaggaagaaattttcaaacttagactaggacatctcaaaaaggaagaggcaggaatccaggcagaacttgaacgtttggaaagagtcaggaatcttcacatacgtgagctgaaaagaatacacaatgaagataattcacagttcaaagatcatccaacattaaatgaaagatatttattacttcatctgcttggtagaggtggctttagtgaagtggataaggcttttgacctttctgaacaaagatatgctgctgtgaagatacatcagcttaataaaagctggagagatgagaagaaagaaaactaccacaaacatgcctgcagagagtatagaatacacaaagaactggatcaccccagaatagttaaactctatgattatttctccttggatacagatacgttttgtacagtgttagaatactgtgaaggcaatgacttggatttctatctgaagcaacacaagttaatgtcagagaaagaagctcggtctattgtaatgcagattgtaaatgcattaagatatctcaatgagatcaaaccccctattatacattatgatcttaagccaggaaacatcctactggtagatggaacagcatgtggtgaaatcaaaatcactgattttggtctgtccaagattatggatgatgatagctatggtgtagatggaatggttctaacttcccagggggcaggcacttactggtatttacctcctgagtgttttgtggttggaaaagagccaccaaagatttccaacaaggttgatgtatggtcggttggagtcatcttctatcagtgtctttatggtagaaagccatttggtcacaatcaatctcaacaagacattcttcaagagaatacaatattaaaagccacagaagtccagttccctgtaaaaccggttgtaagcagtgaagccaaggcatttattagacgctgtttggcatatcgaaaagaagatcgatttgatgtgcaccagctggcatgtgacccataccttctcccacacatgcgaagatcaaattcttcaggaaacctacacatggctgggctgacagcatcccctacacccccttcttcaagcataattacttactgactttcctccaagattggcatgatatctttgaatttgcttccagatgcacacttaagtttgagagcatttgagtgtttgttttctttttcttttttttttttttttttttttttacacaagacgtggttaagaactgtttgtgaactgaagttcctcatagtgtcatttgtatgagagaggatcatggacaatgaataaatgcacacttctgactataattttgagcagtgaaggaaggatgactgcctgttacacaggaacaggaataccatgttaagatagaggaaaaaaattttgtttatttgggggaacactgtaaataacgtttataatacttaaatacatttggttgttactagagagttctaatatgaagggtagtttttcattatttaaaaacacatggataaatatgagacatatttctaacatacgaactatagtgcctggatacattcttcagcatttggcagttaatctgctgaaaccaaagtaagaactgaatgacagtgacagttgtgttttatagtaatagaatgtgacagttagaatctttggacaaagttaggctttgtcatttgcctattcagacttttaccaagttggtcctcgagatcacatgtccgttttctttcactggttatattaaagggagagctattatttctaaatactttacacctttgacaagaatgagctgcttgtgttgaaatcagttgaattcactaaattataatattgccagtgttttcaacacgttagaattgataacaggtatttttcttttgttaccaggccttgttcatcaaaacaggtgacagtgagtaaccaaatgcagaccagttctatgcaggataatgataaattcccttctagctctattgtaaattgttgtacagatgtcatatttcaattactaagtttcagcagcttattcttgtacaaatgtttaaaatatggcttttctaattggatattgtattttttttaagtcttcttgaaggcactctaattgctgctaaatgatgttgcttctttgctaaaaaattaaatgacctagaaggtgcaagttgactgtacatcatagatattaaaaagcagacagtcattaacaatcaagatgtaaaagtgatccatgttggacataattgagtttttaaatcagtttattgggttctagggctgtagaacacatagatactagatttttaatttgttcatggttattctacatttctagaaagttcttatcagcaagatggtcccataaggaaatttcttgtggtttgtccagatttgttaaaatgtgaacgttttctaactgcctcgtagggtagaaaccaatatttttcaggatgctgtatttcactcctgtaaggactttttctttattgtcacattcataatgctgatacttacatgtaagttgttcatgttgcagaaaaaggttatacgtaccacggattctctttaatattgtacagttaaactgtatttctgatgttgcaagccattttgttttttcattggacatagacacattgtctctttaaaatgctgctgaaattgtagagagtatagccaaaacagtaataaacaatgacaggtaaaatgtaaagactatgaaaattacattggaagggagctttcaagatggtaggatattgactaactgagctccttcacttaaaaatcagctggataaattccttaagtatacttc

SEQ ID NO: 22287 - DNA, 2416 bp, Homo Sapiens
atctaggctcagttatgtttactaacatgaatcttacttaacagcatgaggcaagatctacgctcaagatggcgctgctcgcgatgcattcttggcgctgggcggccgcggcggctgctttcgaaaagcgccggcactccgcgattctgatccggcctttagtctctgttagcggctcaggtccgcagtggaggccacatcaactcggcgccttgggaaccgctcgagcctaccagattccagagtcattaaaaagtatcacatggcagagattgggaaaaggcaattcaggacagttcttagatgctgcaaaggctctccaggtatggccactgatagaaaagaggacatgttggcatggtcatgcaggaggaggactccacacagacccaaaagaagggttaaaagatgttgatactcggaaaatcataaaagcaatgctttcttatgtgtggcccaaagacaggccagatctacgagctagagttgccatttcgctgggatttttgggtggtgcaaaggccatgaatattgtggttcccttcatgtttaaatatgctgtagacagcctcaaccagatgtcgggaaacatgctgaacctgagtgatgcaccaaatacagttgcaaccatggcaacagcagttctgattggctatggtgtatcaagagctggagctgctttttttaacgaagttcgaaatgcagtatttggcaaggtagcccagaattcaatccgaagaatagccaaaaatgtctttctccatcttcacaacctggatctgggttttcacctgagcagacagacgggagctttatctaaggctattgacagaggaacaaagggtatcagttttgtcctgagtgctttggtatttaatcttcttcccatcatgtttgaagtgatgcttgtcagtggtgttttgtattacaaatgcggtgcccagtttgctttggtaacccttggaacacttggtacatacacagcattcacagttgcagtcacacggtggggaactagatttagaatagaaatgaacaaagcagataatgatgcaggtaatgctgctatagactcactgctgaattatgaaactgtgaagtatattaataatgaaagatatgaagcacagagatatgatggatttttgaagacgtatgagactgcttcattgaaaagtacctctactctggctatgctgaactttggtcaaagtgctattttcagtgtcggtttaacagctataatggtgctcgccagtcagggaattgtggcaggtacccttactgttggagatctagtaatggtgaatggactgctttttcagctttcattacccctgaactttctgggaactgtatatagagagactagacaagcactcatagatatgaacaccttgtttactctactcaaggtagacacccaaattaaagacaaagtgatggcatctccccttcagatcacaccacagacagctaccgtggcctttgataatgtgcattttgaatacattgagggccagaaagtccttagtggaatatcctttgaagtccctgcaggaaagaaagtggccattgtaggaggtagtgggtcagggaaaagcacaatagtgaggctattatttcgcttctatgagcctcaaaagggtagcatttatcttgctggtcaaaatatacaagatgtgagcctggaaagccttcggagggcagtgggagtggtacctcaggatgctgtcctcttccataatactatttattacaacctcttatatggaaacatcagtgcttcacctgaggaagtgtatgcagtggcaaaattagctggacttcatgatgcaattcttcgaatgccacatggatatgacacccaagtaggggaacgaggactcaagctttcaggaggagaaaagcaaagagtagcaattgcaagagccattttgaaggaccccccagtcatactctatgatgaagctacttcatcgttagattcgattactgaagagactattcttggtgccatgaaggatgtggtcaaacacagaacttctattttcattgcacacagattgtcaacagtggttgatgcagatgaaatcattgtcttggatcagggtaaggtagccgaacgtggtacccaccatggtttgcttgctaaccctcatagtatctattcagaaatgtggcatacacagagcagccgtgtgcagaaccatgataaccccaaatgggaagcaaagaaagaaaatatatccaaagaggaggaaagaaagaaactacaagaagaaattgtcaatagtgtgaaaggctgtggaaactgttcgtgctaagtcacataagacattttctttttttgttgttttggactacatatttgcactgaagcagaattgttttattaaaaaaatcatacattccc

SEQ ID NO: 22288 - DNA, 3801 bp, Homo Sapiens
tagactacatgaggaaataattgacttttataacttcatgtccccttgtcctgaagaagcagctatgagaagagaggtggtgaaacggatcgaaactgtggtgaaagacctttggccgacggctgatgtacagatatttggcagctttagtacaggtctttatcttccaactagcgacatagacctggtggtcttcgggaaatgggagcgtcctcctttacagctgctggagcaagccctgcggaagcacaacgtggctgagccgtgttccatcaaagtccttgacaaggctacggtaccaataataaagctcacagatcaggagactgaagtgaaagttgacatcagctttaacatggagacgggcgtccgggcagcggagttcatcaagaattacatgaagaaatattcattgctgccttacttgattttagtattgaaacagttccttctgcagagggacctgaatgaagtttttacaggtggaattagctcatacagcctaattttaatggccattagctttctacagttgcatccaagaattgatgcccggagagctgatgaaaaccttggaatgcttcttgtagaattttttgaactctatgggagaaattttaattacttgaaaaccggtattagaatcaaagaaggaggtgcctatatcgccaaagaggagatcatgaaagccatgaccagcgggtacagaccgtcgatgctgtgcattgaggaccccctgctgccagggaatgacgttggccggagctcctatggcgccatgcaggtgaagcaggtcttcgattatgcctacatagtgctcagccatgccgtgtcaccgctggccaggtcctatccaaacagagacgccgaaagtactttaggaagaatcatcaaagtaactcaggaggtgattgactaccggaggtggatcaaagagaagtggggcagcaaagcccacccgtcgccaggcatggacagcaggatcaagatcaaagagcgaatagccacatgcaatggggagcagacgcagaaccgagagcccgagtctccctatggccagcgcttgactttgtcgctgtccagcccccagctcctgtcttcaggctcctcggcctcttctgtgtcttcactttctgggagtgacgttgattcagacacaccgccctgcacaacgcccagtgtttaccagttcagtctgcaagcgccagctcctctcatggccggcttacccaccgccttgccaatgcccagtggcaaacctcagcccaccacttccagaacactgatcatgacaaccaacaatcagaccaggtttactatacctccaccgaccctaggggttgctcctgttccttgcagacaagctggtgtagaaggaactgcgtctttgaaagccgtccaccacatgtcttccccggccattccctcagcgtcccccaacccgctctcgagccctcatctgtatcataagcagcacaacggcatgaaactgtccatgaagggctctcacggccacacccaaggcggcggctacagctctgtgggtagcggaggtgtgcggccccctgtgggcaacaggggacaccaccagtataaccgcaccggctggaggaggaaaaaacacacacacacacgggacagtctgcccgtgagcctcagcagataatggctcctggctgcgtcagcctcccccacccctctgcagactgccccgcggcctcggccaccggcaggggaaccgagaccagcaccccgcacgtcagccgggctcgcggcacgcccgccgctgatcactctgcatgtttcttcgtgtggtggtcgcgtccatcttcaagaacagctcgttgtgctcatctgtgaagccttattaaacgtggacgttgttttctgccttcccaggattcttccttcagtgctgaggcaggttgggctcaggaactgcagggacgtgaacatgcgcttgcggtttgaggtagccgtgtctgttccttcgcggtttgctattttcatttcctgttcgtcaaagcagcagaggagatcaaaccccgttcgtgtgtctttcctccatggataagcttgggaggtcattgttttactgccctcacattttgtttgaaatttcagaactgtttttctatgtaaatattgaaaacttatgatttgtgcaataactcagatattttttatttaatttcctattttcacataagttatatttaagggaggagggaattttttttaaacaagcttaggtcctttcccgagctgcattttctaagttgggtcatcgtgtcggctggttgtctgacgagcatcgttacaaacaccatgatgaggggtttggggttttattttgatgtcttttcttttggtcggaagtgagtgaaggagccaggtcgccctgaaggttttccaaagggcttggctccagagccacctggcagactgcccgtggccctgctgtcgggccccaggccgttgtcctgctctgaccacagagttttaatgttttggttttcacttcttttaaactggacaacaaatccagcatttcaagtgccagaagtataactttctaaggagagaagggttgtcacattataaaatctttaggaaaatgtgaactggaaaacgcttcggtcagttttagtgacatagcctgtgatgatgggtctggtgactattattgcggaccgtggtacccagttttaggaatgtggagaaaggaattctgttgattccgttgaggaatctgtagcgtatgcattcgttctgttaagagcaaatctaggagaagtgcttcagctgcccagtgcgccgtggggagtgttttaacggatcgtgtcgcaggagagcacagcccagcgttggggccgggaccgctggcgcccgacgtcggaagcatacaggtatactatgcaagtgtattctgccacaacaaccactgtctttgttacctttttttgaacaagaatatatccatcctgcctaaccctgagtttttggagcaccacagttgtcctgggagttggttgcatcttgtaggccatctgacttcctgtttttaaaacgggggtctggtcttgctaaacactacaggtaggttggtctttgaagtccactagtggagaatgtcaagacaagatacttattaccatgacatctgatgcatgtgcagcagtggggagttctagattgatctctgaatgtgatcgacgcccagcaaggacaagctttaaaatgtctgcggtctgcccttttgaagcaggactggctcactctgtcattgggagctgtcagctgcgactgcaggttctctaggaggcattccagaatagagtagcacactgtgtctgcagttctcgatgaccgaaagttatcaaaaatatttaaaatatttaaattgtgaacctattgataaagaatatttataaaaactgatctgtaggcctgtactaatctctacgcattagcaatattgactgtaaacccacattaaggaaaccactacgggtctggcagtgcgtgtcccgtggggtgtgcattttaaaactcgattcatagacacaggtaccatgttccatttccgtcatggtgaagcaaatgaattggcctggctaccactgtggtcgcgtgctacaggtttgacaaaaagatatcatgtttcgatttttttgtgtgtggacaacaatatggaagctaaaattgacatatttttatgtaaagtttttctattctttgatttttaataaactttggaaaccaaaaaaaaaaaaaaaaaaaaaaaaaaaaaaaaaaaaa

SEQ ID NO: 22289 - DNA, 1258 bp, Homo Sapiens
ggctctggactggggacacagggatagctgagccccagctgggggtggaagctgagccagggacagtcacggaggaacaagatcaagatgcgctgtaactgagaagcccccaaggcggaggctgagaatcagagacatttcagcagacatctacaaatctgaaagacaaaacatggttcaagcatccgggcacaggcggtccacccgtggctccaaaatggtctcctggtccgtgatagcaaagatccaggaaatactgcagaggaagatggtgcgagagttcctggccgagttcatgagcacatatgtcatgatggtattcggccttggttccgtggcccatatggttctaaataaaaaatatgggagctaccttggtgtcaacttgggttttggcttcggagtcaccatgggagtgcacgtggcaggccgcatctctggagcccacatgaacgcagctgtgacctttgctaactgtgcgctgggccgcgtgccctggaggaagtttccggtctatgtgctggggcagttcctgggctccttcctggcggctgccaccatctacagtctcttctacacggccattctccacttttcgggtggacagctgatggtgaccggtcccgtcgctacagctggcatttttgccacctaccttcctgatcacatgacattgtggcggggcttcctgaatgaggcgtggctgaccgggatgctccagctgtgtctcttcgccatcacggaccaggagaacaacccagcactgccaggaacagaggcgctggtgataggcatcctcgtggtcatcatcggggtgtcccttggcatgaacacaggatatgccatcaacccgtcccgggacctgcccccccgcatcttcaccttcattgctggttggggcaaacaggtcttcagcaatggggagaactggtggtgggtgccagtggtggcaccacttctgggtgcctatctaggtggcatcatctacctggtcttcattggctccaccatcccacgggagcccctgaaattggaggattctgtggcgtatgaagaccacgggataaccgtattgcccaagatgggatctcatgaacccacgatctctcccctcacccccgtctctgtgagccctgccaacagatcttcagtccaccctgccccacccttacatgaatccatggccctagagcacttctaagcagagattatttgtgatcccatccattccccaataaagcaaggcttgtccgacaaa

SEQ ID NO: 22290 - DNA, 6280 bp, Homo Sapiens
ggtgaaggacctgggcagcctcaatgggacgtttgtgaatgacatgcgcatcccggaccagaagtacgtcacgctgaagctcaacgatgtcatccgctttggctacgattccaacatgtatgtgctggagcgtgtgcagcaccgagtcccggaggaggcactcaagcatgaaaagtacaccagccagctgcaggtgagcgtgaagggtttggcgcccaagaggagcgaggcactgccggaacacacaccatactgcgaggcctcgaaccccaggccggagaagggggaccggagaccaggaacagaggcagcctcttaccgcacacccctgtatgggcagccctcctggtggggtgaggacgatggtagcacgctgcctgatgcccagcgccagggagagccctacccagagcgccccaagggacccgtgcagcaggacggggagctccacggcttccgcgcccctgctgagcctcagggctgctcgttccggcgggagcccagctacttcgagatccccacgaaggagaccccgcagccgtcgcagccccccgaggtgccggcacacgagatgcccacgaaggatgcagaggcaggtgggggcggagcggcccctgtggtgcagagccacgcctccttcaccatcgagtttgatgactgcagccctggcaagatgaagatcaaggaccatatcaccaagttttccctgcgccagcggcggcccccgggcaaggaggccacacctggcgagatggtgtcggctgagaccaaggtggccgactggctggtgcagaatgacccgagcctgctgcaccgggttggccctggggatgaccgccacagcaccaagagcgacctgcctgtccacacccgcaccctgaagggccacaagcacgaggacggcacgcagagtgactcagaggaccccctggccaaggcggcctcggccgctggggtgcccttggaggccagcggggggcaggtgcggctgcagaggcagatcaagcgggacccccaggagctactacataaccagcaggcctttgtcatcgagttcttcgacgaggacacgccccgaaagaagcgctcccagtccttcacgcacagcccgtccggggaccccaaggccgacaagcgccgtggcccaacgccggccgatagggaccgccccagtgtcccagccccagtccaggcagggggccgcagctcggggccacagagggccggctcgctcaagcgggagaagacagaggaacggctgggcagcccctcgcccgcctcccgaacccctgcccgccccttcggaagcgtggggcgccgctcccgcctggcccaggacttcatggcccagtgtctgcgggagagctccccggccgcccggcccagccccgagaaggttcctccggtgctgcccgctcccctgacaccccatgggaccagccccgtgggccccccgaccccaccgcccgcccccacggacccccagctgaccaaggcacggaaacaggaggaggatgacagcctcagtgacgcagggacatacaccatcgagaccgaggcgcaggacacggaggtggaggaggctcggaagatgatcgaccaggtctttggggtgttggagtcccctgaactctccagggcatcttcggccacctttcgcccagtcatcagaggggacagagatgagtctgatgacgggggcgtggcccagcggatggcgctactgcaggagtttgcctcccggccactgggtgcggccccccaggcggagcaccagggcctcccggtgccgggctcccctgggggtcagaagtgggtgtcccgctgggccagcctggctgacagctactcagacccgggcctcacagaggatggcctgggacgtagaggcggggagccggaggggtccctgcctgtgcgcatgcggcgacggctccctcagctgcccagtgagagggctgacagccctgcgggcccagagagcagcaggaggagtgggcctgggccaccggagctggacagtgagcagcccagccgcctcttcggccaggaggagttggatcctgacagcctcagcgatgccagtgggtcggacgggggccgaggccccgagccaggggtggagccacaggacagcagacgcaggagcccccaggaggggcccacgtggagcaggggtcggcgctcaccaagggcccccggggagccaactcccgcctctttcttcattggggaccagaatggggacgctgtgttatctaggaaactgcttgcggctccaggggatggggagggcctagggcagacagcccagcccagccccccagcacgggatggcgtctatgtcagtgccaatgggagaatggtcatccagctacggcctggacggtccccagaacccgacggccctgccccagcctttctccggcaagagagcttcactaaggagccagccagtggtcccccagcgcccggcaagcccccccacatctccagccacccgcttctacaggacctggccgctacccgggccgcacgcatggacttccactcccaggacacccacctgatcttgaaggagacggagacggccctggcggccctggaggcccgactcctctctaattctgtggatgccgagtgtgaggggggcagcaccccgaggccgccggaggacgccctgtctggggactcggacgtggacacagccagcaccgtcagcctgcgtagtggcaagagcgggcccagccccacaaccccccagcctctgcgggcacagaaggagatgtcgccatccccgccagctgcacaggacccgggaggcaccgccctggtcagtgcccgtgagcagtcctcagagaggcagcatcacccacttggcccgacggacatgggccgtggagagccggtacggcgctcagccataaggcgtggccacaggccccgagggtccctggattggcccagtgaggagcgtggccctgtcctcgcccacctacccagctcagatgtgatggcctccaaccacgaaacccctgaggccaccggggcaggacggctaggttctcgccggaaaccagcggccccaccgccatccccagctgcccgggaggagcagagccgtagctcagccagctcccagaaggggccgcaggccttgacccgctccaacagcctgtccacccctcgccccacacgggcctcccggctgaggcgggcccggctgggggacgcttcagacactgaggctgcggatggtgagcgggggtccctgggcaaccctgagcccgtgggccggccagctgctgagcaggccaagaagctgtcacgcctggacatcctggccatgccccggaagcgggccggctccttcacagggactagtgaccccgaggcagcccctgcccgcaccagcttctctggccgcagtgtggagttgtgctgtgccagccgcaagcccaccatggccgaagcacgggctgtctccaggaaggctgccaacacagccaccaccacgggtccccgccagcccttcagcagggcccgctcgggcagtgcccgatacacctccaccactcagaccccgagggctggcagctccagccgggctcgttcccgggcccccggcccccgggacacggacgacgatgaggaggagcctgacccttatggtttcatcgtgcagacggcagagattgcggagattgccaggctgagccagacgctggtgaaggacgtggccatcctagcccaggagatccacgatgtggctggggacggtgacacactgggctcctcggagcctgcccacagcgcctccctcagcaacatgcccagcacccccgcctcgaccatctctgcccgggaggagctggtgcagcgcatccccgaggccagcctcaacttccagaaggtgccgcccggctcgctgaactctcgggactttgaccagaacatgaacgacagctgtgaggacgccctggccaacaagacgcggcctcggaaccgagaggaggtgatcttcgataacctgatgctgaacccggtgtcccagctgtcgcaggccatccgtgagaacacagagcaccttgccgagaagatgaagatcctctttcagaacacagggagagcttgggaggacctggaagccaggatcaacgccgagaacgaggtgcccatcctgaagacatctaacaaggaaatcagctccatcctgaaggaactgaggcgggtgcagaaacagctggaagttatcaatgccatcgtggaccccagtgggagcctggacctgctcacaggaaacaggagcttggccagctctgcacagccggggctggggaagggccgcgtggctgcccagagcccaccctcacccgcctcagccgaggccctgctgccagccctgcccctgaggaatttcccacagcgggccagctgtgggcctcccagcctcccggaccccaccttcctccctgatgccgagaggttcctgatctaggccccagacctggccaggccagcctccctgtgcgtgtgcgtctctgccttccgtccgccgcacacccgcctgcctggccgcaggtggttctccctgaagacccccacatgtgccatatccctgtgggcgggtgcctcccacgcccttgccccctcgtcagctcccagccagcaccctactcaccctgtccagccccatggccacccccacccctgcctcgccccctacaggcctctgggcccagctcctggccaggctgctgccaaggtcaagccctcaagggcattaccccgcctcctcttcatcactgttatttttgtctttagctttaaaggaaagagttgttggtgccattgcaggtgccccctccaggcctgactggctccgccaggcactaacctgccataaccctttgtgctggcctgcggccaggcagaggaagagaggtcgactgtggggtcatttggtgccaaacatggaggtgggcaggctcacctgttcctgggactgtctgagatggcagggcacttgccctggtggctcccacctgaccccaggccttttataggcaggagccccactgcttccagcctctggtgccaacacagttgccaaacccattgagcttggggctgccccgtggaggcctcctgggtatggaccaggggcttgttgagagctgagccatgcacacaggtgcagacaccccccaactcccatgcacacggctagtccaggcgcctccacgctgcaccgtgaggactgcagggcatgtccccgtgaggggctatgggcctctgtaggtgggcttccaaggtcctgggtgcagccgggtgcatggcagcccttctggcgggggtgagcgcacgaccaaagtcactggaagccgggtttccggaagctcgcagcttggcctgcaccacacgccctccccttttggcttcacgccatcaggcctcaagtgggcatgggggcagggacgggcccaggaactgttgttttctcaggattctttcagctgggaacatggcaggtgagcagagcttggtgcctctgccgtggcccctgctggggcagcccgtgttgccggagcctctaagccaaagagcccgttggccgtggttggtgggggtggacgtgggggtgtcccacctggaccagactggcgtgggtgagctccacaccctgcctggcaatggtatgagagtcggacctggacagggccagctgctgggggagcggcactggggactggaggctggaagcgggtggtgtgtgtcccctgtttacttttagctgagctggggttgggtgtacgggttctgttcctctgagccctgcggcccacctgatgtttacgtgtgtgtgtgagggggggcgggggtggcaggtgtccccccctggtccccgccccaagagcctgctgtctgtatggaggaggtgctagcccggtccaccgggctgctgcccacccctgcatgccccagttgcccaccccgcctgcccctggacatgaagtggtcacgcttcatccacggctccttcccacccctcggcagtggctgtgcaatgttttaagttcacaagttcctgctcctccccacactgagctcctttgttcctccccctccagcctttgcctgggaactggtccttgtttgccgggcttctcggagggttcactgtacattcgttctcaggtggtcttgtggctgtctttcggaaaatggttattttatatgatttgtcatggaatttgttctaataaatcattcttctatc

SEQ ID NO: 22291 - DNA, 4648 bp, Homo Sapiens
gaatgcaggtgagaaaaggcacggactctgcggctgcgaacccaaacttgggcaccgcacggtgcgcactgctcagccttcgcccccgtgggcgaaaggctgctgcggtttcaggcggctgcttcgtgactaatgaccttgcgcagagttgttaagaaaaaagagaaacccgcgctctccggggtgagaagggactgactctgggcgtctctgaagatggctcgggcttctctttggcgcgccggggggaccctgacactgaccgctctgtgacgcgagtagtctcccctgcaccgtgcccgaagcgacgtgccgggggatttttcattctcgatctgttgactggctcccccgctgcatgagcagatcggagttgagactggcttgttgctggccccagcgcctggtgcaggaagcgactcacgtttgtctgggtggccggagccggagccggagcagagctgggctttggagtgagtgcctggaacgtgaattggactcaactcgagtagcagcaaagaccagcgggctggcaggcgggggaggctgcaggctcattccccacctcttcccagccccactgcccgtctgccggagcggttctggccccttccgacagagcggggactagagccggggattctccgcccgctgaggggatgactctgggttgggggagcgccgaacccgcggcgcgcagtgtcccgtgaactgtgagtactgcgactgaacggcggcaggcgagcgggcgattagcacccattgcatgaattatgaaacaataactttcggaagaagcaggaggaaaaaaagaagcatctatcgctgccctcccacccccattcccggccaactctccacgccgcttttgccccctccctcccctccctctcgctccttcctttccgggagaggggagaggactcgggggagggcaggcggccggccccggaggaggggggcgccgagggggctgtggttagaaggagcagtagcagcagcaggagaagatgctgaggatgcggaccgcgggatgggcgcgcggctggtgcttgggctgctgcctcctcctgccgctctcgttcagcctggcggccgccaagcagctcctccggtaccggctggccgaggagggccccgccgacgtccgcatcggcaacgtggcttcagacctgggcatcgtgaccggatcgggtgaggtgactttcagcctggagtccggttccgagtacctgaagatcgacaacctcactggcgagctgagcacgagcgagcggcgcatcgaccgcgagaagctgccccagtgtcagatgatcttcgacgagaacgagtgcttcctggacttcgaggtgtcggtgatcgggccctcgcagagctgggtggacctgtttgagggtcaggtcatcgtgcttgacatcaacgacaacacgcccaccttcccgtcgcccgtgctcacgctcacggtggaggagaatcggccggtgggcacactttacctgctgcccacagccaccgaccgcgacttcggccgcaacggcatcgagcgctacgagctgctccaggagcccggaggcggcggcagcggcggcgagagccggcgcgccggggcggccgacagcgccccctaccccgggggcggcgggaacggcgcgagcggcggcggctcgggaggctccaagcggcggctggacgcatcagagggcggcggcggcaccaaccccggcggccgcagcagcgtgttcgagctgcaggtggcggacaccccggacggcgagaagcagccgcagctgatcgtgaagggggcgctggaccgcgagcagcgcgactcctacgagctgaccctgcgagtgcgcgacggcggcgacccgcctcgctcctcgcaggccatcctacgggtcctcatcaccgacgtgaacgacaacagcccccgcttcgagaagagcgtgtacgaggccgacttggctgagaacagcgccccggggacccccatcctgcaactgcgcgcagccgacttggacgtgggggtcaacgggcagatcgaatacgtgttcggggcggccaccgagtcggtgaggcggctgctgcgccttgacgagacgtccggctggctcagcgtcctgcaccggatcgaccgcgaggaggtgaaccagctgcgcttcacggtcatggcccgcgaccgcgggcagccccccaagaccgacaaggccaccgtggtccttaacatcaaagacgagaacgacaacgtgccgtccattgaaatccgcaagattgggcgcatccccctcaaggacggggtggccaacgtggccgaggacgttctggtcgacacccccatcgctctggtgcaggtgtccgaccgagaccaaggcgagaacggggtggtcacctgcaccgtggtgggcgacgtgcccttccagctcaagccagccagcgacaccgagggcgaccagaacaagaaaaagtacttcttgcacacctcgacccctctggactatgaggccacccgggagttcaacgtggtcatcgtggcggtggactcaggcagccccagcctctcgagcaagaactccctgattgtcaaggtgggagacaccaacgacaacccgcccatgttcggccagtcggtggtggaggtttacttccctgagaacaacatcccgggcgagagggtggccacggtgctggcgacagacgcagacagcggtaagaacgccgagatcgcctactcgctggactcctctgtgatggggatctttgccatcgatcccgattctggggacatcctggtcaataccgtgctggaccgcgagcagactgacaggtatgagtttaaagttaacgccaaagacaaaggcatccccgtgctgcagggcagcactacggtgattgtgcaggtggctgataaaaatgacaatgaccctaagtttatgcaggacgtcttcaccttttatgtgaaagaaaacttgcagcccaacagccctgtggggatggtcaccgtgatggatgctgacaaggggcggaatgcagagatgagcctgtacatagaggagaacaataacattttttctattgaaaatgacacggggaccatttactccacaatgtcttttgaccgggaacatcagaccacatacactttcagagtcaaggctgtggatgggggagatcctcccagatctgccacagctacagtctcgctttttgtgatggatgaaaatgacaatgctcccacagttacccttcccaaaaacatttcctacactttactgccaccttcgagtaatgtcaggacagtagtagctacagtgttggcaacagacagtgatgatggcatcaatgcagacctgaactacagcattgtgggaggaaatcccttcaagctgtttgaaattgatcccactagtggtgtggtttccttagtgggaaaactcacccaaaagcattatggcttgcacaggttggtggtgcaagtgaatgacagtgggcagccttcccagtccaccacgactgtggtgcacgtgtttgtcaatgaaagtgtttctaatgcaactgcgattgactcccagatagctagaagtttgcacatcccactcacccaggatatagctggtgacccaagctatgaaattagcaaacagagactcagtattgtcattggcgtagttgctggcattatgacggtgattctaatcatcttaattgtagtgatggcaaggtactgcaggtccaaaaataaaaatggctatgaagccggcaaaaaagatcacgaagacttttttacaccccaacagcatgacaaatctaaaaagcctaaaaaggacaagaaaaacaaaaaatctaagcagcctctctacagcagcattgtcactgtggaggcttctaagccaaatggacagaggtatgatagtgtcaatgagaagctgtcagacagcccaagcatggggcgatacagatccgttaatggtgggcccggcagtcctgacctggcaaggcattacaaatctagttccccattgcctactgttcagcttcatccccagtcaccaactgcaggaaaaaaacaccaggccgtacaagatctaccaccagccaacacatttgtgggagcaggagacaacatttcaattggatcagatcactgctctgagtacagctgtcaaaccaataacaagtacagcaaacagatgcgtctacatccatacattactgtgtttggctgaattccactctaatatgatgctccattatgcaccatactgtgatgacctttctactccgaaacctgctggagcctgcccttggccgtggggtgtcagccaatcactgcttgttccacttgttgtacattttatttttgagtctttttctttctcatatacagaaaaatagtatgaaaataaaataaatgtatgaaacagtattaatgcagaaatgtgctactaatggatgtctgagtcaccagaaattccattcttaaagaggcggttagcacctattagacgtaacagtgatgtcttttaaaaaatccaaaagcatattgcaacaataagtttgagactttgtgtgaacaaagggaaattcagcctcttatgtctttgtctttaatacattaaatactgattttgaataaaaatctaaattgatcaat

SEQ ID NO: 22292 - DNA, 4714 bp, Homo Sapiens
gaaaaaagagaaacccgcgctctccggggtgagaagggactgactctgggcgtctctgaagatggctcgggcttctctttggcgcgccggggggaccctgacactgaccgctctgtgacgcgagtagtctcccctgcaccgtgcccgaagcgacgtgccgggggatttttcattctcgatctgttgactggctcccccgctgcatgagcagatcggagttgagactggcttgttgctggccccagcgcctggtgcaggaagcgactcacgtttgtctgggtggccggagccggagccggagcagagcctgggtttggagtgagtgcctggaacgtgaattggactcaactcgagtagcagcaaagaccagcgggctggcaggcgggggaggctgcaggctcattccccacctcttcccagccccactgcccgtctgccggagcggttctggcccctccgacagagcggggactacgagccggggattctccgcccgctgaggggatgactctgggttgggggagcgccgaacccgcggcgcgcagtgtcccgtgaactgtgagtactgcgactgaacggcggcaggcgagcgggcgattagcacccattgcatgaattatgaaacaataactttcggaagaagcaggaggaaaaaaagaagcatctatcgctgccctcccacccccattcccggccaactctccacgccgcttttgccccctccctcccctccctctcgctccttcctttccgggagaggggagaggactcgggggagggcaggcggccggccccggaggaggggggcgccgagggggctgtggttagaaggagcagtagcagcagcaggagaagatgctgaggatgcggaccgcgggatgggcgcgcggctggtgcttgggctgctgcctcctcctgccgctctcgttcagcctggcggccgccaagcagctcctccggtaccggctggccgaggagggccccgccgacgtccgcatcggcaacgtggcttcagacctgggcatcgtgaccggatcgggtgaggtgactttcagcctggagtccggttccgagtacctgaagatcgacaacctcactggcgagctgagcacgagcgagcggcgcatcgaccgcgagaagctgccccagtgtcagatgatcttcgacgagaacgagtgcttcctggacttcgaggtgtcggtgatcgggccctcgcagagctgggtggacctgtttgagggtcaggtcatcgtgcttgacatcaacgacaacacgcccaccttcccgtcgcccgtgctcacgctcacggtggaggagaatcggccggtgggcacactttacctgctgcccacagccaccgaccgcgacttcggccgcaacggcatcgagcgctacgagctgctccaggagcccggaggcggcggcagcggcggcgagagccggcgcgccggggcggccgacagcgccccctaccccgggggcggcgggaacggcgcgagcggcggcggctcgggaggctccaagcggcggctggacgcatcagagggcggcggcggcaccaaccccggcggccgcagcagcgtgttcgagctgcaggtggcggacaccccggacggcgagaagcagccgcagctgatcgtgaagggcgtgtacgaggccgacttggctgagaacagcgccccggggacccccatcctgcaactgcgcgcagccgacttggacgtgggggtcaacgggcagatcgaatacgtgttcggggcggccaccgagtcggtgaggcggctgctgcgccttgacgagacgtccggctggctcagcgtcctgcaccggatcgaccgcgaggaggtgaaccagctgcgcttcacggtcatggcccgcgaccgcgggcagccccccaagaccgacaaggccaccgtggtccttaacatcaaagacgagaacgacaacgtgccgtccattgaaatccgcaagattgggcgcatccccctcaaggacggggtggccaacgtggccgaggacgttctggtcgacacccccatcgctctggtgcaggtgtccgaccgagaccaaggcgagaacggggtggtcacctgcaccgtggtgggcgacgtgcccttccagctcaagccagccagcgacaccgagggcgaccagaacaagaaaaagtacttcttgcacacctcgacccctctggactatgaggccacccgggagttcaacgtggtcatcgtggcggtggactcaggcagccccagcctctcgagcaagaactccctgattgtcaaggtgggagacaccaacgacaacccgcccatgttcggccagtcggtggtggaggtttacttccctgagaacaacatcccgggcgagagggtggccacggtgctggcgacagacgcagacagcggtaagaacgccgagatcgcctactcgctggactcctctgtgatggggatctttgccatcgatcccgattctggggacatcctggtcaataccgtgctggaccgcgagcagactgacaggtatgagtttaaagttaacgccaaagacaaaggcatccccgtgctgcagggcagcactacggtgattgtgcaggtggctgataaaaatgacaatgaccctaagtttatgcaggacgtcttcaccttttatgtgaaagaaaacttgcagcccaacagccctgtggggatggtcaccgtgatggatgctgacaaggggcggaatgcagagatgagcctgtacatagaggagaacaataacattttttctattgaaaatgacacggggaccatttactccacaatgtcttttgaccgggaacatcagaccacatacactttcagagtcaaggctgtggatgggggagatcctcccagatctgccacagctacagtctcgctttttgtgatggatgaaaatgacaatgctcccacagttacccttcccaaaaacatttcctacactttactgccaccttcgagtaatgtcaggacagtagtagctacagtgttggcaacagacagtgatgatggcatcaatgcagacctgaactacagcattgtgggaggaaatcccttcaagctgtttgaaattgatcccactagtggtgtggtttccttagtgggaaaactcacccaaaagcattatggcttgcacaggttggtggtgcaagtgaatgacagtgggcagccttcccagtccaccacgactgtggtgcacgtgtttgtcaatgaaagtgtttctaatgcaactgcgattgactcccagatagctagaagtttgcacatcccactcacccaggatatagctggtgacccaagctatgaaattagcaaacagagactcagtattgtcattggcgtagttgctggcattatgacggtgattctaatcatcttaattgtagtgatggcaaggtactgcaggtccaaaaataaaaatggctatgaagccggcaaaaaagatcacgaagacttttttacaccccaacagcatgacaaatctaaaaagcctaaaaaggacaagaaaaacaaaaaatctaagcagcctctctacagcagcattgtcactgtggaggcttctaagccaaatggacagaggtatgatagtgtcaatgagaagctgtcagacagcccaagcatggggcgatacagatccgttaatggtgggcccggcagtcctgacctggcaaggcattacaaatctagttccccattgcctactgttcagcttcatccccagtcaccaactgcaggaaaaaaacaccaggccgtacaagatctaccaccagccaacacatttgtgggagcaggagacaacatttcaattggatcagatcactgctctgagtacagctgtcaaaccaataacaagtacagcaaacagccatttcgtagagtgacgttttctgttgtgagtcagcctcaggacccacatcaggggtcactgcagagttgctatgacagcgggctggaggagtcagaaacaccaagcagtaagagttcatcagggccaagactgggtgcgcttccactcccagaggacaactatgaaaggaccacgccggatggcagtgttgattcaaggcctcttccagatgtagccctgactgggaagtgcactcgtgagtgtgatgagtatggccactcagactcctgctggatgccggtccgcacttctccggagaggaagaagagccagcctaaactgtccactttcatgcctgttgatgaacgaggaagccaggaaaagctggccaatggggaggccgccatcatgggtgaccgcaacagaaacctcctgaacaaaaagttgacctcatcctatgagaccttcagtgcagctagtttcagcaaaaatgaggaagccaaccctgaggatattccccttacaaaaacaggggaatataagccatctcctgtcaatactctcactagaagagaagtttacctgtaggctataaaggagcaacagcaaagttctttacatgtatgaaaaggagaataaggggcaaaaaccttacaaagcaaaacgtttaatcacaaagagggggctaccaaagagacaaagctttgcctgccacttctgcctccagatcaggcctttagtgatactgttagcctgattctactgtacaatgtagaaacatccttgttacttgcatgtctaaccccttcactgattcccaacactcactttctcttccccaccc

SEQ ID NO: 22293 - DNA, 2449 bp, Homo Sapiens
tccggcgggcactggggccccgtgttttcagagtcatggaggcgctaattcctgtcataaacaagctccaggacgtcttcaacacggtgggcgccgacatcatccagctgcctcaaatcgtcgtagtgggaacgcagagcagcggaaagagctcagtgctagaaagcctggtggggagggacctgcttcccagaggtactggaattgtcacccggagacctctcattctgcaactggtccatgtttcacaagaagataaacggaaaacaacaggagaagaaaatggggtggaagcagaagaatggggtaaatttcttcacaccaaaaataagctttacacggattttgatgaaattcgacaagaaattgaaaatgaaacagaaagaatttcaggaaataataagggagtaagccctgaaccaattcatcttaagattttttcacccaacgttgtcaatttgacacttgtggatttgccaggaatgaccaaggtgcctgtaggtgatcaacctaaggatattgagcttcaaatcagagagctcattcttcggttcatcagtaatcctaattccattatcctcgctgtcactgctgctaatacagatatggcaacatcagaggcacttaaaatttcaagagaggtagatccagatggtcgcagaaccctagctgtaatcactaaacttgatctcatggatgcgggtactgatgccatggatgtattgatgggaagggttattccagtcaaacttggaataattggagtagttaacaggagccagctagatattaacaacaagaagagtgtaactgattcaatccgtgatgagtatgcttttcttcaaaagaaatatccatctctggccaatagaaatggaacaaagtatcttgctaggactctaaacaggttactgatgcatcacatcagagattgtttaccagagttgaaaacaagaataaatgttctagctgctcagtatcagtctcttctaaatagctacggtgaacccgtggatgataaaagtgctactttactccaacttattaccaaatttgccacagaatattgtaacactattgaaggaactgcaaaatatattgaaacttcggagctatgcggtggtgctagaatttgttatattttccatgagacttttgggcgaaccttagaatctgttgatccacttggtggccttaacactattgacattttgactgccattagaaatgctactggtcctcgtcctgctttatttgtgcctgaggtttcatttgagttactggtgaagcggcaaatcaaacgtctagaagagcccagcctccgctgtgtggaactggttcatgaggaaatgcaaaggatcattcagcactgtagcaattacagtacacaggaattgttacgatttcctaaacttcatgatgccatagttgaagtggtgacttgtcttcttcgtaaaaggttgcctgttacaaatgaaatggtccataacttagtggcaattgaactggcttatatcaacacaaaacatccagactttgctgatgcttgtgggctaatgaacaataatatagaggaacaaaggagaaacaggctagccagagaattaccttcagctgtatcacgagacaagtcttctaaagttccaagtgctttggcacctgcctcccaggagccctcccccgctgcttctgctgaggctgatggcaagttaattcaggacagcagaagagaaactaaaaatgttgcatctggaggtggtggggttggagatggtgttcaagaaccaaccacaggcaactggagaggaatgctgaaaacttcaaaagctgaagagttattagcagaagaaaaatcaaaacccattccaattatgccagccagtccacaaaaaggtcatgccgtgaacctgctagatgtgccagttcctgttgcacgaaaactatctgctcgggaacagcgagattgtgaggttattgaacgactcattaaatcatattttctcattgtcagaaagaatattcaagacagtgtgccaaaggcagtaatgcattttttggttaatcatgtgaaagacactcttcagagtgagctagtaggccagctgtataaatcatccttattggatgatcttctgacagaatctgaggacatggcacagcgcaggaaagaagcagctgatatgctaaaggcattacaaggagccagtcaaattattgctgaaatccgggagactcatctttggtgaagagaactatgtaatactgagactttgttgactcaaaacttgctagttactgcctacctgagtagaatcttatttatgaactcctgtgtattgcaatggtatgaatctgctcatgtggagactggctataaactgaaaagtgtattccaaattgcagaacacatcacacatttaatccaaataataaatggctgtttctaaag

SEQ ID NO: 22294 - DNA, 4734 bp, Homo Sapiens
aagatggctgcggagccgagcaccgggcagtggctgcggcggcggcggcggcggcgggccgggagcgcggcgggcgggggctccgccttgcgcgtggggcgctgagccgagaggcgcggaggcggcgagggcgcgggggctctgaggaccgctcggcgccgcctcctgccacaccatgggcagcgcagaggacgcagtcaaagagaaactgctgtggaacgtgaagaaggaggtgaagcaaatcatggaggaggctgtcaccaggaagtttgtgcatgaagacagcagccacatcattgctttatgtggtgcagtggaggcttgcctcttgcatcagctgagacgccgtgccgctggcttcctgcgcagtgacaagatggcagccctgttcaccaaggtggggaagacgtgcccagtggcgggggagatttgccacaaggtacaggagctgcagcaacaagcagagggcaggaaaccctcaggggtcagccaggaggccctgcggagacagggctcagccagcgggaaggccccggccctcagccctcaggccttgaaacacgtatgggtacgcacggcgctcatcgagaaagttctggacaaggtcgtgcaatacctggcggaaaactgcagcaagtactacgagaaggaggcactgctggcagaccctgtgttcggcccgatcctggcctctcttctagtgggaccctgtgccttggaatacactaagctcaagacagccgatcactactggactgacccctctgctgatgagctggtccagcggcaccgcatccggggtccacctactcgccaggactcccctgcaaagcgcccagccctggggatccggaaacggcactcaagcggcagcgcgtcggaggacaggctggctgcctgtgcccgcgagtgtgtggagtccctgcaccagaactcacggacgcggctgctctatggcaagaaccacgtgctggtgcagccgaaggaggatatggaggcggtccctggctacctctccctgcaccagtctgcagagagcctgactctgaagtggacccccaaccagctcatgaatgggactctgggggactccgagctggaaaagagcgtttactgggactatgccctcgtggtgcccttcagccaggtcgtgtgcatccactgccaccagcaaaagagcggtggcacgcttgtgctggtgagccaggatggcatccagaggccgccgctgcatttcccacagggaggacacctgctgtcctttctgtcctgtctggagaatgggctgctgcctcggggacagctagagcccccgctgtggacccagcaagggaaggggaaagtgttccccaagctacggaaacgaagcagcattcgctccgtggatatggaggagatgggcacggggcgggccaccgactatgtgttccggatcatctaccccggccacaggcacgagcacaacgctggtgacatgatcgagatgcagggctttgggcccagcctgccagcctggcacctggagcccctgtgcagtcagggctcctcctgcctctcctgctcctccagcagctccccacatgcaacccccagccactgtagctgcatccccgaccggttgccgctcaggctactgtgtgagagtatgaagaggcagatcgtgtcccgggccttctacggctggctggcacactgccgccacctgtccacggtgcggacccacctgtcggcgctggtgcaccatagcgttatcccacctgaccggcccccgggggcctccgcgggcctcaccaaggacgtgtggagcaagtatcagaaggacaaaaagaactacaaagagctggagctgctgcggcaagtttactacggaggcatagagcacgagatccgcaaggacgtctggccctttctgcttggccactacaagttcggcatgagcaagaaggagatggagcaggtggacgcagtggtggcagcaaggtaccagcaggtgttggcagagtggaaggcctgcgaggtggtggtgaggcagcgggagcgggaggcccacccagccacacgcaccaagttctcctcaggcagcagcatcgacagccacgtgcagcgcctcatccaccgagactccaccatcagcaacgatgtgtttatctcagtggatgatctggaacccccggagccccaggaccctgaagattccagaccaaaacctgagcaggaagcaggacccgggactccgggcaccgccgtggtggagcagcagcattccgtggagttcgactctccagactcaggactgccctcctctcgcaattactccgtggcctcgggcatccagtcaagcctagatgaggggcagagcgtgggcttcgaagaggaggacggcggtggggaggaaggctccagtgggcccggccctgcagctcacactttgagggagccccaggatcccagccaggagaagcctcaggccggagaactggaggccggagaggagcttgcggctgtgtgtgcggctgcctacactatagaattactggacactgtggccttaaacctgcaccgcatagacaaggatgtgcagaggtgtgaccgcaactactggtacttcacgccccccaacctcgagaggctcagagacgtcatgtgcagctacgtgtgggagcacctggacgtgggctatgtgcagggcatgtgcgatctgctggcgcctctcctggtcaccctcgacaatgatcagctggcctacagctgcttcagccacctcatgaagaggatgagccagaacttccccaacgggggtgccatggacacccactttgccaacatgcgctccctcatccagatcctggactcagagctgtttgagctgatgcatcagaatggagactacacccacttctacttctgttatcgctggttcctgctggattttaagagagaactgctgtatgaggatgtgtttgctgtgtgggaggtgatctgggcagccaggcacatctcatcggagcactttgtcctgttcatcgccctcgccctggtggaggcctaccgagagatcatccgtgacaacaacatggacttcactgacatcatcaagtttttcaatgaacgtgctgagcatcacgatgcccaggagatcctgcggattgcccgggacctcgtccacaaggtgcagatgctcatagagaacaagtgagctggggccaggaggcagcagccgtgcagagcctgggctccggcagggagaggtgcaggggagtcaccgcccagacctccccagccaccaaccgaccccacctctattcctaacaaagcggttgtgagcctggatccgactcccggcagtgctgaccctgcagggcaagtcaggggccaggatgccctcggatcagggccgggatgggaggggtcagcctcagggagcagctgccttgggggacacacctactctgctcccctctcacacatctgggagtagccccactgccacctgcagccgcagcctggactgctgcccacgagtgaacctggggccccacaggattaacaggggctatagcggcctgggccctactcagctggggtggcagagggcgagaggctctgtgctgtgtcccttctgagggtccctttgcagtcccagtatattgtgcgtgcaccagccccagctggagcaaccaaaactgcttctggtttaggcacacgtcacgggtgcgggagacccgggcacgggagacccgggccgccttcaggccgctcccccgagattctggggcagtcggaagatgtgggccctgggtgggagcagcccacttcagcagcactgccactgcctttggccacctgaggtgacccccaggcctccccggccttgtacagtgtacctctgtgtatctgtacagcctcgctcctgccaccccacccttgcgttctgcattaggtacttccctgaaaaccacgtgtaagaagtgatgcttttgccagtggatgatctggaatgcgaccggagcacttgctctgaggaatcccagggtgactctgtcggggaagaatccggtcacagcctcccctcagagacaggcctcagttcgagggcagcccattatctgtcgcagacatctgccatgtccctgagactgcgggaggcaggggatgcatgggtgtccccatctgtccctggtgagaagcaaggctagctctgccttccacatgcttctcaggatgccaagaggcctaggaacccagaaacccccttggaggagctgtgtatgcgggggtgccaggaagggcatagctcctgcccccaggcctaggcatgctgcttgctcggccatccccacttcctcctctaccccaacacatgcaggctaggccttgccctggaacatggaggccctgcccggggctggggcctagtccagcagccaccaaagtctggcagactttctgcatttgagaaacatgacaaagggccccgcagcccttctgcacccagcacagcctgcccagcccagccctgcccccgggcactgcacagcctgtctgggggccagaccaccccattgtccatccttgttgtccgtgagtccttggcctccaccaagcacgtgtggccattgtgtgcctgccttagtgactccgtggttttgtgaggagcagagtgtgtatgatttttgcctcagaaactatactcttctgtgtaacagaccaataaacaacatttgtcaacactgg

SEQ ID NO: 22295 - DNA, 6203 bp, Homo Sapiens
aacagaatcgcgtttggctgtgctggatgtgtgaacctattgggtactgtacaacttcaagcctcgaaatcagataggcaccaccaacctcatttcctgtttcaccttgattttctgtgataccaaaatctcagcttcacaaagtcattgaaagtgttggttcatgaagttttaccatcaattcaagtaatcataaatggcaaattctgcaaaagcagaagaatatgaaaagatgtctcttgaacaggcaaaagcgtcagtgaattctgaaacagagtcttcattcaatattaatgaaaacacaacagcttctgggactgggctttctgaaaagacttctgtctgtaggcaagtagacatagcaagaaagagaaaagagtttgaagatgatcttgtaaaggaaagttctagttgtgggaaagacactccatccaagaagagaaaacttgatcctgaaattgtcccagaggaaaaagattgtggtgatgctgaaggcaattcaaagaaaagaaaaagagaaactgaggatgttccaaaagataaatcttctactggagatggcactcaaaataagagaaaaatagcacttgaggatgttcctgaaaagcagaaaaatctggaagaaggacacagctcaacagtggctgcccattacaatgaacttcaggaagttggtttggagaagcgtagtcaaagtcgtattttttacctaagaaactttaataattggatgaaaagtgttctcattggagaatttttggaaaaggtacgacagaagaaaaaacgtgatatcactgttttggacctgggatgtggtaaaggtggagatttgctgaaatggaaaaaaggaagaattaacaagctagtttgtactgatattgccgatgtttctgtcaaacagtgtcagcagcggtatgaggacatgaaaaatcgtcgtgatagtgaatatattttcagtgcagaatttataactgctgacagctcaaaggaacttctgattgacaaatttcgtgacccacaaatgtgttttgacatctgcagttgtcagtttgtctgtcattactcatttgagtcttatgagcaggctgacatgatgctgagaaatgcgtgtgagagacttagccctgggggctattttattggtactactcccaatagctttgaattgataagacgccttgaagcttcagaaacagaatcatttggaaatgaaatatatactgtgaaatttcagaagaaaggagattatcctttatttggctgcaaatatgacttcaacttggaaggtgttgtggatgttcctgaattcttggtctattttccattgctaaatgaaatggcaaagaagtacaatatgaaactagtctacaaaaaaacatttctggaattctacgaagaaaagattaagaacaatgaaaataaaatgctcttaaaacgaatgcaggccttggagccatatcctgcaaatgagagttctaaacttgtctctgagaaggtggatgactatgaacatgcagcaaagtacatgaagaacagtcaagtaaggttacctttgggaaccttaagtaaatcagaatgggaagctacaagtatttacttggtgtttgcctttgagaaacagcagtgagcacataggcagtagtcccagaggggccgtgttctgtcctgcacaaatttgaacaactcatctcgatatatttgatatttctctgtctgttgattttaattctaaatgtgcaggatgctgccagaaactccaatgtagaaattcaacatttgctgtctgtgacagatgaacttttgcatgtgtatataagaatgagttgggacctctgtctttaaaaatctatttttaggtaatgttctaagaattccatttgcctctatgatcttagctcataaaaatataatatgacttgataaagcaactaaactcttcccacagtgttcagatttgtcctgtgtgtgtttacagtattcaatttattgcagttatagaattggtcagagagcattttcatagtgtgctcatttctatggttttgttatatagcatttttcaacatttaatggtctgtacagttgaatgtaagtgttcaatatgtattgctgaagttataagtttaaaactcaatttcagatgctcataaaagttacttagctaaaattttagcaatttattgcattttgaaataatcattaacatgctgcaattcaggagctggttagaacattttaagtggcagcatagaattttggaattttggggctttcttttcagaaattgctaccatagtaattaatgtttccagttatcaagattgtgattagacacatttacctttcttcattgaacaaatggtgccatagttatttttctcaaaatttagtgaaaatccctcccatgtagacatgttgcacattttttccaaatttatacatggaactgcagtaggaatattctcaccatctgatgccatgtacccacttcagaaataagcaatacttgttcctctgttacaacctcagcactttgcaccgtaggagccattgttaaagttgtcacttgtgtaactgactgcttttccaaaactggtacttacgtgaactgttgtccttgctttacaccaccatttggaaaacttaccagtttttagatgtagatgtagtgaaaaacttcaagaatgaagcagagcaattgagtattcttttttaaattattaagccatgatttacaaaaacattactttctgtaattcacaatacttgttttaaaaacatagtgtcttcattagtgtgcatctattaactgttcatggtgttagagttgcaaactttttagcaagaaaatatggatttcctcatttcagttccttctgcagcctgtgaatctccacaaagtgttaccagtttacaaaaataagtctttttgccttaagtcattttggaaataagtaatactgcatctgactctggtggctgtattagctaggaaaggtttgtaaatggtgtcagtgaggtggggaaaggaagtcttcctgtcacatatgcaggttcgttttcattctagggcagtgccaggaagtatattgatagctttgtaggtacaggaaaaacatcatcattatttcctctgttcacatttactggtcttaattaacaggtaataataatacatgtacttttagcctgaaacctcttccacgccatgggtaacttgggggagagaagaatcctccaaacgatggagtagccagtggtaatacaaagcagggagaacagaaaggtagagttactaaggccttcagtgaacagaaaggagcagagagcaagattagatctgagaagatgctctggggactgagcccactgttgttggtgtcagggaggcttactggagccacacctgcaggcgctgtgttcaggcaccaccttcctccttgagctttgcctgtctcttgccttatcagttcttcctccaccaccctacacccccctccccccggccccaagcccctgtgtctccttgttacaattaagtttctggatattgacttaagaactgttaggaagaggactagaaaaggcttcccctgcctatcctctccgatcaccaaggtggaagggagctagtaggactcttccttgacacaccttgtagtctaaatgttcggtattctattcaggacttacggtaactattatgagggaggcatggctttccaccgtcgggccaggaagagcacctgttgctgcaagctcagtgaagtggggcactcccagacctgccatgcagtttatcctctgagaatggaattggaaatgaagacctaaccagctattggtgggaatgacggaactggggattgcgatgattgatctgggaacatggctggattgtgatttaaccaagaatgctgatgttgaattctttgggcctagaatatacttgagaaagcactagtggcttgtgttcagggagaggagctggcagtttttaaccacttctgtgggagccgtgttctaacctgtggaaagtattgcaattctgtgagagtgactctgcagagtcactgcaccatcaggcttggccctgctgtgccttcagtacccagccaggttctctgggtccagggtgactctccaaagaaattggccttcagctggagaaaacattgggtggagactctcacttatgttaatgcaatcttgaaatgactgaaaggtagattgccagcacagtgagtttcccagcctgctcccccatccacacttggaaattgagggagcatgaccgctctctgacttcacatgttaatagaggatcagagcagagttgggagtatattggtcaggatcatagaaaagaagacaaagcttgctcagccatgagatggccaggtatccagttttgttaactctctttgggaatttctttttcagcctgttttttagcttagtgccattatgtcattttgatttgtattcaagtactcttcaagtatctttgtaatgaaggtttggctacttgtataggtctgcctgcagggtgaaaatgccagtgtgaatattctagctaccaaacattgttttttgttgaaaaactgactttctgttgtctacctcaggccttgtgcatttgggttatctcaagccagtcaccacagagggtctctagggtctgcaaaatagaggccaaatccagggaccaggccctaataatagaagttgtaccaaaatgcctgtggtacttgatggcctgttggtcaaataggaagtacaagtgtgtgatgttagaacctccctagttgctgctatatcaaacactgcacacttgacaagtgttttcattccccgccctctgacagaacaacattcctaattctttgaaggcaaccagtgcaaaggctactacacttgtgtaatgatatttagcagatgcatacaggactggatcccagggcactgtcagttcttccctccctctcgtgctgctcagtttgtcctctgctcccatgtaggcctaaagtcaccccactccttagtgcctgcacctcaccacgatattgaggaagcacaggacatccaagggtactctccagtttggctgtggagacttgagcaagccctaaagtcccctgctccctggacttctcctgggttgtgcttttttgggggcaacataccttggacaaagctgagctgacagctaatgtttattagcctcctacctaagtcagtcactttgctaaattcttcacctgtggtaactcattttgattgttataacatctcagcaccattattcccattttaatgatgaggaaactgagtcatagaggatacagacttgcccaaaggagagccaggattttcacaccccctcctcaagctgggcctgccctccaagtgcttgttatatacctccacgggtgtcagcccagatgactcctcacccatccaccacctgcagcttgagatgttaactattagagctccattcttttggttcaaaacgttgatacttacttagatgttccctgagaggagtgtttatttctgagtaaggggctttgttgaaagagggggttagagagagcaagacagcacttgagtgcactggcaggaagcagagataagacttgaatttcagtttggtagaccaccttctttagcagcccaacctgtagcaaatctagtttagcctgcatggcagggagagggattctcttcccaccctcaccatttgcaagtggcaggagctgagaatgccagtacgagagtgtagccaaagtgagaggctgagagcaaaggagacatttttttcagttttgagtcgagtatccagacagaggcaaatcattttgtttaactttttattaaagtgtaactatagaaacacatcaatgatttttcacaagtggagcacgtgcatacaatcggcaccccagaagccccccgtcagattcccttccagttaactacctctccaagggaaaccactatcctgagttctaagcgcatagattagttctgtctggtttggggagatatataaatggaattatgcattcttcgtatctggtttcttttcaccaatattatgtttgtgagatttttgttgcatgtatttgtacatggattttcattctcatggttgtataatatttcattgtgtgaataaaccacatactgtttatctg

SEQ ID NO: 22296 - DNA, 10861 bp, Homo Sapiens
gacaactacaggcctgctctctggttccaggtttcacagacatattttcagagtcgaaggagggccttgatattcactcgtcaatgatactgcgcttcctgcaccgcaatcggctctccagcgcggtgatgccctacccgatgctggagcactgcaataacatgtgcaccatgcggtcttccgtcctgaaggagtctctggatcagctggtacaaaaggaaaaggaaagccctggagatctaactagaagtccagagatggataaactcaagtcagtagcaaagtgctatgcttatatagaaacatcctccaactcggcagacattgacaagatgacaaatggagaaacctcatcctactggcagtcagatggcagtgcctgttcacactggattcgtttaaaaatgaagccagatgttgtgcttaggcacctgtccattgcagtggctgccactgaccagagctacatgccacagcaggtgacagtagctgtagggaggaacgccagcgatcttcaggaagtccgagatgtgcacatccccagcaatgtcactggctatgtgacgctgctggaaaatgccaacgtcagtcagctctatgtccagattaacataaagcgttgtcttagcgatggctgcgacactagaattcatggtctcagggctgttggctttcagagagttaagaagtctggggtctcagtctcagatgcttctgcaatatggtattggtctctgctgacatctctggtgacggcttctatggagacaaatcccgcctttgtccagacagtgctgcacaatactcagaaggcgctgcggcacatgcctccactctctctctcaccaggatctacagatttctcaacttttctctcccctaatgtgctggaagaagtggacagtttcctcataaggataactagctgctgttctaccccagaggtagaactgactcttctggcttttgctctcgcaagaggaagtgttgccaaagtcatgagctctctatgcaccatcactgaccatctggacacgcagtatgatgcctcatccctcatcttgtccatggcgtcagtcagacagaacctgctcctcaaatatggtaaacctctccagttgactcttcaggcatgtgatgtcaaaggaaaagaagataagtctggacccgaaaacctccttgttgaaccgtggacaagggatggttttcttacggaaactggaaaaaccagagccagcactattttttctaccggaactgaatctgccttccaagttacacagataagaattatggttcgacgtggtggcattggtgcccagtgtgggttggtgtttgcctataactcatcttcagataaattttgtgcggaagaacacttcaaaaggtttgaaaaatatgacaaatggaagcttcaggagctcaggcaatttgtaaaaagcaggattggttgctcatctgatgaccttggagaggatgatcctattggctggtttgaactggaagaagaatgggatgaagcagatgtgaagctgcaacagtgcagagttgccaaatatttgatggtgaagttcctctgcacccgtcaggagtcagcagagcgcttgggagtgcaaggcttgaccatcagtgggtacctccggcctgcaagagcagaagcagaacagagcgtcacctgtgcacactgcagaaaggacacagaggagagtgtctgtggggccacgttgctcctcaggacccttcagtttatccagcagctcgcccatgacctggtgcagcagaaggaaagtggcttaaaatataaatcttttctggacttcgcgggtcttgatttgcagatcttctggaatttttacagtaaattaaagcaaaacccgagggaagaatgcgtctctgcccaaaccctgcttctgcagctactccagagctgcttctctgtgctgcagggagatgtactggctgcttctgaggaggaaaaggctccaatccaaagccctaaaggagtagaggctgccaaggagctgtacacacacttgtgtgatgtggtggacaaggtggatggagactctgtgcccatggagatactaaaacaagaagtcaggaatacccttctcaatggggctgccatcttctttcctaatcgacagacccgacggaaccatctcttcaccatgatgaatgtcaccgagcaggagcacaagcagtccctgcagctcactttccgttcactgtgcacgtattttagtgacaaggatccaggcggccttcttcttttacctgagaagaacgacctggccaagatgaacatcagtgaagtcctggcggtcatggacactctcgtctctgttgctgctcgagagtgcgagctgttaatgctcagtggggccccaggggaggtgggctctgcgctcttctccctgttctggtccgtccaaggcagcctgctatcctggtgctacctgcagctgaagagcacggactctggagccaaagatcttgccgtggaccttattgaaaaatatgtgggccagtttctggcaagcatgagagcgattttggaatcccttttctcacagtacagtggaaaaaccatagtagaaagattatgtaactcagtgttttcaatggcagctcgtcaactggttatcttcctgctggacttctgcactttagacatcccacactgcgtgctcttgagagagttcagcgtcctcacagaactcctgaagaagctctgtagtggccccgaaggaggactgaggaagctggatgttgagacctggcaacaggaacagcctgtggtgttacatacgtggacgaaggaatctgcccacaactatgaaaataattgccatgaggtatccgtctttgttagcccaggggcaacctattttgaagtggaattcgatgacaggtgtgaaactgaaaaaaggtatgattatctggaatttaccgacgctagaggtcggaaaacacgctatgacacaaaagttggcactgataaatggcccaagaaagtgaccttcaaggccggtcctcggttgcagttcctctttcactctgacagcagtcacaacgaatggggctacaaattcactgtcactgcctgtgggctgcccgatgttgccgtgtcttgggggctggatttacagctcctcgtctcccggctgatgggacgcctggcttcccagtgcatggcgctcaagtctgtgcgccagttaggaagtaacatggtagtacctcaggcaaaaatggcattagtcctaagctccccactgtggaaacctgtcttcaggcatcaggtttgtccagagttggaattagaagcaagctggcccactcacccacaccggaatagtaaggaggttaagaacattcctgacgacccctgccgccattttcttcttgattttgcccagtcagagcctgctcagaacttctgtgggccatattcagaacttttcaaaggattcatacaggcatgtagaaaacaggccccaaagacagatatagttgctggttccactattgatcaagctgtgaacgccacctttgctgctctggtgtatcgcactccagatttatatgagaagctgcaaaaatatgtcaacagtgggggcaaaatagccctgagtgaagagtttgcccaggtttattccttggcagatgggattcgaatatggatgttagagatgaagcagaagtccctgatgagcctggggaatgaagcagaagaaaaacatagttcagaagctactgaggtgaaccctgagagcctggcaaaagagtgcattgagaagagtcttctattactaaaatttctgcccacgggcataagttcaaaagaaagctgcgaaaagttggagactgctgatgaaaccagtcatctccagccactcaacaagcgtcagaggacaagctctgtggtggaagagcatttccaagcctcagtatctcccactgaagccgcaccccctgccacaggagaccagagtcctggcctgggcacccagccaaagctgccatccagcagtggccttcctgctgcagacgtgtcccctgccacagctgaagagcccttgtcaccttccacacccacccgccggcctcccttcacccgagggcgactccggctgctctcctttcgatccatggaggaggccagactggtgcccacagtgaaagagaaataccctgtgctgaaggacgtcatggacttcattaaggatcagtcgctctcgcacaggagtgttgtgaaggttctttccctgaggaaagcccaggcccagagcatcctggaagtcctgaagataactcagcactgtgcagaatcccttgggcagccccactgcttccatccacctttcatacttttcctgttggaacttctgacctgccagaaagattttaccaattattttggacacctggaaggctgtggtgctgatctacacaaagaaattcgagacacttactatcaacttgttctgtttttggtcaaagcagttaaaggatttagtagcctaaatgacaggtccttgctccctgccttatcctgtgttcagacagccctgcttcatcttttggatatgggctgggaacccaatgatctcgccttctttgttgatattcagttaccagatctcctcatgaaaatgtcacaggagaatataagtgtccatgacagtgtgatcagccaatggagtgaagaagatgagcttgctgatgccaagcagaattcagaatggatggatgagtgtcaggatggcatgtttgaggcctggtatgaaaaaatagcccaggaagatccagagaagcagaggaaaatgcacatgttcattgctcgctactgtgacctgttaaatgtggacatctcttgtgatgggtgtgatgagattgccccctggcatcgataccgctgtctgcagtgcagcgacatggatctctgcaaaacttgcttcctaggtggggtgaagcctgagggccacggagacgaccatgaaatggtcaacatggagtttacctgtgaccactgccagggtttgatcataggccggaggatgaactgcaatgtttgcgatgactttgatctttgctacggatgctatgcagcgaagaaatactcctacggccatttgcctacccacagcatcacggcccacccaatggtaaccattcggatcagtgaccggcagaggctcatccagccatatatccataactactcctggctgctctttgctgccctggctctctatagcgcccacctggccagtgcagaggatgtggatggggagaagctggacccccagacgcgcagcagtgccaccaccctgcggagccagtgcatgcagctcgtcggggactgtctgatgaaggctcatcagggaaaaggccttaaagctctagctttgctgggtgtattgccagatggggactcgagcccagaagatcaggccctaccggtcactgtgcccaccggagcgtcagaggagcagctagagaagaaagctgtccagggtgctgagctgtcagaagcaggcaatggaaagagagctgttcatgaggaagtcagacctgtagatttcaagcagagaaataaggcagataaaggtgtatcattatcgaaggatccttcatgccagacccaaatttcagattcacctgcagatgctagcccacctacaggacttccagatgctgaagattcagaagtgtcatctcagaagcccatagaggaaaaagcagttactccaagccctgagcaagtgtttgctgagtgttcccagaagaggattttgggattactagcagccatgttacctcccttaaagtcgggccccacggttcccctgatagacctggagcacgtccttccactcatgtttcaggttgtcatctcaaacgcaggccacctgaatgaaacctaccatctcaccctgggtcttctcggccagttaattatccgtcttttgccagcagaggtagacgccgcagtgatcaaagtcctctcagccaaacacaacctgtttgctgcaggggacagttccattgtgccagatggctggaaaaccacccacctgctctttagcctgggagctgtgtgtctggacagccgggtgggcttggactgggcgtgctccatggcagagatcctgcggtcactcaacagtgccccactgtggcgtgatgtcattgccaccttcacagaccactgcatcaagcagctgccattccagctgaagcacaccaacatcttcaccctgctcgtgctggttggcttcccccaggtcctctgtgtgggaacccgctgcgtttatatggataatgccaatgaaccccataatgtgatcatcttgaagcactttactgagaagaacagggctgtgattgttgatgtcaaaactcggaagaggaaaacagtgaaggactaccagctggtccagaagggaggaggacaagagtgtggtgactctcgggcccagctgagccagtactcccagcactttgcctttatcgccagtcaccttctgcaaagcagcatggacagccattgtcccgaggcagtagaagcaacttgggtcctgtccctggccctgaaaggattgtataaaacactaaaggctcacggttttcaggagatccgtgctactttccttcagaccgatttgctgaagttgctggtgaaaaagtgcagcaaagggactggctttagtaaaacgtggctcctccgggacctggaaattttgtccatcatgctgtactcctcaaaaaaggagatcaacgctttggctgagcacggagacctagagctggatgagcgaggggaccgagaggaagaggtggaacggccagtcagcagccctggcgacccagagcagaaaaagctggacccccttgagggcctggatgagcccaccagaatatgtttcttgatggctcatgatgccctcaatgcccctctgcacattctccgggccatatacgaactgcagatgaaaaagaccgattatttcttcctggaggttcagaagaggtttgatggtgatgagctcaccacagatgaaaggatacggtccctggctcagcggtggcagcccagtaagagtctgaggctggaagaacagagcgccaaagctgtggatacagacatgattatcctgccatgcttgtcccggcctgcacgctgtgaccaagccactgctgaatcgaaccctgtgacccagaagctgatctccagcacagagagcgaactgcagcagagctatgccaagcagcgccgtagcaagagcgccgccctcctgcacaaggagctgaactgcaagagtaagagggctgtccgggactacctcttccgagtgaacgaggccacagctgtcctgtacgcccgccacgtgcttgcatccctgctcgccgagtggcctagccacgtgccagtgagcgaggacatcctggagctcagtggccctgcccatatgacctacattttggatatgttcatgcagctggaagaaaagcatgagtgggagaagatcctgcagaaagtgctccagggctgccgagaggacatgctggggaccatggccctggctgcatgccagttcatggaggagccaggaatggaggtgcaagtgagggagtcgaaacacccgtataacaacaacaccaacttcgaggataaagttcacattcctggtgccatctacctctcaatcaaattcgactctcagtgcaacacagaggagggctgtgacgagttagccatgtccagcagcagtgacttccagcaagaccgacacagcttcagcgggtctcagcagaagtggaaagattttgaacttccaggagacactctgtattaccgcttcacctccgacatgagcaacaccgagtggggctacagattcaccgtgacggccggacacctggggcggttccagacaggattcgagattttgaagcagatgttgtcagaagaaagggtcgtgcctcatctcccattggcaaaaatttgggaatggctggtgggtgtggcctgtcgccagactggccatcaacgattaaaagccatccacttacttctgaggattgtgcgatgctgcggccacagtgacctgtgtgaccttgcgctgttgaagcccctgtggcagctctttacccacatggagtacggcctgtttgaggacgtgacgcagcccggcatcctccttcccctgcatcgtgccctcactgagctcttcttcgtcaccgagaaccgtgcccaggagcttggcgtgctgcaggattacctgctggccctaaccacggacgaccaccttctccgctgtgcggcacaggctctgcagaacattgctgccatcagcctggccatcaactacccaaacaaggccacccgcctctggaatgtggagtgttagcccttggtggggcgtgcatgggactagttcatctgccacagggattttagagcagacatctaacctcattcaggaaaactcctgtagcgccagtgcccagctctccttgagctgaccactccagttaggatgccaagcagccacgtctccaagagctcccgtgcgtaggctggacacaagcacaggctgtagcatggtgaaaataagccaagcagtgcagaatgcctcagaaagggtgggcagggggcccttaagaaggttcagagaccagccttctccagaggctgtcactgcaggagccgtgggcctgggaagacttggaagcggcctctctcaactggtttctgtctccgtggagctggaactgcctgcacttgccttcagagggaggcacagtccacccagatccacctttccagcaagacccccagtggctgcccagcctgggagcacctctttgcttttcacaccaaaccaaaactggcgagagcccctcctagccaccagtgatccccaagcatccagtacagaaccaggcatcgagctagctccctgcacggccgcaccctcccagagaactccttgaggagaacaagtgcccttggggacagccggcaggcgcccctgtacgtctgctcatgcaccaggcagcacagccgcagttcctcagttgttgttttgacatatttcagtttccacctcacgtttttagagcagaaccacactgtctccctggaggggctcgagggcatgaccggggactgaccattctgtgaaagtagcagaatgtgaggagcacgcgtgagcttatgtaccgtgaagatgatcagaggatatcttattttaagagtaaaaacccacataattttatttctgcttgatagtcatggtagtctgtcatacccacctctgggactctgcgtggctgtttggctgtcacttgtagcaataacgacattagttctagtcagtgctgttttacatttttcttttgatgggtttagtcttgccctggagtgccgatgatgattctccctccagagccacgcttgggaacatgaagcaagtctggcgtgtgggctgcgtgccggccttagtgggacccgtggggttggagcatgcctttaggggcagtgtctgggccgaagcacgtcccaccacacagtgccagagccagagaaggggccccaccaccaaggccaagcttgaccaggtcagcattgccatggcccagtgtgccccgtggcctctgaagatccctctgtgcagggtctgcagggatctggattgcaagggcccaagtctgcaggtctggaagcatcttcctataagagcactttcgccttctgggtcaggactccaaggtgcagcgggcttcacagccctacaattgggttctcagctaagccccagagttctggtagaaccatcccggggcgggtggagggtgggatttaagggagacgggaacacatggggcaggtcctggaacttggtggcctgaggactgaggccattgccctggtggaaaggcctggcctggttcctgtggcttgggacctgaataggcaggtgctgctggctccgtagaaacccttttcccatcttttgctctttgccaaacctaccttgctttgggagctgcctgcaccaccccagagaaggccccaccttcttcatccctcagacccgaggaggcctcccagtaaggagtttcccaagaggggactcacaggaaacaagtcttagtgcttgggagggaggccccgctgcgtgctcagactcacagccaacctggaaggtagacgagatagcgccacccacgcccctccacaccccagactccgagtaaagcgggcggtagggccggagtcacctcccctatggcagtggccgccgctgtactccatcctcccgtcaggaagatcagctgtaaataaacgctgggctccccagagcacctgtccgcccactgcccttgctgttctgggatcttcgctgcagttcacgggaaacaagcctgagtccgctcgcacccgcggctgctctcccggctcggcccggccgcctctgtctccggccaccgggtggcgctgccgagccagagccgccgcgtcccggcgctttccaggagccccaggcccggaggaggcgaagcccgcagagcaaaggtggaaacacgtgcctacgctgtaaagaaatcctgttccagagcatacctgttgtacaaacagacactgttcctaacgagaggagtgacgtattttcatcaccgtttttaatttgttttcttacgggtttacgattttgaatttttcttatttggttgaaagaattttgattctatcagcctgagtgagttcagcctgtaaaaaggatgttaagctgtgggtaaaatatgcaaacgaaaagaaatatattgtacaaattctatataataaggt

SEQ ID NO: 22297 - DNA, 6454 bp, Homo Sapiens
ctgagtttgccgagctgcccagccaggctgttcccacagacgcccaccaccccactcctcaccaccagcagcctgcgtacccaggccccaaggagtatctgcttcccaaggcccccctactccactcagtgtccagggacccctccccctttgcccagagctccaactgctacaacagatccatcaagcaagagccagtagacccgctgacccaggctgagcctgtgcccagagacgctggcaagatgggcaagacacctctgtccgaggtgtctcagaatggaggacccagtcacctttggggacagtactcaggaggcccaagcatgtcccccaagaggactaacggtgtgggtggcagctggggtgtgttctcgtctggggagagtcctgccatcgtccctgacaagctcagttcctttggggccagctgcctggccccttcccacttcacagatggccagtgggggctgttccccggtgaggggcagcaggcagcttcccactctggaggacggctgcgaggcaaaccgtggagcccctgcaagtttgggaacagcacctcggccttggctgggcccagcctgactgagaagccgtgggcgctgggggcaggggatttcaactcggccctgaaaggtagtcctgggttccaagacaagctgtggaaccccatgaaaggagaggagggcaggattccagccgcaggggccagccagctggtcttctaccagcacaagaacctcaaccagcccaaccacgggctggccctctgggaagccaagatgaagcagctggcggagagggcacgggcacggcaggaggaggctgcccggctgggcctgggccagcaggaggccaagctctacgggaagaagcgcaagtgggggggcactgtggttgctgagccccagcagaaagagaagaagggggtcgtccccacccggcaggcactggctgtgcccacagactcggcggtcaccgtgtcctcctatgcctacacgaaggtcactggcccctacagccgctggatctaggtgccagggagccagcgtacctcagcgtcgggcctggcccgagctgtctctgtggtgcttttgccctcatacctgggggcgggttgggggtgcagaagtctttttatctctatatacatatatagatgcgcatatcatatatatgtatttatggtccaaacctcagaactgacccgcccctcccttacccccacttccccagcactttgaagaagaaactacggctgtcgggtgatttttccgtgatcttaatatttatatctccaagttgtccccccccttgtctggggggtttttatttttattttctctttgtttttaaaactctatccttgtatatcacaataatggaaagaaagtttatagtatcctttcacaaaggagtagttttaaattccatttaaaatgtgtatttattggattttttaaaagcgacaatagtaatggtaaaggatgggcaggaaaggccagtagtgctcccccgcccagtctcgctgggtctggcgagccaagcccctcgggcgctggcgaggtcctcagccatctgcccctcgagagccaagcgcggacggtagccacccagttcatccctcccgacatacaccccttccctttggggaagggagcctcaggacagcttctgtcctctctgataggatgggagagtctgcagaaaaccatctggggtcccttttccagtccccggcttggagtcgaagggcagatgcaccccaggccagccccacgagatgctggcatagctttccccagaaaccaggttggaagtagatggcttcaagcttgctagtctccacactgaatcctctgtccgttatttatggagtcacacgatgtcatggttcactaggcagcacctcacgctggagctggagtgcgaggttcttaggggccgtgcccaccatgttgccaagccaatgcatgctgagctgaaggaatttgtcttagtggcagttttttaaaaaatgcccccaaagtctatgctgatactgaaaaagggctactgtatctttaaaaacaggaagttgaacccaagctgtgaaaagccagtggtgctctgtgcatggtgctgtgcggagcctggtgctgtagtgttgtgctgggactttcttgactcttgggcaggtcacatcctacaggagctcagcagaccagtgtaacaacagttaatgcatctatcctgatccctgaatttccacattggacaatggtgcatgcctcacacctgagcctgcttcctccatgctgtcattgggttcgggggcctacacttaacaattttaaagtgcaagagtcaaacattttcaacaggttgctataattttcctccctaattggtgccatttctccatttgatcattttctttttttcctttctcccctcttcatccactttaatatagctgttctgaaattctggtgcattcattcggttctttgaaatgagaatgtggtgcttaatttttgtgacgttgtcgagagaggttgggcctgatgggagcaacactcatcatcaccaagtcaaactttgttggagtgttggtttttcttgtgatattagcagaaatgatctcatgctagccatgtggatgtgtgtgtggtgaatggggggcttcatcaggacacacagaggggaatgtggccacacggtggatgaccaccaagccctgagatgaacaggtatttactgagcagttgtattcagatatgggtcttcatgaatcatgtttaacaatcagatgaccgctataggcaagttcctgagcttccgggtgccttgagtaagagctgagaaccggcctgctgggtgtttactgtatctgtttggaagcactggcggagggtcgttgtaagatgtcctgagcatttatgtggtctggttttaactgtaaatagtgaaagatttttttaagcacttttgcctagatttaaacagcaacttgaaaaaaaaagtatgttttaacatgtaattgtgggagaaattgtaaatagtagccgaatatttaatgtgctttgtctatcctccacttttaccatattctgtaaagttgcatttattttacaggacaaaaaaatgaaatattattgcttttgaaataaatacccaagagcttatcaggacttagaattattcagaactcagatttataggaaaacctctgaccttcagtttgacaagctaaaggaagcagagtctttaatgagcatgctaattttctagttttgaggaaaaattgggtcctttaaatgctattttgcttatcgcatcagtacttttatgcaggtctcatttgactccgtgcttaggtagatgcgggggtgccttgaaaacttcattttaaatgatcttaagcaagaaatacaatattttacgaaacatttggagaatgtgaccgtctgtatgacccgtggaagccccaggttggctgttggtttggaaggtcccgagtgtaacccaggtgattctgatacttggcatgtgtgaatcttcctgatgtatgttaaataaactcttcccctcatcaccctttggtaggaaagccattagatgaaaggagaaaccaatacaagctaaaagcatgcgacgtctgtcccccagcccaaacagccttggttcatcagtttctgcagtaggagataggctgctgagaggtgagtcaagaggcagtctccattggatgtccccactccccgcagaatggcgtttccagagttaggcggtgtggttgccgtgctcaagcccatgctgatttgtacactacatgtctaacctacctcaaatctcagtcattaaaattagcatgctttagacatatatttaaaaagtaactatgcacagctctttatcccccccttgctgctgaagctttcttaaagagaaaaatcaaatttttattttttactggcactatcattttttaagtcctaaagatgattaacagacatttttatcatgagaagaaaaataaagccattgcaactaaagaacctaacagcatgaccaagttcgaagagtcatattatagcaacggaaatcgatggcgtcttagtcatctccccagtgtgccctgtccacggacaccatccacgtgcagtgcaaacatttggttccttttctgctctgttttgttttccctgcctgttgcgtgcaagggaagtgcttgtaaagttctgtgctacgagatttttaaaataaaaatcgcttcgcagcaggttctcacaaaataactggtgctagctcaagaaatcatcatctgaccatcagaaatcttgactaaaggtgttgcatggatttgggggtctttcggtttttggttttgggtctggcttttagcagggccaatgtttcccacaccccggcttcatgggtactgctttgccttctcaccaaggtgacgatggtgtgcgtggaaagagatgataccccaccgccccctcttggtccttccaccagcctcttttgggaacagtagtttgcagagcaagggatttttaaagcgctaaaggaaagaagtagcagagcttaactgctttgtaccacacagcagtagatgtgcaaggacggttgacaatgagtcgatgataacctaatttcattgagagaaacccagccagacttgcttctagaggtttaatcaccatgagatctcaaaccaaggcaaagctggtggaaaactatatgatatccctgacgtgcctcaaccagtatctctttccttttgttactgaagtgtgttttatggactaggaagcatttttatgaattgaaatagtctaaataaaatggtgctatggtgttttaatgtgactgtccctgatcctgtcttgctgaggtgctatcaacgttctgaaaccacaaccaaccaaaaacaaggtgggctccagtctcttggctttttttttttttccctcccctcttttggtgctgtcttagacccgtttaccgtgctataatctgctctgagcagtgttgtgttgtgttgtattgttcttcccttggtggccaaacaaagcaagtcgagaaggcagctatctccctttctgtgatcgggagtgggcctgcctggcttggcaggtgctttttggttccacacctgtcttctcaggcttgatgtgaaagaaagggcgaagggttttttgagtttttgtttttgaggaaggggagttgggtacttctgcctctcctagcatgataggcattctcatagccagggacagattttctcctgcagcccagggtgctaagcagacatctctgggagtcccaagggcacaccaagggagaccagatggatctccttcctcccctggcactggctgggaccatggtgggcaggggcttcattctctgacccagcgttgcttctgcctctcattggtaaccccttatgttcggactaaaggaaggagctttctttgctcactcgatgccactgaggctgctttttagttggtgctaacctaaatttcttcttgggtccacagaagttgatgttttaaaaactcaccaggaagctccattttgtgtcatccactgtcacaataatttttttaaatacctcaaaaacaggacatcatgacaacttcagtaaagtagattccatgagggtctgatacctgcaggttgtccgtctgatgacatacttgaccttgaaaaatctggggtcattttgtttttcattcttcagcagttaagatagcggaacgccgaaaggaaggagcgtagttggctgtatttcatgtttaagttttgcttttgaataaaatgtgaatttcctatgcccatctcattgagctttctcagtcattgttgctgtcatttgaaatgactccctcaaaacctagttttattagccagctgcctctgctgtagtacatggccaacttcaacataccctggaccaaaacatttttgaggtgcatacccccaacataagttacacagtcccacatccaggtgcacagagtgcgagtgcactccgcgagtgcggggggaggggcggccccctctggtgctcccagcccttcctcctgcagagctgcaggcaagagcagagcaataggcttctcccctgagcagagaccgcagcacagaaatgcaaggtctaaagttgctttttgcctaagaatcagcgagcgatttggcctacttcctcattggcttctattctgatatcagggatgctttttgtagtggtattgtttgctccctcttcgcgttttgactacccgtcattcaggggtaactcatcactcttcacacggggatttaaattaagaaactaattggctcatgtgaacattccaaattttcttggtttcaataccctttttttttcttttgaggggaaaagaggggagaaaaacaggagtgatgtcatttctttttcatgtattcc

SEQ ID NO: 22298 - DNA, 6299 bp, Homo Sapiens
acggggatcgccggcgggcggcaagcggaggcggcccaggcccggcggtctccgagatgtcacgatggctgtggccatggtcaaactgtgtgaaagagcgggtctgccgctacttgctgcaccactacttaggtcacttcttccaagagcacctcagcctggaccagctcagcctcgatctgtacaagggcagcgttgccctgcgagacatccacctggaaatctggtctgtgaacgaggtgctggagtcaatggagtcaccgctggagctggtggaaggcttcgtgggctccatcgaggtggccgtgccctgggctgctctgctcaccgaccactgcacagtgcgcgtgtccggcctccagctcaccttgcagccccgccggggtccagcgccaggggctgccgactcacagagctgggcctcatgcatgaccacaagcctgcagctggcccaggagtgtctgcgggatgggctaccggagccctctgagccaccacagcccctggaggggctggagatgtttgcccagaccattgagactgtgcttcggaggatcaaagtgaccttcctggacactgtcgtgagggtggagcactctccgggtgatggggaacgtggtgtggccgtcgaggtccgtgtgcagagactggagtactgtgatgaggcagtgcgggacccaagccaggcgccgccggtggatgtgcatcagccgcctgccttcctgcacaagctgctgcagctggcaggggtccgcctgcactacgaggagctcccggcacaggaagagcctccagagccccccttgcagatcggcagctgctcagggtacatggagctgatggtgaagttgaagcaaaatgaggccttccctggccccaagttggaggtggcgggacagctgggctccctgcacctgctcctgaccccgaggcagctccagcaacttcaggaactgctcagcgccgtgagccttacagaccacgagggcctggctgacaagctgaacaagagccgcccgctaggtgccgaagacctgtggctgattgagcaggacctgaaccagcagctgcaggcaggggcagtggctgagcccctcagcccagacccccttaccaacccccttctcaacctggataacactgacctcttcttctccatggctggcctcacaagcagtgtggcctcagccctctctgagctctccctctccgatgtagacctggcctcctctgtgcgcagcgacatggcctcccgccggctctctgcccaggcccacccagctggcaagatggcccccaaccccctcctggacaccatgcgccctgactcgctgctgaagatgaccttggggggtgtgaccctgaccttgcttcagacgtctgccccatcttccggaccacctgacctcgccacgcactttttcaccgagtttgatgccaccaaggatgggcccttcggttcccgagacttccatcaccttcgaccacgcttccagagggcctgtccctgtagccatgttcggctaacgggcacagccgtgcagctgtcctgggagctgcggacgggcagtcggggccggcggacaaccagcatggaagtgcacttcgggcagctggaggtgctggagtgtctgtggccccggggcacctctgagcctgagtacacggagatcctgacctttcctggtacgctgggctcccaggcctcagctcggccctgcgcccatctgcgccacacacagatcctgcgccgtgtgcctaagagccgaccccggcgctcagttgcctgccattgccactcagaactggccctggacctggccaacttccaggcggacgtggagctgggggccctggaccggctggccgccctactgcgcctggccaccgtacctgctgagcctccagccggcctgctgacagagcccctgccggcgatggagcagcagacggtatttcggctctctgcaccccgggccacgctgcggctgcgcttccccattgccgacctgcggcctgagcgggacccctgggcgggccaggccgtgcgggctgagcagcttcggctggagctgagtgagccccagttccggtcagagcttagcagtgggcctggtcccccagtccccacccacctggaactcacctgctccgacctacatggtatctatgaagatggagggaagccacctgtcccttgcctgcgtgtctccaaagccctggaccccaagagcactgggcgcaagtacttcctgccccaggtagtggtgactgtgaacccccagtccagcagcacacagtgggaggtggccccggagaagggagaggaactggagctgtcagtggagagtccctgtgagctgcgggaacctgagccctcgcccttctcctctaagaggaccatgtatgagacagaggagatggtgatccctggagaccctgaggagatgaggacgttccagagccggaccctggcactgtcccgctgcagcctggaagtgatcctgcccagtgtccacatctttctgcccagcaaggaggtctacgagagcatctacaacaggatcaacaacgacctgctcatgtgggagcctgcagatctgcttcccacccccgaccccgccgcccagccctcgggcttccccggcccctcaggcttctggcacgacagctttaagatgtgcaagtcagccttcaagctggccaactgctttgatctcaccccagactcggactcggatgacgaggatgcccacttcttctcagtgggggcatcaggtggcccacaggccgctgcccctgaggccccaagtcttcacttgcagagcaccttctctacactggtgacagtgctgaaggggcggatcacagccctctgtgagaccaaggatgagggtgggaagcggctggaggctgtgcacggggagctggtgctggacatggagcacggtaccctcttcagcgtctcccagtactgtggccagccaggacttggctacttctgtctggaagctgaaaaggcaacactctaccaccgagcggccgtggatgactacccgctgcccagtcacctggaccttcccagtttcgctcccccggctcagctggccccaaccatctacccatcggaggaaggggtgaccgagcggggagcctcgggccgcaagggccagggccggggaccccacatgttgtccactgctgtgcgcatccacctggacccccacaagaatgtgaaggagttcctggtgacactgcggttgcacaaagccaccttgcgccactacatggccctgcccgagcagagctggcattcccagttgttggagttcctagacgtgctggatgaccctgtgctgggctacctgcccccgacggtcatcaccatcctgcacacacacctgttctcctgctctgtggactataggccactctacctcccagtgcgtgtcctcatcaccgcggagaccttcactctctccagcaacatcatcatggacacctccaccttcctgctcaggttcatcctcgatgactccgccttgtacctgtccgacaagtgtgaggtggagaccctggacctgcggcgagattatgtctgtgttttggatgttgacctcttggaacttgtgattaaaacctggaaagggagcaccgagggcaaactgagccagccactattcgagctgcgctgctccaacaatgtggtacacgtgcacagctgtgccgactcctgtgccctgctggtcaacctgctccagtacgtaatgagcacaggcgatctgcaccccccaccccggccccccagccccacggagatcgccggccagaagctctcggagagtcctgcctctctgccctcgtgccccccagtggagacggccctcatcaaccagcgtgacctggccgacgccctcctggacaccgagcgcagcctacgggagctggcccagccttcaggtggccacctccctcaggcgtcgcccatctccgtctacctattcccaggtgaacggagtggggccccacccccttcaccacctgtcgggggccctgctggcagcttagggtcatgctcagaggagaaggaagatgaaagggaagaggagggcgatggagacaccctggacagtgatgagttctgcatccttgatgctcccggcctgggcatcccgccccgagatggggagcctgtggtgacacagctgcatcccggccccatcgttgtgagggacggttacttctcacggccgatcggcagcacggacttgctgcgggcacctgcccatttcccagtgcccagcactcgggtggtgctacgtgaggtctccctcgtctggcacctctatgggggccgagactttggcccccaccccggccacagggcaagaactggcctctcaggtcccaggagctccccttcccgctgctctggccccaaccggccccagaactcatggcgcacgcaggggggcagcgggcggcagcaccatgtcctcatggagatccagctgagcaaggtaagcttccagcacgaggtgtacccagcggagccagccacaggccctgcggcccccagccaggagctggaggagcgaccgctgtcccgtcaggtgttcatcgtgcaggagctggaggtccgagaccggctcgcctcctcccagatcaacaagttcctgtacctacacacgagtgagcggatgccgcgacgtgcccactctaacatgctcaccatcaaagcgctgcatgtggcccccactaccaacctgggtgggcctgagtgctgtctccgcgtctcgctgatgcccctgcggctcaatgtggaccaggatgccctcttcttcctcaaggacttcttcactagtctggtggccggcatcaaccccgtggtcccaggggagacctccgctgaggctcgccccgagactcgagcccagcccagcagccccctggaagggcaggccgaaggcgtagagaccactggttcgcaggaggccccaggaggtggacacagcccctcccctcctgaccagcagcccatctacttcagagagttccgcttcacgtctgaggtccccatctggctggattaccatggcaagcacgtcacgatggaccaggtgggcacttttgctggcctcctcatcggcctggcccaactcaactgctccgagctgaagctaaagcggctctgttgcaggcacgggctcctgggtgtggacaaggtgctgggctatgccctcaacgagtggctgcaggacatccgcaagaaccagctgcccggcctgctgggaggcgtgggccccatgcactcggttgtccagctcttccaagggttccgggacctgctgtggctgcccattgagcagtacaggaaggatggccgcctcatgcgggggctgcagcgaggggctgcctcctttggctcatccacagcctctgccgccctggaactcagcaaccggttggtacaggctatccaggccacagctgagaccgtgtatgacatcctgtccccggcagcccccgtctcccgctccctgcaggataagcgctctgcgcggaggctgcgcaggggccagcagcctgccgacctgcgggagggtgtggccaaggcctacgacacagtgcgagagggcatcttggatacagctcagaccatctgtgacgtggcatcgcggggccatgagcagaaggggctgacgggcgccgtggggggcgtgatccgccagctgcccccgactgtggtgaagccgctcatcctggccacggaggccacgtccagcctgctcgggggcatgcgcaaccagattgtccccgacgcccacaaggaccacgccctcaagtggcgctcggacagtgcccaagactgagcctggggtgcccggcacccagagggtgctgcccaccatgctcctgagcctcccaagagctgcagcccacgggcccggcccggcctggcccttcaggggatggccactgtgaaggacgccttcccagcctgcccgttgccaatctgctgtgagaggggggcctccctgccttggggccttagccctggctctgcacttttcctccggggagaaaggacactgcccctcccccgacctgggcccacactgctgccttctcccaggacggaggcttttggaccctcggaccccatcccactcagccaagtgtctttctgtgtctggggggaggaggggatgatatccgtgtggttcgatgtattatttttaagctccgtgagtgcgtgggtcagtgtctgcatgaagtggaataaactgcccaccgcc

SEQ ID NO: 22299 - DNA, 6356 bp, Homo Sapiens
gccttcgccgccgttggggctggaagttcccgccaggtccgtgccgggcgagagagatgctgcccggcccgcctcggctttgaggcgagagaagtgtcccagacccatttcgccttgctgacggcgtcgagccctggccagacatgtccacagggttctccttcgggtccgggactctgggctccaccaccgtggccgccggcgggaccagcacaggcggcgttttctccttcggaacgggagcgtctagcaacccttctgtggggctcaattttggaaatcttggaagtacttcaactccagcaactacatctgctccttcaagtggttttggaaccgggctctttggatctaaacctgccactgggttcactctaggaggaacaaatacaggaatagcaacaactataactacaggattaactctgggaacgccagccactacatctgcagctacaacaggcttcagtttaggattcaataaacctgcagcatctgccacaccatttgctctacctattacctctacctcagctagcggtctgactctttcgtctgctctgacatcaactccagcagcatccacaggatttactctaaataatttgggtgggacaacagccacaactacaactgcatcaacaggcctctctttagggggagccttagctggtttgggaggttcacttttccagagtacaaacacaggaacatcaggacttggacagaatgctttagggttgactttgggaactacagcagctacttcaactgcaggcaatgaaggccttggtggtatagatttcagtagctcctcagataaaaagagtgataaaacgggaacaagaccagaggatagtaaagctctgaaggatgaaaatctacctcctgtcatctgccaggatgttgaaaatctccagaaatttgtgaaggagcagaaacaagttcaagaagaaattagtagaatgtcttcaaaagcaatgcttaaggtacaagaagatattaaagctctgaagcagctcctgtcgttggctgccaatggaatacagagaaacactctcaacattgacaaattgaaaatagaaactgctcaggagttgaagaatgctgaaatagctttaagaacccagaagacaccacctggacttcaacatgaatatgcagctcctgctgactacttcagaatcttggttcagcaatttgaggtacagcttcagcagtacaggcagcagattgaagaactagaaaaccatcttgccactcaagcaaataattcacatataacccctcaagatttgtcaatggctatgcagaaaatttatcaaacatttgtagctttagcggcacaacttcagtctattcatgaaaatgtaaaggttctgaaagaacagtaccttggctacaggaaaatgttcttgggagatgctgttgatgtgtttgaaacaaggcgagcagaagccaagaagtggcagaacacacccagagttactactggacccactcctttcagcaccatgccaaacgcagcagccgttgccatggctgcaacacttacacagcagcaacagcctgctacaggtctgaacgcattcaagttatagcttcttactgttccaatgcagaacatttatgtgcgtttttataagtcttccatttgtgtgagcactgaagaaatttctatgagtagctgttccaatacaatctaaaattgtgatggacacgattataaacatacctgataaaaaaggcagggtagtcttagcaataattatacatcaattagatattgaatattgtgaatctacttaatgttatttgctgtaatgctataaatgccctttagaacatggtgtttcactagtgaattacatttaagaataacattagattctgaaatcatgactgtaccatttattgttttaaagtcagagatcatccatccattctttgaatttttcatatatgatactgataggtggtgcattctcattttcctcatacatagtgattacaaagtacccacattcaggatgaagtatgcttttattgactgaaggtatgttgaagatcaataggcttgtttgtatgtatgttgactgtaaacagaatacaagccctctaaaccaaattttgaagatgatacatgctagaattgtacctttccaaggtgaacagaacagcaagagcaggaaaaagatgttttgagatgtggattgcacattaaggagcaactgggaagttgaacagatgaaaataattggtgacatggaaagcagattgttttatttcttggtttagttacacttctaattagagaaacattttttgtggtcattctacagtgttttatttggtcctgtgtctttcggaggttaatagttatcttaatcctgccatcccttttgtcaggtttgaagcttgacatggaaaaatagtcttaatcgatattgatttttttattttaatcattcataaatttcttagtaatgcttactattcaatagcatgtgtctttctgagagttccatatagtccagtagtacattataatacacacaaattaatacatatttagattgcattcaagctacctatactagggaagcattctctggttttcactattggcagtttaaaaaattgttcttcacatttggagatgacagaattgacttgccataagtaaagggttgatgatagatttatgccaaatcctccatatcccgtggctggacccatgtgaatagtggctcgcacgagcactgtctggtagctctctagctggctggagtgtaggattgcgttgttaagttatggagggaaaaagtcattatgggattgattcctttgaggattgatatttcttcttaaaaggattcaatcccataattatgaccatcagctctcatgattacctaaccagttaatcaaaccaaccatagtactagtttactttttagagccagtattaatcctaaagtagataagtgtagatttggttaagtgttctttaaacatagtgaatttccattctattaaatagaacttgagaaatgtcagttatataaaaagttatgttgtaagtgaatatattctatgataaatacctaaacttgaagcaaaatctcctgtcaagggtttgtgtgtgtgtgtgtgtttaactttcttatctatagattattattttgagaaattcataggttttcacttatacattttgagcttgtggacatatggagatgtgtgttcattctctaaatgagtgcctactatgtgctgggctcgaggaatacaaaggtagacaatatagattttgtctttgccctctgtggtggttgacaatgttagcttaatctggagtattcttgaggagccttttgctcataggctttaattttgtctgtgacttttgccaggctttggggaaattgactgccttcactcttccctgaaactttgaagtccacataagggctttctcatcagatggcagaaattataatttattaacctaaacaaccttacagtgttttcgctttgaattgtatgaattcttagaactgagaagctaaacaacagtgataacaattttacattatcttttctttctccttttgtttctctaaaggtctcccaggccttcccagtcaaaattttcgttatttttagtcatgtcaccatgatgtgagatttctgagctctgttagatacatttagaaatgtccctatttatcaaatggtgttttgtaccccataagttatcccttatgccctgtgacttctgtgaaatctttgtttttaagtgccagtaacaaattttagaccatctagatgagggtagagagagcttatgcattgtttttatacatcactgttgatctatacaagatttgagttatcagaagggttttgcttttatttgcatatgaaatttttattaacatgaatatgggcacagagcaaatagcttcttagactgctgccttctgaaggtggcttctgtatctttctcagaggaggaggaatagacttaaacgacttctttgtcctccttcaattttttttttaatgaaaaagtatactagggcttaggcatgtgtgatttacagttatttgttctgaaggctgcagagaattgaaaatccagcaggctatttgtgtatgaaatcatgagcatcgataacgtggataacgtagttccatgttggcagaacttgacacttgtctataagtgcttcccaagcctcctgaaaaactgaagacatttacattaggcttttcagtataattttaatttaggataggttttttagcaatgtatctgggattgagttttgctattgtgttttgacactttaagagttcttgatgtttacataataagactttcttatgtgacttagctgctgttttaaggagagccaagacgttttgttaggaattcctaatttttagcttagtgtaggtttggacatttaaggtgtagtgttaaataggaaacattaagtatttcatcttagtttcttgtggttttgtgattttgttgtatttaataaccaaaggaacattccccattaaatcagtaagagtaaaatttttcaaactggggaaaacgcattttaggttttttaaagaaaaattattttaaaatgtgacttagaaataaccatactaattacattaggcatttggggtgatcatggaaaattataaaatatttttagcactttagtcctttttctgttaatgcagttttacttttaagaaagtaaaatttattctggaaaatatgaattacagcgctaaacctggttttgttgtgtgtgaatatattatatggtaacttttgtaaaatgttactctacatgaagatttcactttggccagtcattggtatatatcactacaaacttaattttatttatggaaataagaacctctcattggatgactattcaaatttcaaagcagacttcttgaattgtttacgtaacttttgcctgaaggatttagactgctttctaatagtgaaactaatatatatggtggccagagtgtaatatatgctaatactttggcatgggagatatttatcatgagtttttactattaaaaaatgttatacatttgcctacgagttttataaatgatgttgccttcagaatttgtgtgaaggtacaaaactaaaaatatcatgtatctgatgtgcaatggaaagtcttgtcatcattagatatgagttcttgattatattctgaatattgatgattagaaaaatcttatgttctgtcgctcttaacaacagacccacacacaacaaaaagcatgctatttgagtaactcttacgacttacaaggctgagggctgtggtgtgcattattctttagggtcttccaccagcagtgcctcctattaacctgtgacaaacaagtctctcaatgttaaagaactggacatgtgttttttatgttttttgttaggaatcagaaagtataataatatgcttggtttctttttcctatagtaacattttacaaaagagctgctaggcaggtattttattctcaaagtgatctcaaactggatgtaaaattttaaattatttttttaatagtagtataagaattctggctgctattagttattgtttgttttctgggttagaagctattcgaaaagtccagtttctgtcccagtgtagcaaaatgtagttcctcggttgtttttctttaaatgctttataattttacactacctttttaatatacaaacctcattcttcattggataacttgaaggctttgatttctttaaaaatttaaattttagtgtgtatattactttgacagttccctcatctttgagatgcactgatcactgtgcttgaaaaagacaatactgaagattgtactatgaagtttattgaataattttcataaattatttatccaaatgagagatttttagatttttgtattctgcttagttttaaaaaaaaaaaatagtagtttaaaagagaggctagtaagtttgatgctattcttgccaaacaaactcagccaaaatctttaaagtaacaagagggaaaaggatgactaatcgttctgcttctgagtacattttccaaaacgttggaaagaaacttctgaattgaaatcttgaatgtattgaatctgtcaaggtacacagcggtgcctttgtaaatgttcattactttatttaatcaggtgataagtggtgtaatgtagcagagcttaagaatagaactcaattatcactttttgtgaacaagttggaattgtcatgttactgtgtaattgatttgctttacaatgaacaataaatttaataaaat

SEQ ID NO: 22300 - DNA, 5743 bp, Homo Sapiens
ggagctcctgggctgcagctcctggagtttccgaggttcgtgcgcgtctggtggcggcggcgtgatgttctcggcaggagcggagagtttgctccaccaggccagggagatccaggacgaggagctgaagaagttctgttcccggatctgtaaactgctgcaggcggaggacttggggccggacaccctcgactccctgcagaggctcttcctcatcatctcagccacgaagtacagccggaggctggagaagacatgcgtagacctgctgcaggccaccctcggcctgcctgcatgccccgagcagctccaggtgctttgcgccgccatcctgcgagagatgtccccctctgacagcctcagcctggcctgggaccacacgcagaacagccggcagctgagcctggtggcctccgttctcttggcccagggtgacagaaacgaggaggtcagagccgtgggccagggcgtgctacgagcgctggagagccggcagcctgagggacccagcctcagacacctcctccccgtcatggccaaggtcgtggtcctcagcccgggcaccctccaggaggaccaggccaccctgctcagcaagcggctggtcgactggctgcgctacgccagcctccagcaagggctcccacactccggcggcttcttctccacgcccagggcccggcagccgggccccgtcaccgaggtggacggggcggtagccacagacttcttcacggtgctctccagcggccaccgcttcacagacgaccagtggctgaacgtgcaggccttctctatgctgcgggcgtggctgctgcacagcggccccgagggcccgggcaccctggacacagatgacaggtcagagcaggagggctccactctgtcggtgatctccgccacctcctctgccggccgcctgctgccgccccgggagcggcttcgggaggtggccttcgagtactgccagcgcctcattgagcaaagtaaccgacgagccctgaggaagggggactccgacctgcagaaagcttgcctggtggaggccgtgctggtgctggacgtgctgtgccggcaggacccgtccttcctgtaccgaagtctctcctgcctgaaggccctgcacgggcgggtgcgcggggacccggcctctgtgcgggtgctgctgcccctcgcccacttcttcctgagccacggggaagcggctgcagtggactcggaagccgtctaccagcacctgttcaccaggatcccggtggagcagttccacagccccatgctggcctttgaattcatccagttctgcagggacaacctccacctgttcagcgggcacctcagcaccctcagattgagcttccccaacctctttaagttcctggcctggaacagcccacccctcacctccgagtttgtggcgctcctcccggccctggtggacgctggcacagccctggagatgctgcacgcgctgctggacctgccctgcttgacggcggtgctggacctgcagctcaggtcagcaccggctgcatccgagaggccactctgggacacctctctcagggcccccagctgcctggaggccttccgggacccgcagttccagggtcttttccaatacctgctgcgccccaaggccagtggcgccactgagaggttggcgccactccaccagctgctgcagcccatggccggctgtgcccgcgtggcccagtgtgcccaggccgtgcccacgctgctgcaggcattcttctcagcagtgacccaggtggctgacgggtccctgatcaaccagctggcgctgctgctcctgggcaggagcgactcgctctacccggccccagggtacgctgccggtgtgcacaggcctgatgcatgcaggcccatcctggttccactctgagcctgggcctgaggccagcgctggtgccagccttctccccagtgagaacagtttctctgaggctggcagtcttctgtgttcctctatcggagggtgcagcatacacctaccactcagacgcttcccgggtttctccaggcccttggcctggatggggatggggtcataggtctgcacagagcaggcgtagacccggctttctgggcagtgtgctgagttctcagttcctggccctgtgtacgctgaaaccctccctggtggtggagctggcaagagacctgctggagttcctgggcagcgtgaatggtctctgcagcagggcgagcctcgtcaccagcgtggtgtgggccatcggcgagtacctgtcggtgacctacgatcggaggtgcaccgtggagcagatcaacaagttcttcgaagccctggaggctctgctattcgaggtcacccagtgccgcccctctgctgccctgcccaggtgtcccccccaggtggtcaccgtgctgatgaccacgctgacgaagctggcctcccggagccaagatctgatccccagggcctctttattgctgtcaaagatgaggaccctggctcacagtccagccaccagctccacgcacagcgaggagggcgcggaagccatccgtacccgggccacagagctgctgaccctgctgaagatgcctagcgtggcccagtttgtgctcacacccagcacggaggtgtgcagcccccgctatcaccgcgatgccaacacggccctgcccctggccctgcgcacggtcagccggctggtggagagggaggccggcctcatgccagggtgaagggacagtggccagggacttcggtgcagattaagagcctgggcagccagcttgctactgaggccaggctgataggagctcaggagggcgcgggagtcctgggagaggaggcaaggcccacggtgggcttggcaccctcacagacacgcggggctggcccccctgctcaccctctgggctttgtctccgagccttttgctcccaggcaacactgagctgagctgaggggtgccatggagcggctctgattggaggcttgaggccctgtggctgggtcgggtggaggctgctgggtctgtttcctagtcttttgtttttggacagttgatgggcaagaagagctgcagtaaaagtaaatctcctttaataagcgtctgtatgaagagtgcgcgatcagttccgttacctgccctgcaccctggggagaggaccagggatgggaacccctggcagctgctgccagtcctggaggctcagcccggcgtgccactgctgctacagaaaccaggtcatttgtgcacagcccggaaggcagcggcgcgagttcccgggtgtggtcaccgctctgggtggtgcgcttgtcaatgccccttttgatgcccttgaatagcctgaagatgaaggggaccgggggagggttgcaagcgccatggcctatgcaggctgcggcctctggccattcggagggaaggccccagggagccacctgagtggagctcagaacactggattcgcgcgaaggggaggtgtctgggcgtgcggccccagccccgccaccttcctgggccctgtggtcccaccctccggactaccaaggcacagctgtgtcgcacgttccgcccggtgcctgggacgggctcagccgccagggggcgccgccgccccgagagcctcacgccccgcccccaggctcaaactcttccccctccccactctggctccgcccccggtctcctcttttgctctggccccgcccacctcccctccggcctcggccccgcccccaatcccccatagctctgcgactaagaaaccacaggctgaaggcgactgcagggtcctgccccttgcccagcctcaggactatggagggggcgagtgacgcgcaaggaacggagcaggggacaccgtgcgggctcaggagctccccagatgcccgagccgaaccgcggggtcctcaccgccaggttccagcccaggaagcgctcgcctgccccacagcctgggccttgggtcgcgttccgagctccaggacggctggtgtcccccgcggcctgcgatgacagcccagggccgctgagccggggccgcaggaaaggctggcgctggcaggcgcttccgtcggcagcactgtgtttgtgtttccacgtggaaacagcagcgcacgtgtacaactgtgcataccaaggcgtgcgtgccagtgcgcgggtctcgggatcacttcccagtgcggtgcacgaccccgcctgcagcagtgggtgtgggggcgctgctgggctcatcccgaagctcagagagcgtggggctgcccctaggctcggaatgagtctcccactgagtccgcagctcccctcctgccctggggcggggcttccctgacctgaaggcgtcgggggtgtcctggctcccagctcccaggcactcgtggggccaccgcccaggccagctggtgctaagtccgcagcctgtgcagcagcgcccggcttaggactgggagtgtgacttgaagggccgtcccgctcatccaagggacaaggaggagctcatggccacagggcctcggagggcatgaccccagcccagggaggagcaaccttcaggtggcctccaggaggcagctgggaaaagggcaaagctcaccagctctcaactttttttttaaataaactgaaattttagaatagtttttcagatttacagaaaagatgataaaccttagaaacattatatgctaagtgaaagtgagaagtgacagcctgctggcagtcctcacagccctcgctcgctcttggcgcctcctctgcctgggctcccactttggcagcacttgaggagcccttcagcccgccactgcactgtgggagcccctttcagggctggccaaggccggagccggctccctcagcttgcggggaggtgtggagggagaggcgcggtgggaaccagggctgcacgcggtgcttgcgggccagcgcgagttccgggtgggcgtgggctctgtgggccccgcactcggagccgccggctagccccgccagcctgggcagtgaggggcttagcacctggaccagcagctgctgtgctcgatttctcactgggccttagctgccttcctgcggggcagggctggggacctgcagcccgccatgcctgagcctcccccctcccctccgtgggttcctgcgcagtccgagcctccccaacgagtgttgccacctgctcagggcacccagtcccatcgaccacccaagggctgaggagtgcctttggagcagggcacgggactggcaggcagctctacctgcagcccctgtgcaggatccactgggtgaaagccagctgggctcctgagtctggtggggacttggagaacctttatgtctagctaagggattgtaaataaaccaattggcactctgtatctagctcaaggtttgtaaacacaccaatcagcaccttgtgtctagctcagggtttgtgaatgcaccaatagacactctgtatctagctactctggtggggacttggaaaacctttttgtcaacactctgtatctagttaatctggtggggacatggagaacctttgtgtctagctcagggattgtaaacgcaccaatcggcaccctgtcaaaacagaccactcggctctaccagtcagcaggatgtgggtggggccagatgagaataaaagcaggctgcccgagccagcagtgacaacccactcgggtccccttccacaccgggatgctttgtttgttcgctctttgcaataaatcttgctgctgctc

SEQ ID NO: 22301 - DNA, 5413 bp, Homo Sapiens
gaagagggatagggccagcaaggcagggatcgaacgagtgtctggcagccgggagcccagcgaagagagcgagcaagcttaggaaaacgagcgaagtaaagggagtaggggagactgagactgaccggtagccaggcaggcggacggacgcacgcccggacagactgagcaggcgccggagaaccactcacaggttccccccgcctttccctttgaaagctaggattttgcctttcccgtggcgcccgagagagaatgctggactctgccgacttcagcgcaagctaagatttctcagctagggacaaacgatcagcccaatcctgagaaggggggaaccaagcaccccgtccccatccccctcccctcccccgactaaactcgggcgccaaacccagcccttctctaaccaccctacttcctcctctcctttctagcatggtggctgtatggacagtctgacagaacagagactgacatctcccaatctgccggccccccacctggaacactacagtgttctgcattgcaccatgaccctggatgtgcaaactgtagtcgtttttgccgtgattgtagtcctcctgcttgtcaatgtcatactcatgtttttcctgggaacgcgctgaatggagtccagccacctgagctgtcgcgaactctcgctttgatttcatcccgagagccaccgagaaaaaaaaaaaatcacagacagagacagggaaagagagagaaagaacaagctttcttactcaggggggaaaacgttttgagcttcaacatggcctcgctgtgatatgtatgacgttgctgatcactggagattccatcgttagtgctgaggcagtatgggatcacgtcaccatggccaaccgggagttggcatttaaagctggcgacgtcatcaaagtcttggatgcttccaacaaggattggtggtggggccagatcgacgatgaggagggatggtttcctgccagctttgtgaggctctgggtgaaccaggaggatgaggtggaggaggggcccagcgatgtgcagaacggacacctggaccccaattcagactgcctctgtctggggcggccactacagaaccgggaccagatgcgggccaatgtcatcaatgagataatgagcactgagcgtcactacatcaagcacctcaaggatatttgtgagggctatctgaagcagtgccggaagagaagggacatgttcagtgacgagcaactgaaggtaatctttgggaacattgaagatatctacagatttcagatgggctttgtgagagacctggagaaacagtataacaatgatgacccccacctcagcgagataggaccctgcttcctagagcaccaagatggattctggatatactctgagtattgtaacaaccacctggatgcttgcatggagctctccaaactgatgaaggacagccgctaccagcacttctttgaggcctgtcgcctcttgcagcagatgattgacattgctatcgatggtttccttttgactccagtgcagaagatctgcaagtatcccttacagttggctgagctcctaaagtatactgcccaagaccacagtgactacaggtatgtggcagctgctttggctgtcatgagaaatgtgactcagcagatcaacgaacgcaagcgacgtttagagaatattgacaagattgctcagtggcaggcttctgtcctagactgggagggcgaggacatcctagacaggagctcggagctgatctacactggggagatggcctggatctaccagccctacggccgcaaccagcagcgggtcttcttcctgtttgaccaccagatggtcctctgcaagaaggacctaatccggagagacatcctgtactacaaaggccgcattgacatggataaatatgaggtagttgacattgaggatggcagagatgatgacttcaatgtcagcatgaagaatgcctttaagcttcacaacaaggagactgaggagatacatctgttctttgccaagaagctggaggaaaaaatacgctggctcagggctttcagagaagagaggaaaatggtacaggaagatgaaaaaattggctttgaaatttctgaaaaccagaagaggcaggctgcaatgactgtgagaaaagtccctaagcaaaaaggtgtcaactctgcccgctcagttcctccttcctacccaccaccgcaggacccgttaaaccacggccagtacctggtccccgacggcatcgctcagtcgcaggtctttgagttcaccgaacccaagcgcagccagtcaccattctggcaaaacttcagcaggttaacccccttcaaaaaatgatacctacagggaggcagataattttaaaataaagtaaataaaattatatttatagatggaccttttttcggagaagcactgttgaaatttatacacacacacacacacagagacccttgagtacacatacacacacacacacacagacacacacacacacacacacacacacacacacacagagagataaggaacaaaagtgttttctgttgttttggggaagtgaaatatgtggttggtaggaagaggtaccaatgacttccaaacatgtgattccgtcttaaaagttttccatttttaccctgtcccccttccctttgctttcagaagttgacatttctattcattgcttttcttgttaagataatctctttactcccctgtgagtgattcactgccttgtcattattacgatagatgtgtttgtattgttttttttctgatgatactgatgttgatgaatttttaattttatttgatgtggtagagttgggaggtttcagggttttttcccctcttttactttccattgaggaagggaatgagctcctttctcctctccttcagccaatcattatcaaatgttccttcagccctgcagttgccccaaataaccttttttcagcatcctctgtcctcagtcatgccagtctggacatgctctgttgtgccctgtgacaaaactgctcagtattcctattgcttttactgtgttttaggtactgtgaagggatcaaaaaaccaaacagaagcaagggagtatcagactatgatgatgctggagtggacttctgttcagggaacattttgcattcaggctgtttcttctatcactggggtttcccatgttgcagcacttctgggtcgttgcaattttgcatctaggagttagtttgatcgagttattctcttttttcaagtcacttttgttataggtctccccctaggcctgtctctcccttagcccaaaagatctgaactggaagcagaggttgagattctgcctcccaggagagggatttacctgccccctagtaccagataggtttagggcagtgatctctacagcaatcagttcagtgtcctggttgtccctgctcccatttacagatgtttgggcagcattgatagaagtatggaggggttcaagacagagcccacctgatcaagatcatcagctaccttcaaattattgacctggacagggtccaagtctgatagtaaccttttacaagaaagaacagggatgggaatggaaagagatagccttgatccacagtattgtacctgcattttctaccaccctaaaattgtgtgagacttctcccattgttaacagattgcatggacaatcttccctggcttctttctttccctctctctttcttctttctcctgccatcctagcacaggaggatttttggtattgatatagttaaagctgttctggcactcaaagaaggccgtgtttccaacatcctctcatcccaggacatttggggcaagtgagttaggggcccaggggcaattttccctctgaataacgtgtctgaggcagggatgctaccctcaggctcgcttttggccagctttttgcttgggaaaatctaacttctttcacaaggaggcaggcttcctatggatgttggagtacctgtttttcctccacacatagcccttttcatggatagaccttgaacaacaaaaagggtataagggaataaggatgaactctgctgtgaagagcaagccactgtagtgaggaatgtggagactgggagtctgtcctaaaccccatgggagaagacttcatcatgacaggacttcagcttaccaagcagcagccatagctgtgtggaggcttcagcatagctagcatgtttactgctctatgcctcctgatccagaccaggcattgcccagcctgggaatcttttctttgtgggaatcaaattacaagctatttaagtttatattccatcacaaccaagtcagacttgtattataagtcaaggatgagcctgatctggggagagggccggggctcgggactggccaccactgttcagcacatgacctaactacgtaagcctctttggcaagggtcctggtgcccagcacccaggctaaaatatcctgtctggcagagtgttttggtagctatgcaggcctcccttcagtgtacctctttttccaacttctcactcctccttactaggcttggccttgacatgcttcttcgagggttggcagcacaccgggaggggatgcttggacaagtttctgggcctacatttcttgactaggccctctcatttcctccctccttggggcttctgcccagggctccaggatcagggatattacttctcaacccgcacttctcctctactgaacccactggcatcacctgatgccactaatttgtgaacaacaagaaatcatttccccattggttggagtattccctcagcctatagcatcaaagcagaccagtggccaacagccccaaggggagcccaattaaatacctgggttcagtatcctaacctgttatgtcctgacagcaatggtaaccccagtaattctgtaatgttgtaatttccgcatggccctgagctcccttttcctcaactcagtgaggccaggatttgctctccaaaaggctttgctagtgtgttcaatgggacctgctgtggggagtcctaagacagacatctaattattctctctttttccccccctctctatgtgtatatttctaatggatctataagaacagcaacaagagagttctaacaattctagtgtgaagccaaatagtgatcttttagtgctttggggatggggtgggctggggtggatggatgggcaacagtgactttgattacccttgctgctctgcatttgccagtttattcttttgtttcttttatctgactgactctgtcaaacaagtgtcaaagttgtgtgttaaaaaatgtttaacaaaaaaaaatgttgtaatgacacaaagccttatgaaaatatttatggagttcaataaaagaagtaaaaagac

SEQ ID NO: 22302 - DNA, 6201 bp, Homo Sapiens
gctttgagtccggtggcccaatcgctgttactacttctctgaagctcctctcggctgcttgccgagacaccctgccgccaagatgcctcgaattatgatcaaggggggcgtatggaggaataccgaggatgaaattctgaaagcagcggtaatgaaatatgggaaaaatcagtggtctaggattgcctcattgctgcatagaaaatcagcaaagcagtgcaaagccagatggtatgaatggctggatccaagcattaagaagacagaatggtccagagaagaagaggaaaaactcttgcacttggccaagttgatgccaactcagtggaggaccattgctccaatcattggaagaacagcagcccagtgcttagaacactatgaatttcttctggataaagctgcccaaagagacaatgaagaggaaacaacagatgatccacgaaaacttaaacctggagaaatagatccaaatccagaaacaaaaccagcgcggcctgatccaattgatatggatgaggatgaacttgagatgctttctgaagccagagcccgcttggctaatactcagggaaagaaggccaagaggaaagcaagagagaaacaattggaagaagcaagacgtcttgctgccctccaaaaaagaagagaacttcgagcagctggcatagaaattcagaagaaaagaaaaaggaagagaggagttgattataatgccgaaatcccatttgaaaaaaagcctgcccttggtttttatgatacttctgaggaaaactaccaagctcttgacgcagatttcaggaaattaagacaacaggatcttgatggggagctaagatctgaaaaagaaggaagagatagaaaaaaagacaaacagcatttgaaaaggaaaaaagaatctgatttaccatcagctattcttcaaactagtggtgtttctgaatttactaaaaagagaagcaaactagtacttcctgcccctcagatttcagatgcagaactccaggaagttgtaaaagtaggccaagcgagtgaaattgcacgtcaaactgccgaggaatctggcataacaaattctgcttccagtacacttttgtctgagtacaatgtcaccaacaacagcgttgctcttagaacaccacgaacaccagcttcccaggacagaattctgcaggaagcccagaacctcatggccctcaccaatgtggacaccccattgaaaggtggacttaataccccattgcatgagagtgacttctcaggtgtaactccacagcgacaagttgtacagactccaaacacagttctctctactccattcaggactccttctaatggagctgaagggctgactccccggagtggaacaactcccaaaccagttattaactctactccgggtagaactcctcttcgagacaagttaaacattaatcccgaggatggaatggcagactatagtgatccctcttacgtgaagcagatggaaagagaatcccgagaacatctccgtttagggttgttgggccttcctgcccctaagaatgattttgaaattgttctaccagaaaatgccgagaaggagctggaagaacgtgaaatagatgatacttacattgaagatgctgctgatgtggatgctcgaaagcaggccatacgagatgcagagcgtgtaaaggaaatgaaacgaatgcataaagctgtccagaaagatctgccaagaccatcagaagtaaatgaaactattctaagacccttaaatgtagaaccgcctttaacagatttacagaaaagtgaagaactaatcaaaaaagaaatgatcacaatgcttcattatgaccttctacatcacccttatgaaccatctggaaataaaaaaggcaaaactgtagggtttggtaccaataattcagagcacattacctatctggaacataatccttatgaaaagttctccaaagaagagctgaaaaaggcccaggatgttttggtgcaggagatggaagtggttaaacaaggaatgagccatggagagctctcaagtgaagcttataaccaggtgtgggaagaatgctacagtcaagttttatatcttcctgggcagagccgctacacacgggccaatctggctagtaaaaaggacagaattgaatcacttgaaaagaggctcgagataaacaggggtcacatgacgacagaagccaagagggctgcaaagatggaaaagaagatgaaaattttgctagggggttaccagtctcgtgctatggggctcatgaaacagttgaatgacttatgggaccaaattgaacaggctcacttggagttacgcacttttgaagaactcaagaaacatgaagattctgctattccccggaggctagagtgtctaaaagaagacgttcagcgacaacaagaaagagaaaaggaacttcaacatagatatgctgatttgctgctggagaaagagactttaaagtcaaaattctgaagtacagtttatattctgtcacaggattaattaattgccggttttcatactctagaaggctgaaactgatgtttatcttcattgacaaatttacccaccatctgtggtttttcagttgtttattttaaatgatatcgatcttacacattctgtgtataaagaccttaactccacaggacggacattttagagtttaaattattaaggctatcattcttttagtaatgtcatatttgcaaacttttttagttttggcctttaatttaaaaagcctaattttaaagtgctgcctgtgagtaactcttgaataaaaacaaaatataaaaaattgagaatgtagccttttgtttgaagtaattagatacttaagagtgcctgcaaaccagcagctatgtactctgtgtcatatttaatgagtaactcttgggtaatcaaaatggtgatgcagtatcttaaacacttaagaggcagttctttgtggctttgttagtttcagcaaagagtggtcatttctgtatacactgacaagttagattaactttttagtacctcaaattttttttttgttaatatcactttaaagaaggtctcttgtctgccagctacttaaataatttatgggtcagggcttaaaagatttaacttccttgccccattattttcttataagtattttttgacaaaggcattttaaaagttaatttcaagaaggccatcaaacttaaagctctatgtttagcctaagaagtcagttacatcagtgtagaatttggggaatggatagaggtggagatatttaattttatataattcatataaattgatttagttacagtatcagttggctacaagctcattatagactagcaatgttttgacatcaccaaaaacgtttgcccagtcttagaatactagggactataggaagggaagggattcattcattcattcgatattgaatgtataccctgtgccagagtcttagagagagaacaacaaacaaaataggcctagttcttgtttagtagagcttatagtcttttgagaatgacagacaattaaaatccaaatgtttatttggtgattcttatgtgtcagacacttaagtgttgggagataagcagttattaagacagagttcttgctctcatggaggtgacattagtggggaggagatactaagtatgtccagggaaagtatcagaccatgagttttagattctgtggaggaaattaaagtagggtgattatgagatagtgaatgagtggctattttagactggacgatcaaagagacctcttggaaggcagctatgctcaccactataccactgcactgtgccgcaccgtaccactataagctgcacggccaaagagacctcttaaagaagtaacatttaagataacatgtgattgacattttagaatgggctatccttgtgagattcaaggaaagaacatcctaggtggagtgaatagcaaacataaagcctcttttgtatgtttgaggaacaaaaaggacaatgcagctagagtgtcaagaatggcatttctgtatataagacctcgttgtatagagccacataaataaggctataataaggaatttggatcttactttaaatatgataagaatcgatgagaagatctaagcaaaggaatgacatgatcagatttggttttagaaacatcactatctccttagtgtgtaaaatctcaccaggctggagatagggaagccagtccaattaggagcctgatgcagtgatccagacaaaaaaataatagtgattctaactagagtccaggtaatagtagtggagatatgtggagagacatgataggtatatacttaatagtcttatcagacgataaattgatattttcctggtgtgtagtcacttaattcaaatacttttttcagtaagttctgggttttctaggaaaaacttcagtatcatcagtgaataatgatagtgtttcttctgatagttttatttcacttttattgcatgttttgttatctgaaatgtttaggacaatgttaacaataatgatgttagacatttttttttcttattttaatgggaatgtccatagttttaagtttgctgttgggagttagatagtctttatctgaaagacagtgtctctcttttagtttttaaagagtttgaattagaaatggctctggaactttaaacagtataccatttgggcatctattaaagcattcatataattgttctcatttgatgttttgatgaggtatattaatagattttcccacattaaatcatctttgcactcctggaatcaggtagattaatttttaaaagaaattttaaaggatttatagtttatttgcactttttgtagacttgaattatatggatttaaaagttgatctaatattaataaaggctcactttgttttcaaaatttgaagtaattcacatacttatagcctaaaatcggcaggaattacaaaatttcaaaactggcacattgtaaactgcatatgcatttgccaggtagtggtgccacttgaaatggtgaacagacacactgttatcctttgtcagtatcctgtaaagcccaggattctttaccagcaccatacagcgattttggtgactattttaacattcacactgaggccaggggtggtgagtcatgcctgtaatcctagcactttgggaggccaaggtgggaggatcatttgagctcaggagttcaagattagcctgggtaacatagtgagaccctgtctctattaaaaaataataataaaaataacattcacattggtattgttcactaaggtattggttgttaaggcattcattaaggtattgttaaaacttgtgttaagcatgttaaagtctcagtaactttgggatagaaataaaatgtgataaaaagctgaaagaaaccaccacaagggagagtcctttttgaaatattagagacataatgctgtctaataaaaaacgacatcaaagaaaaactacactacagtgactgcagacttaatgttggccaaccatgcatcctccctagaaatgcatttgaatttgatttactaatcttttatttaggaaatttacatttttacattagtgagattggtcttttgggctattgtactttttttttttttttttttgagatggagtcttgctctctcacccaggctggagtgcagtagtgcaatcttggcccactgcaacctctgcctcctgggctcgagtgattctctgcctcagccttccaagtagctgggactacaggcatgtgccaccgcactggctaatttttgtgtttttagtagagatggggttttgctatgttggccaggctggtcttgaattcctgacctcaggtgatccacctacctcggcctcccaaagtgctagaattacaggtgtgagccaccatgcccagcctggttattgtattttgatattgggattttgctagctctctaaagtaaataggataactgtatatctttttctgtgcattaagcagttataacatgggaatgatttgttcatgaaaggttgaaagtctgtacttacagaacttttgagttcacagtgctttctggagataatttctttataactgtcagtttcttttgtgactattatgttacctatttttaaatttaagcaactttaaattaaaaaaattgtttttaaaat

SEQ ID NO: 22303 - DNA, 4661 bp, Homo Sapiens
gctggacttgcctgcggtgacacctgctcccctctgagagcttcaggttctccggcctgccttcactggtttgtgtccagagccggactgattctctcaatttgcgatcttcagcctgttaaacaagaaaacgaaaaaccccttccagaaaacatggatgcatttgaaaaagtgagaacaaaattagaaacacagccacaagaagaatatgaaatcatcaatgtggaagttaaacatggtggttttgtttattaccaagaaggttgttgcttggttcgttccaaagatgaagaagcagacaatgataattatgaagttttattcaatttggaggaacttaagttagaccagcccttcattgattgtatcagagttgctccagatgaaaaatatgtggctgccaagataagaactgaagattctgaagcatctacctgtgtaattataaagctcagcgatcagcccgtaatggaagcttctttcccgaatgtgtccagttttgaatgggtaaaggacgaggaagatgaagatgttttattctacaccttccagaggaaccttcgctgtcatgacgtatatcgagccacttttggtgataacaaacgtaatgaacgcttttacacagaaaaagacccaagctactttgttttcctttatcttacaaaagacagtcgtttcctcaccataaatattatgaacaagactacttctgaagtgtggttgatagatggcctgagcccttgggacccaccagtacttatccagaagcgaatacatggggtcctttactatgttgaacacagagatgatgaattatacattctcactaatgttggagaacctacagaatttaagctaatgagaacagcggctgatacccctgcaattatgaattgggatttattttttacaatgaagagaaatacaaaagtgatagacttggacatgtttaaggatcactgtgttctatttctgaagcacagcaatctcctttatgttaatgtgattggtctggctgatgattcagttcggtctctaaagctccctccttgggcctgtggattcataatggatacaaattctgacccaaagaactgcccctttcaactttgctctccaatacgtcccccaaaatattacacatacaagtttgcagaaggcaaactgtttgaggaaactgggcatgaagacccaatcacaaagactagtcgcgttttacgtctagaagccaaaagcaaggatggaaaattagtgccaatgactgttttccacaaaactgactctgaggacttgcagaagaaacctctcttggtacatgtatatggagcttatggaatggatttgaaaatgaatttcaggcctgagaggcgggtcctggtggatgatggatggatattagcatactgccatgttcgaggtggtggtgagttaggcctccagtggcacgctgatggccgcctaactaaaaaactcaatggccttgctgatttagaggcttgcattaagacgcttcatggccaaggcttttctcagccaagtctaacaaccctgactgctttcagtgctggaggggtgcttgcaggagcattgtgtaattctaatccagagctggtgagagcggtgactttggaggcacctttcttggatgttctcaacaccatgatggacactacacttcctctgacattagaagaattagaagaatgggggaatccttcatctgatgaaaaacacaagaactacataaaacgttactgtccctatcaaaatattaaacctcagcattatccttcaattcacataacggcatatgaaaacgatgaacgggtacctctgaaaggaattgtaagttatactgagaaactcaaggaagccatcgcggagcatgctaaggacacaggtgaaggctatcagacccctaatattattctagatattcagcctggaggcaatcatgtaattgaggattctcacaaaaagattacagcccaaattaaattcctgtacgaggaacttggacttgacagcaccagtgttttcgaggatcttaagaaatacctgaaattctgaaacactgcattcaactgggaattggaaacacactgaaatatttcatagtcttacttccaattgagttagcaaaaaaaaaattaataacttgagacttttaagttattaattttttaaaatgtgcttctccatctaaattttgcttagtctacatctcacttgcttatactattcctccattgatgcacatgcccattaacctaggaaagtagttttcaaatcatgctccttagaaggatgtggagtagagggaagggaaggattggtgatagcagagctccaggcctcccttccagtcagaacagttgagcagtttacaaattagtgtcctgcctctttgctagcaaatgcttttagacactgtggcagtgagtcatcctctaatttctatgactgcattttaagggaaaagataaaattcttccccttaaaattcgttaaagtttttgaataatctggggtcctaatgtgttctggtcatccctgattgatgctatctgaataaagttataagctcctataagccataatttacttttaaacattttatttttttcaaaacatttgagaacctttcttaaagcggttacattcaagctacagaaatatcgaagaattaatgattgttcaccaagcagcatgctgtacatgaagctattacaaatgcttacaatcccactgaaatgccagtgtcttcatctcttcataaaggtgcctaacacgaggtatacagtatgttcagtacactggaatagcatgctcgattggaaacaaagcatctatctctgaaagctgtttggcgatgaaggagattcttcgtgttgtgttcaaagatgagtccctctcccttgtccagaaaaatgccacttgtatcaactttactgcctttgtcggcagaattggtacttaaccttattcttattttagcgggaaggcccgaaatcatattatgtagatttaacagtgttgattctccaaaattcagaaccacgataaagattctgtcgatgccatccagctctcttgtgtacacaacatagtggctgtcattcctcaaatggcaaaaccagcccctgttgaggagtagctcattggcatgaagtagacttaaatcttgatataacttcaaagccgatctgggctgagtcttttggacctatttttttaaaaaagtatttacgtaagtgtttgattctaagaattgtttgtaagtatttttaatatattgtaaggagttatttacccaaaacacttgctccaattttgccccttataattgccaaattgtaagcatcaataagtaggtaagaacaatttatataaaaactgatagaaatgacaaattcggggtttcggcttgtccgggagtcaataagtacgcacagtgctctgctacattgtagagtttctgtagagatcaaatttgactccactttaggagtcccaaagcaaatgtccatgtctaagatgaatatttaacttgcatagtcattctgtgctatattgtaactgccagatggccagaaagaaggcaacagtggactcagacttctgaggaatttgggtttgttcccctttgtagactaatgtgtaggttgctgttgtgcgaagatcgtgtaactttagcagacatgtatttcttgcacagctaatagaagacaaagttgaaaaaaaggatgcaaaataaaaagctgcctaaggtgaaagttagaaattgtagacttttttttaccataatagtatgtgttcattgaagatgatttgggtttattttacagctatataaaacataatttgatgatgtacttctaacctttcaagcattttctgttattgactatataatatagcctccataaatgtttttaatgacaatattctgttgaacggttgtaccatactcagccatgccctttcattttgacgatagtgtttctaatattttgtatttttattcccctccccccatttttgtattacttaagatagattatcagaaagacagttactttgtcaaagagtatgggcacttgatacataatgccaaattattcttcataagagctgttgccaaatcagtgataatgttcatttaattgtattcttgccagccatgtttactggggtgatagttgttattgtggttgttattgttctttaggggtaggttcccaatatgtggtctttaaataattatctaatggtgtttaaaaagatgtttattctgtttgtcaggtacaaagatatttatgatacatgtatgacttgtctaagttattaacattttctctagccttaggtaatgcatgaaagcacatgtttcagtgccactcacataagaagtgcccggtaagtgttagctattattgtctacttgagttactactttctaaaagtatgttgaagtctttttctgtaattgcagatttgttgattttgcatttgagtattttctatattttgaagctgttagatgcatagtcatgatttttggtggaatgttttatcaatttttgaaaattgcctttgtctcatataatgcttttcatattgaactatattttgtctgctattaaatacttccaagcctg

SEQ ID NO: 22304 - DNA, 6197 bp, Homo Sapiens
ggttaagtggagctagagagctacattgtaacctagttggatttttttggggggggaatgtatcagaatctaacgtgtcgttaatagaaagaagaacaggcaagaagtggtccagccggcgaagttgcagatctgatctcttctgaacacctcatcgtgtctccatccctgggaatctgaccctagcaactggaccactttgttcttggaattttgggtgtcctcttttctcacctttcccttttcccttttccccttccccctcctgagaactccggaagactgtagagattgtcatggagtccagggaaaccttaagcagctcccggcaaagagggggcgagtcagacttcctgccggtctcctcagccaagcccccagctgctcctggctgtgcaggagaacctttgctctccactccaggacctgggaaggggatcccggtgggcggagagcgcatggagccagaggaggaggatgaactaggctcagggcgggatgtggattccaactccaacgcggacagtgagaaatgggtggcaggagatggtttggaagagcaggaattttctatcaaggaggcaaacttcacagagggaagtctgaagctaaagattcagaccacaaagcgggctaagaaacccccaaagaatttggagaactatatatgtccacctgagatcaagatcaccatcaagcagtctggggaccagaaggtgtcccgtgctggaaaaaatagcaaagccacgaaggaggaagaaagaagccactccaaaaagaagctcctcacagccagtgaccttgcagccagtgacctcaaaggatttcagccacaggcttacgagaggccccagaaacattcaactctccattatgacacgggcctcccacaggacttcaccggtgacaccttaaaaccaaagcaccagcaaaaaagcagcagccagaaccacatggactggtccaccaactctgacagcggacccgtcactcagaattgcttcatcagtccagagtctggcagagaaactgcaagcaccagcaagatccccgctcttgagcccgtggcttcctttgcaaaggcccagggtaagaaaggcagtgcagggaacacgtggagtcagttgtctaacaataacaaagatctgctcttgggaggtgtggctccatccccaagcagccacagctcaccagccccacccagcagctctgctgagtgcaacgggcttcagcccttggtggatcaagatggaggaggtacaaaggagcccccagaaccacctacggtgggcagcaagaaaaagtccagtaaaaaagatgtgataagtcagaccataccaaacccagacctggattgggtcaagaatgcccagaaagcatttgacaatacagaagggaaaagggaaggttattccgcagatagtgcccaagaggcatcaccagccaggcagaacgtgagttctgccagtaatcctgaaaatgactcaagtcatgtccggattactatccccatcaaggcaccctctctggatccaaccaaccataagaggaaaaaaagacagtccattaaagcggtggtggaaaagatcatgccagagaaagccttggcttctggaatcaccatgagcagtgaagtagttaacaggatactttccaactctgaggggaataagaaggatccccgtgtccctaagttgagtaaaatgatagagaatgagtccccctcagttggccttgaaactggtggaaatgctgagaaagttatcccaggaggtgtgtctaagccgcggaagccacccatggtcatgacacctccaacgtgcacagatcactctccatccagaaagctgccagaaatccagcatccaaaatttgctgcaaaacgaaggtggacttgcagcaaaccaaaacctagcaccatgcttcgagaggcagttatggccacctctgataaactgatgctggagcccccgtctgcatatcccatcaccccatccagccctctctacaccaacacagacagtcttactgtgatcactccagtcaaaaagaagcggggacgaccaaagaagcagcctttgctcacagtcgagacgattcatgagggaacttccaccagccccgtcagtcccatcagccgagagtttcctggcactaagaaaagaaagcgacgacgcaatttagcgaagttggcccagctagtgccgggagaggacaaacccatgagcgagatgaaatttcacaagaaagttggaaagctcggcgtgttggataagaagaccatcaaaactatcaataagatgaagacactcaagaggaaaaacatcttgaatcagatcttgtcctgttccagcagcgttgctctgaaggcaaaagctcccccagagaccagccctggggcagcagccattgaaagcaaactgggcaagcagattaatgtcagcaagaggggaaccatctacattggcaagaagcggggcaggaagccaagagcagagctgccacccccatccgaagaacccaaaacagccatcaagcaccccaggcctgtttctagccagccggatgttccagccgtgccttccaactttcagtcacttgtggcgtcttcaccagcagctatgcacccactttcaacacagttaggtgggtccaatggcaacctgagccctgccagcactgaaaccaatttttcagagttgaaaactatgccaaatctccagcccatcagtgctcttccaaccaaaacccaaaagggaatacacagtggaacctggaagctgtctccacccagactgatggccaactccccttcacacctgtgcgagattggctccctaaaggaaatcacgctgtcccctgtgagcgagtcccacagtgaggagacgatccccagcgacagcggcattgggacagacaacaacagcacttctgaccaagcggagaagagctcagaatcccgaaggaggtactcttttgatttctgctccctggacaacccggaggccattccgtccgacaccagcacaaagaaccggcatggccaccggcaaaagcatctcattgtggacaactttctggcccacgaaagcctcaagaagccaaagcacaagaggaaacggaaaagcctgcaaaaccgcgatgacctccagtttctggcagacctggaggagctaatcaccaagttccaagtgttcagaatctcccaccggagttacaccttctaccacgagaatccatatcccagcatttttcggattaattttgatcactattacccggtgccatatatccagtatgacccgttgctctatcttcgtaggacttcagacttgaagtcaaagaagaagcgtggtaggcctgcaaaaaccaatgacaccatgacaaaggtgccttttttacaagggttcagctaccctattcccagtggaagttactatgcaccctatggaatgccttacacatcaatgcctatgatgaaccttggttattacggtcagtacccagctcctttgtacctatcgcacacgcttggagcagcttccccattcatgaggccaacagtgccaccacctcagttccacacaaactcccacataaagatgtccggtgcagctaagcataaagccaagcatggagtacacctgcagggacctgttagcatgggccttggtgacatgcagccttctctgaaccctcccaaggtaggcagtgccagtctgtccagtggtcggctccataagaggaaacacaaacacaagcataagcacaaggaagaccggatcctagggacccatgacaacctgagtggtctttttgcaggcaaagccacaggcttctccagccacatcctgagcgagcggctgagtagcgcagacaaagagctcccgctggtgagtgagaagaacaagcataaggagaaacagaagcaccagcacagcgaagccggccacaaagcttctaagaacaactttgaggtggacaccctgtctacactgtcactttccgacgcccagcattggacacaggccaaggaaaaaggagacttgagcagtgagcctgtggactcatgcacgaaaagatactctggcagtggcggggatggtggcagcacgagatcggagaacctggacgtgttcagtgaaatgaacccttcgaatgacaagtgggacagtgacgtgagtgggagtaaaaggaggagctatgaaggctttggaacgtacagggaaaaggacatccaagccttcaagatgaaccgcaaggagagaagttcttatgactcctccatgtctccagggatgccaagtccccacttaaaagtggaccagacagcagtgcatagtaagaacgaaggctcagtgcccaccatgatgaccaggaagaagccagccgcagttgacagtgttacaattccaccagccccagtgttatctctccttgctgcatctgcagcaacgtcggatgcagtcggctcctccctgaagaagaggttcaagcggcgggagatcgaagccatccagtgcgaagtgcggaagatgtgcaactacaccaagatcctgtccaccaagaagaacctggaccacgtgaacaagatcctgaaggccaagcggctgcagagacaatcaaaaacaggcaacaacttcgtgaagaagaggcgcgggcgtcccaggaagcagcccacccagttcgatgaggactccagagaccaaatgccggtgctggaaaaatgcatcgacctgcccagcaaaagaggccagaagcccagcctgagcccgctggtgctggagcccgccgccagccaagacaccatcatggccaccatcgaggcggtcatccacatggcccgggaggcgccgcccctgcccccgccaccgccgccgcccctgccgccaccgccgccaccacccctgcccccgccaccccctctacccaagaccccccgaggcggaaagaggaaacacaaaccgcaggcccccgctcagcccccacagcagtcgcccccgcagcagccccttccccaggaagaggaggtgaaagccaaaaggcagaggaagtcccgagggagtgagagcgaggtccttccctagggcgggtctgggcgtctgcacctggggcctagggaactgacacgtgggaagcgcagtgagccggggcgggggcggaatcccccgctgcagggacacccacgcccttctctccagaagccgggcaggcagaatccggccagacgacggggctgagccatcaggagctcttgggaaagcaaagcagggagacaccttcagaagaagcttgtctgagcttcaccgcagctcccaccacgcggcgcttcagtacggctggatcctccgcaggcgagcggaaggcccccaggaggagcaggctggtggcactctcctgacctcacgctgccaaggtgcgccctcgactcccgatttcatttgctggccaggaaaatcgaaagggaaacaccctcaattaggaaacattccaaggggagaaaagctgcaaattgctcaactggcattgctgtaacccgttccatttaattggtttttatttcttttgattttcaagctctgctaagctttggggtaccaacgtcatcttcaggtgacctgaatctttcccttaaccgtacagtttctcgatggaattgtgtgatcagaaggtggaattctagtgataggcgacctcagacccgcattcatgttctgtgtgcctcttctattgcacatacactgatttttagcattgtctattcctatttttcctttgcccattgtacttccatatatcttttcattaacttacttgctgccttttttttttcttggtacacatttaaataaagtaatccttaacctgtgctgtaaagttcacccttggcatgctgttccaagaacctgggtttgaatcccaatcgttgtgaaacatactcagtattgataaaacctttttaataagtgatgcagagcagccaaggatatgttgacccagatgtcaaccaggctatttttatacttaaaacatgtcagcagagcataggcagaataaaatggtttaaataccccacagcaaatagagtaactgacaaaccaccaaaaactgaaaccccagacccaccagaaagacaagtgtctagcaatgccttggtacctgatctttttcattcaaataattgtcataggttgttc

SEQ ID NO: 22305 - DNA, 5495 bp, Homo Sapiens
cggcgctgctcccaggcatctccgaccctcggtgctgtggggagccccacacttgggctcctcgcctctcgccctcgctccccgtccctcctcccctctctccgccccttcccccttttctttctcctctctttcttcccctctctcccttctttcggccgccgtctcccccgcgccctcctcggggcggagggaagccgtgaagggggagggagggctcggtgtcaatttttttttgtgtggctgcggccgtagcctgtggcgggcaagcggggagaccccggcgcagcagaaccatggatggcccgacgcggggccatggactccgcaaaaagcggcggtcgcggtcgcagcgagaccgggagaggcgctcccggggcgggctgggggccggcgcggccggcggcggcggggctggccggacccgggcgctctcactcgcctcgtcgtcgggctccgacaaggaagacaatgggaagcccccgtcctccgccccgtcccggcccagacccccgcggaggaagcggagagagtccacctcggcagaagaggacatcattgatggatttgccatgaccagctttgtcacttttgaagcgctggagaaagatgtagcacttaagcctcaggaacgtgtggagaaacgccagacgcccctgaccaagaagaaacgagaagcacttaccaatggcttgtcctttcattcaaagaagagcagactcagccacccacaccactacagctcagatcgagaaaatgaccgcaatctctgccagcaccttgggaagagaaagaaaatgccgaaggcactcagacagctcaagtcaggacagaacagctgcagggacagtgacagtgaaagtgccagtggagaatccaagggcttccaccggagcagctctcgggaaaggctcagtgatagttcagctccttccagcttgggaacaggctacttctgtgacagtgacagtgaccaggaagagaaggcatcagatgccagctctgaaaaactcttcaacactgttattgtaaacaaagatccggagttaggtgttggcacgctaccagaacatgacagccaggatgcagggccgattgtccccaagatatcgggtctagagagaagccaggagaagagccaggactgttgcaaagagccaatctttgagcctgtggtgcttaaagacccctgccctcaggtcgcacagccaataccccagccgcagacggagccccaactccgagctccttctccggaccctgacttggtgcagcgcacagaggccccacctcaacccccacctctgagtacacagccaccacagggccctcctgaggcccagctccagcctgccccgcagcctcaggtgcagaggccacccaggccacagtcccccacccagctgctccatcagaacctcccacctgtgcaggcccacccctctgctcagagcctctcccagccattgtcagcctacaacagcagtagcttaagcctcaacagtttaagcagcagcagaagcagcactccagcgaagactcagcccgccccacctcacatctcccaccacccctctgcctccccgttccccctctccctgcccaaccacagccccctgcacagcttcacacccaccctccagccccccgcacactcacatcaccccaatatgtttgcccctcccactgctctgcctcctccaccaccactgacatcaggaagtctgcaggtggccggacacccggccgggagcacttactcagagcaagacatcttgcgacaggaactgaacactcgttttttggcctctcagagtgctgaccgcggggcttccctgggccctccgccctacctgcggaccgagttccatcagcaccagcaccagcaccagcacacccaccagcacacgcaccagcacaccttcacgccgttcccccacgccatcccacccaccgccatcatgccgacgccagcacctcccatgtttgacaaataccctacaaaagttgacccattctaccggcacagtctcttccattcctatcctcctgcagtgtcgggcatcccccctatgatcccacccactggcccttttggttcactacaaggagcatttcagccgaagttgacagatcctttcagacctatgttaaggaaaccagggaagtggtgtgctatgcatgttcacatcgcctggcagatttaccaccaccaacagaaagtcaagaaacagatgcagtcagacccacataagctggactttggactgaaacctgagttcctgagccgccctccaggccccagtctttttggagccatccaccacccccatgacctggcacggccttcaactttgttctctgccgctggtgctgcacacccaactgggaccccttttgggccacctcctcatcacagcaacttcctcaaccctgctgcccacctagagccttttaatcggccgtctacattcacaggcctagcagcagttggtggcaatgccttcgggggacttggaaatccttccgttacacccaactcaatgttcggccacaaggatggccccagtgtgcagaactttagcaaccctcacgaaccctggaaccggctgcaccgaacgcctccgtcgttcccgacccctccgccctggctgaagccaggggagctggagcgcagcgcgtccgctgcagctcatgacagagatagagatgtagataaacgagactcatctgttagtaaagatgacaaagaaagggaaagcgtcgagaagagacactccagccacccttcaccagcacctgtcctcccggtgaatgccctgggacatacccgcagctccactgaacagatccgggctcatctgaacactgaggctcgggagaaggacaaacccaaagagagggagagagaccactcggaatcccgcaaggacctggccgccgacgagcacaaggcgaaagagggccacctgcccgagaaggacgggcacggccacgaggggcgcgccgcgggcgaagaggccaagcagctggcccgggtgccgtctccctacgtgcggaccccggtggtggagagtgccaggcccaacagcacctcgagccgggaggccgagccgcgcaagggtgagccggcctacgagaaccccaagaagagctccgaggtcaaggtgaaggaggagcggaaggaagaccatgacctgcctccagaggccccgcagacccaccgggcctcggagccgccgcctcccaactcctcgtccagcgtgcacccggggcccctggcctcgatgcccatgacggtgggggtgacgggcattcaccccatgaacagcatcagcagcctggacaggactcgcatgatgacccccttcatgggcatcagccccctcccgggcggagagcgcttcccgtacccttctttccactgggaccccatccgggaccccttgagggatccttaccgagaacttgacattcaccggagagacccgctgggcagggacttcctgctaaggaacgacccgctccaccggctctcgactccccggctgtacgaagccgaccgctccttcagggaccgggagcctcacgactacagccaccaccaccaccaccaccaccacccgctgtctgtggaccctcggcgggagcacgagcggggaggccacctggacgagcgggagcgcttgcacatgctcagagaagactacgagcacacgcggctccactccgtgcaccccgcctccctcgacggacacctcccccaccccagcctcatcaccccgggactccccagcatgcactatccccgcatcagccccaccgcgggcaaccagaacggactcctcaacaagacccctccgacagcagcgctgagcgcacctcccccgctcatctccacgctggggggccgcccggtctctcccagaaggacgactcctctgtccgcagagataagggagaggcccccttcccacacgctgaaggatatcgaggcccgataagccgagaacaggagcaagaacgaggaagaagaaaccctaggcagacaccaggccaggcttgagagacagaactcctgcatggctcacacagactgggggggaaagccccaccccttccccttgtaaaaaatgtatagactcagtgcacattttgaaatgttttgtatattatatgttgagatttttcagatcttttagcccagtcatatgttctcacgtctcctactttttgtttctcgtataaaactttttgatttgaaccaaaacagtgaagatgacaacacacaccaattggatgataattgtagcgggggcggtgggggggagaagtccacgccatccatcatgcaaaattctttcagatgaggtgggaaggccgtgtacatagttatgtaaaaagagattgcttcatgagctaatggttcatatatgcaaaagggtaagatgaaagctttactttgtacaaatgtaaatagataaagtaacataatacattaatacttcttaaaatgtgctatttgcaaacttacttaatatcagtgaacacagtcggctaaagctgtgttcccatatattgttatagacagctaaacccttcaactatgcaatgaatgttcgggcttttcacaaaagcccgcctaactcaaaggagccttttcaaatccatttacagcatacttaaggtcatattttccctgaacaagcgcttacgtgatatgactctgttttccttgcttgttttttttcaaacggagaaacatcctgttttgcaaattggaccccaggctggaacttagcatctgaagttgccgcttgtgggctctgggggaaagtgtagccccggagaggtaactgaggacatgagcaaccagtgccagggagggtgggatttgccagatgccaaaatcaggggacgggtggtggtgtctgtcagacacacacaggtcgccagtgacttcacacacacctcatgtgagaaccatgccttttttagtgtgtcctatttcatacctgtacacacttcctcgttttgtaatgagatttacttacacccaaacagatcctgaaagaaagcttcaagttttctcagatgatggatatgttttcactgtattcaataactgacggatgtaaggtgcacgtttcctgatgtgacgcactgtattccagctggtgatcaagtctgggaacagccgtaacaggtcaaccttgtggagccatcgcgagttagagggtgaaagatggcagaaaaaaaagtcttgtgtgtgagtgtgttttttgagtttgcatcaatcttaatgtctcttcataatacttttataatacattaagcctcttgtctacatatttggagagaatatgactttactagcagagaaatacaatatatcttgtctactggactgtaaaatatatgtatgaaataaaattagttccatttggtcttctagtatattaaagtgctatctgacgttgttatcctgtttttgc

SEQ ID NO: 22306 - DNA, 6305 bp, Homo Sapiens
cggacgcgtgggttggattttttccgtggatctatcaattcacaattcgaatttggaagaaagaaggaaaacatgacgtctccagccaaattcaaaaaggataaggagatcatagcagagtacgatactcaggtcaaagagatccgtgctcagctcacagagcagatgaaatgcctggaccagcagtgtgagcttcgggtgcaactgttgcaggacctccaggacttcttccgaaagaaggcagagattgagatggactactcccgcaacctggagaagctggcagaacgcttcctggccaagacacgcagcaccaaggaccagcaattcaagaaggatcagaatgttctctctccagtcaactgctggaatctcctcttaaaccaggtgaagcgggaaagcagggaccataccaccctgagtgacatctacctgaataatatcattcctcgatttgtacaagtcagcgaggactcaggaagactctttaaaaagagtaaagaagtcggccagcagctccaagatgatttgatgaaggtcctgaacgagctctactcggtgatgaagacatatcacatgtacaatgccgacagcatcagtgctcagagcaaactaaaggaggcggagaagcaggaggagaagcaaattggtaaatcggtaaagcaggaggaccggcagaccccacgctcccctgactccacggccaacgttcgcattgaggagaaacatgtccggaggagctcagtgaagaagattgagaagatgaaggagaagcgtcaagccaagtacacggagaataagctgaaggccatcaaagcccggaatgagtacttgctggctttggaggcaaccaatgcatctgtcttcaagtactacatccatgacctatctgaccttattgatcagtgttgtgacttaggctaccatgcaagtctgaaccgggctctacgcaccttcctctctgctgagttaaacctggaacagtcgaagcatgagggtctggatgccatcgagaatgcagtagaaaacctggatgccaccagtgacaagcagcgcctcatggagatgtacaacaacgtcttctgcccccctatgaagtttgagtttcagccccacatgggggatatggcttcccagctctgtgcccagcagcctgtccagagtgagctggtacagagatgccaacaactgcagtctcgcttatccactctaaagattgaaaacgaagaggtaaagaagacaatggaggccaccctgcaaaccatccaggacattgtgactgtcgaggactttgatgtgtctgactgcttccagtacagcaactccatggagtccgtcaagtccacggtctctgaaaccttcatgagcaagcccagcattgctaagaggagagccaaccagcaagagacagagcagttttatttcacaaaaatgaaagagtacctggagggcaggaacctcatcaccaagttacaagccaagcatgaccttctgcagaaaaccctgggagaaagtcagcggacagattgcagtctagccaggcgcagctcaactgtgaggaaacaggactccagccaggcaattcctctggtggtggaaagctgtatccggtttatcagcagacacggactacagcatgaaggaattttccgggtgtcaggatcccaggtggaagtgaatgacatcaaaaatgcctttgagagaggagaggaccccctggctggggaccagaacgaccatgacatggattccatagctggtgtcctgaagctttacttccgggggctggaacaccctctcttccccaaggacatctttcatgacctgatggcctgcgtcacaatggacaacctgcaggagagagctctgcacatccggaaagtcctcctagtcctgcccaaaaccactctgattatcatgagatacctctttgccttcctcaatcatttatcacagttcagtgaagagaacatgatggacccctacaacctcgccatctgcttcgggccctcgctaatgtcagtgccagagggccacgaccaggtgtcctgccaagcccacgtgaatgagctgatcaaaaccatcatcatccagcatgagaacatcttcccaagccccagggagctggagggccctgtctacagcagaggaggaagcatggaggattactgtgatagccctcatggagagactaccccggttgaagactcaacccaggatgtgaccgcagagcaccacacgagcgatgacgaatgtgagcccatcgaggccattgccaagtttgactacgtgggccggacagcccgagagctgtcctttaagaagggagcatccctgctgctttaccagcgggcttccgacgactggtgggaaggccggcacaatggcatcgacggactcatcccccatcagtacatcgtggtccaagacaccgaggacggtgtcgtggagaggtccagccccaagtctgagattgaggtcatttctgagccacctgaagaaaaggtgacagccagagcgggggccagctgtcccagtgggggtcatgtagccgatatttatcttgcaaacatcaacaagcaaaggaagcgtccagaatctgggagcatccggaaaacttttcggagtgacagccatgggctgagcagttccctgactgactcctcctccccaggggtgggggctagctgccgcccatcctcccagcccatcatgagccagagcctccccaaagaagggccagataagtgttccatcagtgggcacgggagcctcaactccatcagccgccactcatccctgaagaatcggctggatagtccacagatccggaagactgccacagcgggaaggtcaaaaagcttcaataaccatcggcccatggaccctgaggtcattgctcaggatattgaggcaacaatgaactcggccctgaatgagctacgggaactagaacggcagagcagtgtcaaacacacccctgacgtggttctggacaccttggagcccctcaaaacctccccagtggtggcccccacgtcagagccctccagccctctgcacacccagctcctcaaggaccccgagcccgccttccagcgcagcgccagtactgctggggacatcgcctgcgccttccggcctgtcaagtctgtcaagatggctgccccggtcaaaccaccagccacacggcccaagcccactgtcttccccaaaacaaatgccactagccctggtgtcaactcatcaacttccccacagtctactgacaagtcttgtactgtctgagggataataatttaattgttctagacaaggggactatagggactgactgttattaaaatcttcctatttaactagcttggggacttcagttgaaaattaggttctaagttgttcttgcaggaattagcctccccgtctcccaaaaccttgagaatgaagcccttggtatcgcctctcccttcccactgccctctgcttcccccagtcgtcgtaattcagccagctgcagtccgtaccgttcttaggttagccagagacaggttttcattatcaggtcactgtgaaatctggtaaggcagtcctgaggacatgggctcaagtctcagtcccctcagaccacggtgatgccttgaccagatggttggctactgccatccagctttcagtggcatcttgttttgggaactgattatagagaatcatatatagtccagtcttcattttacatacacacacatattttacacacacacacattttacacacacacacacacacacacacacacacatatgtttttctagtctctggcatgtgtagcctctcctggtcatagaccagtctctttgtaagttattgtggcagttcacacagtagccaccaggggtctctgtttccattacaaactttgttctgtctgggccagagaacctagcctttgaaatctctccatcatgtgaaacataacgggatgggacaatcccgtaacctgtttggggttgggggctttctctctgtgttctttccattgatgtgaattggtcattggtgtttgctcttgcctctcctccatcccctagaagtacacccccgtcttattaaggagcttttaaagtttttctgaatgtatagacatttctcgggttcctacctttgtctctgatggaccattttccatttaagacattttcctgtataagacagttttatagctggttccttttagggtaaagagtcttaagagagttttattgtgtctatggcaggtttgggaaaggtaagaaatgggtcctttttcctcctaatgtttttggcacttaaaacataaaattcattatcctattaaaaaattaaattcagctttgctaatccagaaattgttcccaaatgaaaacttgttttaagtccaccccttagtttccttattttacaaggtctctcttcagggaccaacaggggcttagagagccttagttagattaaagggagaccctacctcttaaaaccagttttcatttatgcaaacaaggacaattaagggaaccctgaccccacaggctctcaagtcttcccaaggccagaatcgaaagaaaattaaaatttgaatgctgaatattctggctctactctggccttttttctggttcccttccaaaatgcacaaatcatacccttgtctgctccaattcagtctccaaacctggtgcctgtgctcctggcccccctagcatcatgctatcccaggagtatcaggaccagacacatccacagccaggctcatgggtctcagacagcaacttgagttaaagctgaaactcatccttcttctctgtgttttctggtttaaaagctgcacttatattttagccttattattttctgtagttccggagagatggtgggttgccattctggtaggaaaatctgagttttcttatctttgacctagaagagattctttttggaccaacctgcgaaattggtagttaggtctatggaaagtggtaggatttttttttttttaatcctgtgcaaaggaaaagaggtgctttgtgggaaatcactaatgagaaggctaacctgcagcaccagagaaacctttccaagtgctaggcaggagaactgaagaactctttcagtgaagtgagtcagcctagaagaggcaacccacagtcttgatttttgttgctgtttcctgacctgttcttgcctgtcacctgggcctacacaggtcccgagccaacggggctttcatacccaaggatctgtttccttgctgaaaatgaaaccctatctttcactttacattcctttcaatccaactgatcaaaactggtacccacacttgccctttctccctctctccagcacactcccctctaagaaagtaaaagcaaagctttcttaatggcaacactttgggcctgttctgttgctcctgccttatttctctttcaaccctgtacatgactcgtgttcaccatccccttgatcagtgtccatccgcgctaatttgcatcatgaactgaacagtgtgtgagtggtcacctactaaacccagctctgggggcagagctgtcttccccatctctggtgctcctaacacctgtgagatggtcctgtcgagaggactaggaaccgataggaggagagtccttctcggcagagctcactgcaaacaactggaattgaggttgcacactgtgatttttacaccgaaaagccaaaaggagctggccatccagggcctagggagaccagccttcctcagctatgcttgccgaaaccagcatgatgcttcaaagagccctgctccacccctcatggcatggatccttttcctggtgtggactctgaagggtcagtcttcggggaagagaggtggggtggggctactagcatcccaatttagaaaatagaggagtttgtagccagcagcctgtaaactggaaacactggtctcagccaacctcctcagggcgccctggcttctccccaaggagatgaggagcggtgatgccagcaccgggatgcgcagagcactggaagggctggtgcagatctacttcccatgcagaagagaagtcacatcttccagggaatcgcaatgttgtggcgtctgacttgtatgtcacatttgtgtaaaatggtatattctttaaaatagtgttgataactggaatattgtatgtatgcttggagatgctttgtgtgaacctaagactgtcactcaacagatgttggattggggaaaatccaaagcacaacttcaaaataaaatacatttttaggtttcg

SEQ ID NO: 22307 - DNA, 6263 bp, Homo Sapiens
gtggatttggtcgtctccctgattccgagctgcgggcagggagaggggcctcgcgccgccctcagcagccggcggcggccgaggtagaccgagcggggacggaaggacagaccgacgtcgccgagctggaatcatgtgagggccaaccggggaaggtggagcagatgagcacacacaggagccgtctcctcaccgccgcccctctcagcatggaacagaggcggccctggccccgggccctggaggtggacagccgctctgtggtcctgctctcagtggtctgggtgctgctggcccccccagcagccggcatgcctcagttcagcaccttccactctgagaatcgtgactggaccttcaaccacttgaccgtccaccaagggacgggggccgtctatgtgggggccatcaaccgggtctataagctgacaggcaacctgaccatccaggtggctcataagacagggccagaagaggacaacaagtcttgttacccgcccctcatcgtgcagccctgcagcgaagtgctcaccctcaccaacaatgtcaacaagctgctcatcattgactactctgagaaccgcctgctggcctgtgggagcctctaccagggggtctgcaagctgctgcggctggatgacctcttcatcctggtggagccatcccacaagaaggagcactacctgtccagtgtcaacaagacgggcaccatgtacggggtgattgtgcgctctgagggtgaggatggcaagctcttcatcggcacggctgtggatgggaagcaggattacttcccgaccctgtccagccggaagctgccccgagaccctgagtcctcagccatgctcgactatgagctacacagcgattttgtctcctctctcatcaagatcccttcagacaccctggccctggtctcccactttgacatcttctacatctacggctttgctagtgggggctttgtctactttctcactgtccagcccgagacccctgagggtgtggccatcaactccgctggagacctcttctacacctcacgcatcgtgcggctctgcaaggatgaccccaagttccactcatacgtgtccctgcccttcggctgcacccgggccggggtggaataccgcctcctgcaggctgcttacctggccaagcctggggactcactggcccaggccttcaatatcaccagccaggacgatgtactctttgccatcttctccaaagggcagaagcagtatcaccacccgcccgatgactctgccctgtgtgccttccctatccgggccatcaacttgcagatcaaggggcgcctacagtcctgctaccagggcgagggcaacctggagctcaactggctgctggggaaggacgtccagtgcaccaaggcgcctgtccccatcgatgataacttctgtggactggacatcaaccagcccctgggaggctcaactccagtggagggcctgaccctgtacaccaccagcagggaccgcatgacctctgtggcctcctacgtttacaacggctacagcgtggtttttgtggggactaagagtggcaagctgaaaaagattcgggccgacggtcccccccatggtggggtccagtacgagatggtctctgtgctcaaggacggaagccccatcctccgggacatggccttctccattgatcagcgctacctgtacgtcatgtctgagagacaggtcaccagggtccccgtggagtcatgtgagcagtatacgacttgtggggagtgcctgagctctggggaccctcactgtggctggtgtgccctgcacaacatgtgctcccgcagggacaaatgccaacaggcctgggaacctaatcgatttgctgccagcatcagccagtgtgtgagccttgcagtgcatcccagcagcatctcagtatctgagcacagccggttgcttagcctggtagtgagtgatgctcctgatctatctgcgggtatcgcctgtgcctttgggaacctgacagaggtggaggggcaggtgtccgggagccaggtcatctgcatctcacctgggcccaaggatgtccctgtcatcccgctggatcaagactggtttgggctggagctacagctgaggtccaaggagacagggaagatatttgtcagcaccgagttcaagttttacaactgcagtgcccaccaactgtgcctgtcctgtgtcaacagcgccttccgctgccattggtgcaagtaccgcaacctctgcactcatgaccccaccacctgctccttccaggagggccggatcaatatttcagaggactgtccccagctggtgcccacagaggagatcttgattccagtcggggaggtaaagccaatcacccttaaggcgcgaaatctgccccagccgcagtccggccagcgaggctatgagtgtgtcctcaacatacaaggagccatccaccgggtccccgctctgcgcttcaacagctccagcgttcagtgtcagaacagctcgtaccagtatgatggcatggacatcagcaatctggccgtggatttcgctgtggtgtggaacggcaatttcatcattgacaaccctcaggacctgaaagtccatctctacaagtgtgcagcccagcgggagagctgcggcctctgcctcaaggccgaccggaagtttgagtgtggctggtgcagcggcgagcgcaggtgcaccctccaccagcactgtaccagcccttccagcccctggctcgactggtccagccacaatgtcaagtgctccaaccctcaaatcaccgagattttgacggtgtctggaccgccggaaggagggacgcgagtgaccatccatggcgtgaacctgggtctggacttctccgagatcgcccaccatgtgcaggtggctggggtgccctgcacgcccctcccaggggaatacatcatcgctgagcagattgtctgtgagatgggccatgccctcgtgggaaccacctccgggccagtacgcctgtgtattggcgagtgtaagccagagttcatgacgaagtcccatcagcagtacaccttcgtgaacccttctgtgctgtcactcaacccaatccgaggtcccgagtcaggaggcactatggtgaccattaccggccattaccttggggctgggagcagcgtggcagtctacctgggcaaccagacctgcgagttctacgggaggtcaatgagtgagatcgtgtgtgtctcacccccatcatccaatggccttggcccggtccctgtttctgtgagtgtcgaccgagcccatgtggatagcaacctgcagtttgagtacatagatgaccctcgggtccagcgcatcgagccagagtggagcattgccagtggccacacacccctgaccatcacaggcttcaacctggatgtcattcaggagccaaggatccgagtcaaattcaatggcaaagaatctgtcaatgtgtgtaaagttgtgaacacaaccaccctcacctgcctggcaccctctctgaccacggactaccgccctggcctggacactgtggaacgcccagatgagtttggatttgtctttaacaatgtccaatccttgctaatttacaacgacaccaagtttatctactaccccaacccgacctttgaactgcttagccctactggagtcttggatcaaaagccaggatcgcccatcattctgaagggcaaaaacctctgccctcctgcctctggaggggccaaactcaactacactgtgctcatcggagagaccccttgtgctgtcaccgtatctgagacccagcttctctgcgagcctcccaacctcaccgggcagcacaaggtcatggttcacgtgggcgggatggtgttctcgcctggctcggtgagtgtcatctcagacagcttgctgaccctgccagccatcgtcagcatcgcggccggcggcagcctcctcctcatcatcgtcatcatcgtcctcattgcctacaagcgcaagtctcgagaaaatgacctcactctcaagcggctgcaaatgcagatggacaatctggagtcccgtgtggccttggagtgcaaggaagcttttgctgagctccagacggatatcaatgagttgaccagtgacctggaccgctcaggaatcccttacctggactatcgtacctacgctatgcgagtcctgttcccgggcatcgaggaccaccccgtcctgcgggagctggaggtacaaggaaacgggcagcagcacgtggagaaggccctgaagctctttgcccagctcatcaacaacaaggtgttcctgctgaccttcatccgcaccctggagctgcagcgcagtttctccatgcgcgaccggggcaacgtggcttcgctcatcatgaccggcctgcagggccgcctggaatatgccactgatgtcctcaagcagctgctctctgacctcatcgataagaacctggagaacaagaaccaccccaagctgctactccggaggacagagtctgtggctgaaaagatgctgaccaattggttcgccttcctcctgcacaagttcctaaaggagtgcgcaggggagccactcttcatgctatactgtgccatcaagcagcagatggagaagggccccattgatgccatcacgggcgaggcccgctactccctgagcgaggacaagctcatccggcagcagatcgagtacaagaccctgatcctgaactgcgtcaaccctgacaacgagaacagtccagagatcccagtgaaggtgttaaactgtgacaccatcacacaggtcaaggagaagattcttgatgccgtgtataagaatgtgccctattcccagcggccgagggcagtggacatggacttggagtggcgccaaggccggatcgcccgggtcgtgctgcaagatgaggacatcaccaccaagattgagggtgactggaagcggctcaacacactgatgcattatcaggtgtcagacaggtcggtggtggctctggtccccaaacagacctcctcctacaacatccctgcctctgccagcatctcccggacgtccatcagcagatatgactcctccttcaggtatacgggcagccccgacagcctgcggtcccgggccccgatgatcaccccagacctggaaagtggggtcaaggtgtggcatctggtgaagaaccatgaccacggtgaccagaaggagggtgaccggggcagcaagatggtgtccgagatctacctgacccggctactggccaccaagggcaccctgcagaagtttgtggacgacttgtttgagaccttgttcagcactgtgcaccggggcagcgctctccccctggccatcaagtacatgtttgatttcctagatgagcaggcagacaggcacagcatccatgacacagatgtgcggcacacctggaaaagcaactgcctccctctgcgcttctgggtgaacgtgattaagaacccccagttcgtgtttgacatccacaagggcagcatcacggacgcctgcctctctgtggtggcccagaccttcatggactcttgttcaacgtcagagcaccggctgggcaaggactccccctccaacaagctgctctatgccaaggacatccccagctacaagagctgggtggagagatactacgcagacatcgccaagctcccagccatcagtgaccaggacatgaatgcctacctcgccgagcagtcccgcctgcacgccgtggagttcaacatgctgagtgccctcaatgagatctactcctatgtcagcaagtatagtgaggagctcatcggggccctagagcaggatgagcaggcacggcggcagcggctggcttataaggtggagcagctcattaatgccatgtccattgagagctgagaggaggagcctcgcattcctgggaagagggacctgtccaagctgtcacactgggagtctcagatggaaggacaagtgatggggatcaggccccagagcttgctgtcccctgagaccccatcctggggagaggggaggactcctctccctacgccagccaagtttcgtcatagccagttccagctgggagagacagtgggcgtcgtccatcctcagtgagaacaccagagaacccggggccgggagaaggtggttcttcaagccgagaggcacgagctggggacagttctgcctctgtgactgctgctttgcatgaaaactcatttgatgtatattggggaaataatgagaactttatttaattttttt

SEQ ID NO: 22308 - DNA, 14491 bp, Homo Sapiens
aaagaacaccatttctgtcaaggctgtctgtgactacaggcagatcgagattactatttgcaaaaatgatgaatgtgtgctagaagataattctcagcggaccaaatggaaagtgatcagccccacagggaacgaggcaatggtgccgtcagtctgcttcctcatccccccacccaataaggatgccattgagatggccagcagggtcgaacaatcttatcagaaggttatggccctttggcatcagctgcatgttaacaccaaaagccttatctcttggaactatctgcgtaaagaccttgaccttgtacagacctggaacctagaaaagcttcgatcctcagcaccaggggagtgccatcagattatgaagaaccttcaggcccactatgaagactttctgcaggatagtcgtgactctgtgctgttctcagtggctgatcgcttgcgcttggaagaggaggtggaagcttgtaaagcccgcttccagcacctgatgaagtccatggagaatgaggacaaagaggagactgtggccaagatgtacatttcagagttgaagaacatccggctacgcctggaggagtatgaacagagggtggtcaaacgaattcagtctctagccagctctaggactgacagagatgcctggcaggacaatgcattaaggattgcagagcaagagcacacccaggaggatttacagcaattgaggtcagacttggatgcagtttctatgaaatgtgacagctttctccatcagtctccatctagttcaagtgtcccaactctgcgctcagaactgaatctgctggtggagaagatggaccatgtctatggtctctctactgtatatctgaataagttaaagacagttgatgttatagtacgtagcatacaggatgctgaactcttggtcaaaggttatgagattaagctgagtcaagaagaagtagtactggcagatctctcagctctggaggcccattggtcgacattacggcactggcttagtgatgtgaaggacaagaattcagtgttttcagtcctggatgaggaaattgccaaggccaaggtagtggcagagcagatgagtcgtctgacaccagagcgaaatctggatttggagcgctatcaggaaaaaggctcccagctgcaggagcgttggcaccgagtcattgcccagctcgagattcgccaatctgagctagaaagtatccaggaagttctgggagattaccgagcctgccatggaactctcatcaagtggattgaggaaaccactgcccagcaggaaatgatgaagccaggccaggcagaggatagcagagtgctttcggagcagctcagccagcagacggccctatttgcagaaattgagagaaatcagacaaaactggatcaatgtcaaaaattttcccagcagtactctactattgtaaaggactatgaattgcaactgatgacatacaaggcctttgtggaatcgcagcagaaatcccctggcaagcgccgtcgcatgctttcctcttcagatgccatcactcaagagttcatggacttaaggactcgctacacggcattggtgactttaacaactcagcacgtgaaatacatcagtgatgcactccggcgtctggaggaggaggagaaagtggtagaagaggagaaacaagaacatgtggagaaggttaaagaacttttgggctgggtgtctaccctagcgaggaatacacaaggaaaagctacctcatccgagaccaaagaatcaacagacattgaaaaagctattttggaacagcaggttctgtcagaagagctgacaacaaagaaagaacaagtctctgaagctattaaaacatcacagatcttcttggccaagcatggtcataagctctcagaaaaagagaagaaacaaatatctgagcaattgaatgccctaaacaaggcttaccatgacctttgtgatggttctgcaaatcagcttcagcagcttcagagccagttggctcaccagacagaacaaaagaccctgcagaaacaacaaaatacctgtcaccagcaactggaggatctttgcagttgggtaggacaggcagaaagagcactggcaggccaccaaggcagaaccacccagcaggatctctctgctttgcagaagaaccaaagtgacttgaaggatttacaggatgacattcagaatcgtgccacctcatttgccactgttgtcaaggacattgaggggttcatggaagagaatcagaccaagctgagcccacgtgagttgacagctcttcgggaaaagcttcatcaggctaaggagcaatatgaggcgctccaggaagagacacgtgtggcccagaaggaactggaggaagcagtgacctccgccttacagcaggagactgaaaagagtaaagcagcaaaggaactggcagagaacaagaagaagatcgatgctctcctggattgggtaacttcagtaggatcatctggtggacagctgctgaccaaccttccaggaatggagcagctctcgggagctagcttggagaaaggagccttggacaccactgatggttacatgggggtgaatcaagccccagagaaactggacaagcaatgtgagatgatgaaggcccgtcaccaagaattgctgtcccagcagcaaaatttcattctggccacccagtcagctcaggccttcttggatcagcatggccacaatctcacacctgaggagcaacagatgctgcaacagaagctgggagagctaaaggaacaatactctacttccctggcccaatcagaggcagaactgaagcaggtgcagacacttcaggatgagttgcagaaatttctgcaggatcataaagagtttgaaagctggttggaacgatccgagaaagagctggagaacatgcataagggaggcagcagccccgagacccttccctccctgctaaagcggcaaggaagcttctcagaggatgtcatttcccacaaaggagacttgagatttgtgactatctcaggacagaaagtcttggacatggaaaacagttttaaggaaggcaaagaaccatcagaaattggaaacttagtaaaggacaagttgaaggatgcaacagaaagatacactgctctccactcaaagtgtacacgattaggatctcacctgaatatgctgttaggccagtatcatcaattccaaaacagtgctgacagcctgcaggcctggatgcaggcttgtgaggccaacgtggagaagctcctctcagatactgttgcctctgaccctggagttctccaggagcagcttgcaacaacaaagcagttgcaggaggaattggctgagcaccaagtacctgtggaaaaactccaaaaagtagctcgtgacataatggaaattgaaggggagccagccccagaccacaggcatgttcaagaaactacagattccatactcagccacttccaaagcctctcctatagcctggctgagcgatcttctctgctgcagaaagcaattgcccaatctcagagtgtccaggaaagcctggagagcctgttgcagtctattggggaagttgaacaaaacctggaagggaagcaggtgtcatcactctcatcaggagtcatccaggaagccttagccacaaatatgaaattgaagcaggacattgctcggcaaaagagcagcttggaggccacccgtgagatggtgacccgattcatggagacagcagacagtactacagcagcagtgctgcagggcaaactggcagaggtgagccagcggttcgaacagctctgtctacagcagcaagaaaaggagagctccctaaagaagcttctaccccaggcagagatgtttgaacacctctctggtaagctgcagcagttcatggaaaacaaaagtcggatgctggcctctggaaatcagccagatcaagatattacacatttcttccaacagatccaggagctcaatttggaaatggaagaccaacaggagaacctagatactcttgagcacctggtcactgaactgagctcttgtggctttgcgctggacttgtgccagcatcaggacagggtacagaatctaagaaaagacttcacagagctacagaagacagttaaagagagagagaaagatgcatcatcttgccaggaacagttggatgaattccggaagctggtcaggaccttccagaaatggttgaaagaaactgaagggagtattccacctacggaaacttctatgagtgctaaagagttagaaaagcagattgaacacctgaagagtctactagatgactgggcaagtaagggaactctggtggaagaaatcaattgcaaaggtacttctttagaaaatctcatcatggaaatcacagcacctgattcccaaggcaagacagatctgacggagatccagtgtgacatgtcagatgtaaacttgaagtatgagaaactagggggagtacttcatgaacgccaggaaagccttcaggctatcctcaacagaatggaggaggttcacaaggaggcaaactctgtgctgcagtggctggaatcaaaagaggaagtcctgaaatccatggatgccatgtcatctccaaccaagacagaaacagtgaaagcccaagctgaatctaacaaggccttcctggctgagttggaacagaattctccaaaaattcaaaaagtaaaggaagccctggctggattactggtgacatatcccaactcacaggaagcagaaaattggaagaaaattcaggaagaactcaattcccgatgggaaagggccactgaggttactgtggctcggcaaaggcagctagaggaatctgcaagtcatctggcctgcttccaggctgcagaatcccagctccggccgtggctgatggagaaagaactgatgatgggagtgctggggcccctgtctattgaccccaacatgttgaatgcacaaaagcaacaggtccagtttatgctaaaggaatttgaagcacgcaggcaacagcatgagcaactgaatgaggcagctcagggcatcctaacaggccctggagatgtctctctgtccaccagccaagtacagaaagaactccagagcatcaatcagaaatgggttgagctgactgacaaactcaactcccgttccagccaaattgaccaagctattgttaagagcacccagtaccaggaactgctccaggacttatcagagaaggtgagggcagttggacaacggctgagtgtccagtcagctatcagcacccaaccagaggctgtaaagcagcaattggaagagaccagtgaaattcgatctgacttggagcagttagaccacgaggttaaggaggctcagacactgtgcgatgaactctcagtgctcattggtgagcagtacctcaaggatgaactgaagaagcgtttggagacagttgccctgcctctccaaggtttagaagaccttgcagccgatcgcattaacagactccaggcagctcttgccagcacccagcagttccagcaaatgtttgatgagttgaggacctggttggatgataaacaaagccagcaagcaaaaaactgcccaatttctgcaaaattggagcggctacagtctcagctacaggagaatgaagagtttcagaaaagtcttaatcaacacagtggctcctatgaggtgattgtggctgaaggggaatctctacttctttctgtacctcctggagaagagaaaaggactctacaaaaccagttggttgagctcaaaaaccattgggaagagcttagtaaaaaaactgcagacagacaatccaggctcaaggattgtatgcagaaagctcagaaatatcagtggcatgtggaagaccttgtgccatggatagaagattgtaaagctaagatgtctgagttgcgagtcactctggatccagtgcagctagagtccagtctcctaagatcaaaggctatgctgaatgaggtggagaagcgccgctccctgctggaaatattgaatagtgctgctgacattctgatcaattcttcagaagcagatgaggatggaatccgggatgagaaggctgggatcaaccagaacatggatgctgttacagaagagctgcaggccaaaacagggtcactcgaagaaatgactcagaggctcagggagttccaggaaagctttaagaatattgaaaagaaggttgaaggagccaaacaccaacttgagatctttgatgctctgggttctcaagcctgtagcaacaagaacctggagaagctaagagctcaacaggaagtgctgcaggccctagagcctcaggtagactatctgaggaactttactcagggtctggtagaagatgccccagatggatctgatgcttctcaacttctccaccaagctgaggtcgcccagcaagagttcctcgaagttaagcaaagagtgaacagtggttgtgtgatgatggaaaacaagctggaggggattggccagtttcactgccgggtccgagagatgttctctcaattggcagacctggatgatgagctagatggcatgggtgctattggcagagacactgatagcctccagtcccaaatcgaggatgtccggctattccttaacaaaattcacgtcctcaaattagacatagaggcctctgaagcagagtgtcgacatatgctagaagaagaggggactctggatttgttaggtctcaaaagggagctagaagccctgaacaaacagtgtggcaaactgacagagagggggaaagctcgtcaggaacagctggaactgacactaggccgtgtagaggacttctacaggaaattgaaaggactcaatgacgcgaccacagcagcagaggaggcagaggccctccagtgggtagtggggaccgaagtggaaatcatcaaccaacaattagcagattttaaaatgtttcagaaagaacaagtggatcctcttcagatgaaattgcagcaggtgaatggacttggccagggattaattcagagtgcaggaaaagactgtgatgtacagggtttagaacatgacatggaagagatcaatgctcgatggaatacattgaataaaaaggtcgcacaaagaattgcacagctacaggaagctttgttgcattgtgggaagtttcaagatgccttggagccattgctcagctggttggcagataccgaggagctcatagccaatcagaaacctccatctgctgagtataaagtggtgaaagcacagatccaagaacagaagttgctccagcggctcctagatgatcgaaaggccacagtagacatgcttcaagcagaaggaggcagaatagcccagtcagcagagctggctgatagagagaaaatcactggacagctggagagtcttgaaagtagatggactgaactactcagtaaggcagcagccaggcaaaaacagctggaagacatcctggttctggccaaacagttccatgagacagctgagcctatttctgacttcttatctgtcacagagaaaaagcttgctaactcagaacctgttggcactcagactgccaaaatacagcagcagatcattcggcacaaggctttaaatgaagaaattgttaatagaaagaagaatgtagatcaagctattaaaaatggtcaggctcttctaaaacaaaccacaggtgaggaggtgttacttatccaggaaaaactagatggtataaagactcgttacgcagacatcacagttactagctccaaggccctcagaactttagagcaagcccggcagctggccaccaagttccagtctacttatgaggaactgaccgggtggctgagggaggtggaggaggagctggcaaccagtggaggacagtctcccacaggggaacagataccccagtttcagcagagacagaaggaattaaagaaggaggtcatggagcacaggctggtgttggacacagtgaatgaggtgagccgtgctctcttagagctggtgccctggagagccagagaagggctggataaacttgtgtccgatgctaacgagcagtacaaactagtcagtgacactattggacaaagggtggatgaaattgatgctgctattcagagatcacaacagtatgagcaagctgccgatgcagaactagcttgggttgctgaaacaaaacggaaactgatggctctgggtccaattcgcctggaacaggaccagaccacagctcagcttcaggtacagaaggctttctccattgacattattcgacacaaagattcaatggatgaactcttcagtcaccgtagtgaaatctttggcacatgtggggaggagcaaaaaactgtattacaggaaaagacagagtctctaatacagcaatatgaagccattagcctactcaattcagagcgttatgcccgcctagagcgggcccaggtcttagtaaaccagttttgggaaacttatgaagagctcagcccctggattgaggaaactcgggcactaatagcacagttaccctctccagccattgatcatgagcagctcaggcagcaacaagaggaaatgaggcaattaagggaatctattgctgaacacaaacctcatattgacaaactactaaagataggcccacaactaaaggaattaaaccctgaggaaggggaaatggtggaagaaaaataccagaaagcagaaaacatgtatgcccaaataaaggaggaggtgcgccagcgagccctggctctggatgaagccgtgtcccagtccacacagattacagagtttcatgataaaattgagcctatgttggagacactggagaatctttcctctcgcctgcgtatgccaccactgatccctgctgaagtagacaagatcagagagtgcatcagtgacaataagagtgccaccgtggagctagaaaaactgcagccatcctttgaggccttgaagcgccgtggagaggagcttattggacgatctcagggagcagacaaggatctggctgcaaaagaaatccaggataaattggatcaaatggtattcttctgggaggacatcaaagctcgggctgaagaacgagaaatcaaatttcttgatgtccttgaattagcagagaagttctggtatgacatggcagctctcctgaccaccatcaaagacacccaggatattgtccatgacttggaaagcccaggcattgatccttccatcatcaaacaacaggttgaagctgctgagactattaaggaagagacagatggtctgcatgaagagctggagtttattcggatccttggagcagatttgatttttgcctgtggagaaactgagaagcctgaagtgaggaagagcattgatgagatgaataatgcttgggagaacttaaacaaaacatggaaagagaggctagaaaaacttgaggatgctatgcaagctgctgtgcagtatcaggacactcttcaggctatgtttgactggctagataacactgtgattaaactctgcaccatgccccctgttggcactgacctcaatactgttaaagatcagttaaatgaaatgaaggagttcaaagtagaagtttaccaacagcaaattgagatggagaagcttaatcaccagggtgaactgatgttaaagaaagctactgatgagacggacagagacattatacgagaaccactgacagaactcaaacacctctgggagaacctgggtgagaaaattgcccaccgacagcacaaactagaaggggctctgttggcccttggtcagttccagcatgccttagaggaactaatgagttggctgactcataccgaagagttgttagatgctcagagaccaataagtggagacccaaaagtcattgaagttgagctcgcaaagcaccatgtcctaaaaaatgatgttttggctcatcaagccacagtggaaacagtcaacaaagctggcaatgagcttcttgaatccagtgctggagatgatgccagcagcttaaggagccgtttggaagccatgaaccaatgctgggagtcagtgttacagaaaacagaggagagggagcagcagcttcagtcaactctgcagcaggcccagggcttccacagtgaaattgaagatttcctcttggaacttactagaatggagagccagctttctgcatctaagcccacaggaggacttcctgaaactgctagggaacagcttgatacacatatggaactctattcccagctgaaagccaaggaagagacttataatcaactacttgacaagggcagactcatgcttctaagccgtgacgactctgggtctggctccaagacagaacagagtgtagcacttttggagcagaagtggcatgtggtcagcagtaagatggaagaaagaaagtcaaagctggaagaggccctcaacttggcaacagaattccagaattccctacaagaatttatcaactggctcactctagcagagcagagtttaaacatcgcttctccaccaagcctgattctaaatactgtcctttcccagatagaagagcacaaggtttttgctaatgaagtaaatgctcatcgagaccagatcattgagctggatcaaactgggaatcaattaaagttccttagccaaaagcaggatgttgttctgatcaagaatttgttggtgagcgtgcagtctcgatgggagaaggttgtccagcgatctattgaaagagggcgatcactagatgatgccaggaagcgggcaaaacaattccatgaagcttggaaaaaactgattgactggctagaagatgcagagagtcacctggactcagaactagagatatccaatgacccagacaaaattaaacttcagctttctaagcataaggagtttcagaagactcttggtggcaagcagcctgtgtatgataccacaattagaactggcagagcactgaaagaaaagactttgcttcccgaagatagtcagaaacttgacaatttcctaggagaagtcagagacaaatgggatactgtttgtggcaagtctgtggagcggcagcacaagttggaggaagccctgctcttttcgggtcagttcatggatgctttgcaggcattggttgactggttatacaaggtggagccacagctggctgaggaccagcccgtgcacggggaccttgacctcgtcatgaacctcatggatgcacacaaggttttccagaaggaactgggaaagcgaacaggaaccgttcaggtcctgaagcggtcaggccgagagctgattgagaatagtcgagatgacaccacttgggtaaaaggacagctccaggaactgagcactcgctgggacactgtctgtaaactctctgtttccaaacaaagccggcttgagcaggccttaaaacaagcggaagtgtttcgagacacagtccacatgctgttggagtggctttctgaagcagagcaaacgcttcgctttcggggagcacttcctgatgacacagaggccctgcagtctctcattgacacccataaggaattcatgaagaaagtagaagaaaagcgagtggacgttaactcagcagtagccatgggagaagtcatcctggctgtctgccaccccgattgcatcacaaccatcaaacactggatcaccatcatccgagctcgcttcgaggaggtcctgacatgggctaagcagcaccagcagcgtcttgaaacggccttgtcagaactggtggctaatgctgagctcctggaagaacttctggcatggatccagtgggctgagaccaccctcattcagcgggatcaggagccaatcccgcagaacattgaccgagttaaagcccttatcgctgagcatcagacatttatggaggagatgactcgcaaacagcctgacgtggaccgggtcaccaagacatacaaaaggaaaaacatagagcctactcacgcgcctttcatagagaaatcccgcagcggaggcaggaaatccctaagtcagccaacccctcctcccatgccaatcctttcacagtctgaagcaaaaaacccacggatcaaccagctttctgcccgctggcagcaggtgtggctgttagcactggagcggcaaaggaaactgaatgatgccttggatcggctggaggagttgaaagaatttgccaactttgactttgatgtctggaggaaaaagtatatgcgttggatgaatcacaaaaagtctcgagtgatggatttcttccggcgcattgataaggaccaggatgggaagataacacgtcaggagtttatcgatggcattttagcatccaagttccccaccaccaagttagagatgactgctgtggctgacattttcgaccgagatggggatggttacattgattattatgaatttgtggctgctcttcatcccaacaaggatgcgtatcgaccaacaaccgatgcagataaaatcgaagatgaggttacaagacaagtggctcagtgcaaatgtgcaaaaaggtttcaggtggagcagatcggagagaataaataccggtttggggattctcagcagttgcggctggtccgtattctgcgtagcaccgtgatggttcgcgttggtggaggatggatggccttggatgaatttttagtgaaaaatgatccctgccgagcacgaggtagaactaacattgaacttagagagaaattcatcctaccagagggagcatcccagggaatgacccccttccgctcacggggtcgaaggtccaaaccatcttcccgggcagcttcccctactcgttccagctccagtgctagtcagagtaaccacagctgtacatccatgccatcttctccagccaccccagccagtggaaccaaggttatcccatcatcaggtagcaagttgaaacgaccaacaccaacttttcattctagtcggacatcccttgctggtgataccagcaatagttcttccccggcctccacaggtgccaaaactaatcgggcagaccctaaaaagtctgccagtcgccctgggagtcgggctgggagtcgagccgggagtcgagccagcagccggcgaggaagtgacgcttctgactttgacctcttagagacgcagtctgcttgttccgacacttcagaaagcagcgctgcagggggccaaggcaactccaggagagggctaaacaaaccttccaaaatcccaaccatgtctaagaagaccaccactgcctcccccaggactccaggtcccaagcgataacactgtctaagcacccccaagccactatccactttgaatcctgctccatacattgggtgtatatttattctgaacgggagaagttatattgttaaaagtgtaaaagaataattgtgttatgaagctgccttattttttttctttttgtaagttactattttcatgtgaatatttatgtagataaaatttgcctcctggtaaccctgtaatggatggggcccagaaatgaaatatttgagaaaaacaagtgaaaaggtcaagatacaaatgtgtattaaaaaaaaaaaagcctattaatagggtttctgcgcggtgcagggttgtaaacctgctttatcttttaggattattcctaaatgcatcttctttataaacttgacttgctatctcagcaagataaattatattaaaaaaataagaatcctgcagtgtttaaggaactctttttttgtaaatcacggacacctcaattagcaagaactgaggggagggctttttccattgtttaatgttttgtgatttttagctaaagagagggaacctcatctaagtaacatttgcacatgatacagcaaaaggagttcattgcaatactgtctttggatattgtttcagtactgggtgtttaaaggacaaatagctgctagaattcaggggtaaatgtaagtgttcagaaaacgtcagaacatttggggttttaaactgatttgttgctccctatccagcctagacaccagtaactcttgtgttcaccaggacccagacccttggcaagggataggctcgttggtgacattgtgaatttcagatttgttttatccactttttttgctatttatttaaatggtcgatcaacttcccacaaactgaggaatgaattccacgagcctgttctgaaaatgtggacgtaagacaaacacgtgctcgtcctttaatggagttcaccagcacacttgttaaccagtcctgtttgctttcgtctttttttgtgcgtaataaagtcaactgaccaagtgaccatgaaaaggggctgtctggggctcctgttttttagctgctgttcttcagctccgaccatgttgctgtgtgattatctcaattggttttaattgaggcagaaactgaagctctaccaatgaactgtttagaaacaagacacacttttgtattaaaattgcttgcagtaac

SEQ ID NO: 22309 - DNA, 6028 bp, Homo Sapiens
tcgacccacgcgtccgcaagatggccgccttctggcgtctccggcgctgttgaatggcgaaagctttattgttcccttcgggcaggagtgttcgtgtcctctatggcgctgtcaataaagaacggcagtttgaatcggtgctgaacagggcctgtcctcccaaagccaactctaaggagaggagaggaagagcagttcttggggcagagttgacgcaatggagctccccaactacagccggcagctgctgcagcagctgtacactctgtgcaaggagcagcagttctgtgattgcaccatctccattggtaccatttacttcagggctcacaagcttgtcctggctgctgccagcctcctgttcaaaaccctgctggataacacagataccatctccatcgatgcatctgtggtgagccccgaggagtttgcgctcttgttggaaatgatgtacacgggcaaactacctgtgggcaagcacaacttctccaaaatcatctccttagcagacagtctacagatgtttgatgtagctgttagctgcaaaaatcttctgaccagccttgtaaactgctcggttcagggtcaggtggtaagggatgtctctgcgccatcctcagagacattcagaaaggaaccagagaagcctcaagtagaaatcctttcatctgaaggtgctggagagcctcattcttccccagagcttgctgccactccagggggccctgtgaaagctgagactgaggaagcagcccattcagtttcacaagagatgagtgtgaattctcccacagcccaggagagccagaggaatgcagaaaccccagcggagactcctactacagctgaagcttgttccccctcccctcctgtgcaaacctttagtgaggcaaagaagacaagcacagaaccaggatgtgaaaggaaacactaccagctgaattttcttctagaaaatgaaggtgtcttctcagatgcactcatggttacccaggatgttttaaaaaaactagaaatgtgttcagaaattaaaggtccacagaaggagatgatagtgaaatgtttcgagggtgaaggaggacattcagcattccagagaatcctgggtaaagtaagagaggaaagcctggatgttcaaactgttgtgtccctgttgaggctgtaccaatattctaatcctgcagtaaaaacagcactattagacaggaagccagaagatgtagacacagtgcagccaaaagggagcacagaggagggaaagaccttgtctgttctgttactagaacacaaagaggacctgatacagtgtgtaacacagctgagacctattatggagtccctggaaacagccaaggaggaattcctgactggcactgaaaaaagggtgattctgaattgctgtgagggcagaacacccaaggagacaatagaaaatttgttgcacagaatgactgaagagaagacgctgactgctgagggtttggtaaaactcctccaggctgtgaagacgactttcccaaacctgggccttctgctagagaagttgcagaaatcagccactttgccaagcaccacagtccaaccaagccctgatgattatgggactgagctattgagacgctatcatgaaaacctctctgagattttcacagacaaccagattttattaaagatgatctcacacatgacaagtttagcccctggagaaagagaggtcatggagaagcttgtgaaacgtgactctggttcaggtggtttcaattctctgatatcagcagttctagaaaagcagactctctctgccacagccatttggcaactgctgctggtggttcaggagacaaagacctgtccattggacctgctcatggaggaaatacgaagggagcctggtgccgatgctttcttccgggcagtgaccaccccagaacatgccactttagaaacaatcctgaggcataaccagttgatcttggaggccatccaacagaagattgagtgcaagctctttacctcggaggaggagcacctggcagagactgtgaaagagattctgagcattccctctgagacagccagccctgaagcttccctgagagcagtgctgagcagagccatggaaaaatcagtcccggccattgaaatatgccacctcctgtgcagtgtccacaaatcttttccaggcctgcagcctgtcatgcaggagttggcatacattggtgtccttactaaggaagatggagagaaggaaacgtggaaggtgagtaataaatttcaccttgaagccaacaacaaagaagatgaaaaggcagccaaagaagacagccagcctggggaacagaatgatcaaggagagactggttccttgccaggacagcaagagaaagaggcttcagcctccccagaccctgccaagaagagcttcatctgtaaggcctgcgacaaaagcttccatttctactgccgcctaaaggtgcacatgaagcgctgccgggtggctaagagcaaacaggtgcagtgtaaggagtgcagtgagaccaaggattcaaagaaagagctggacaaacatcagctggaggcccatggtgcaggtggagagcccgatgcccccaagaagaagaagaagaggcttccagtgacatgtgacctctgtggcagagaatttgcccatgcctcaggcatgcagtaccataagctgacagagcacttcgatgagaagcctttctcctgtgaagagtgtggggcgaagtttgcagccaattccaccctgaagaaccaccttcgccttcacaccggggaccgcccgttcatgtgcaagcactgcctcatgaccttcacccaggcctccgccctggcctatcacaccaagaagaagcactcagaagggaaaatgtatgcatgccagtactgtgatgctgtgtttgcccagtctattgagctgtcccgccacgtgaggacccacaccggggacaagccctatgtctgcagagactgtggcaagggcttccggcaagccaatggcctctccatccatctgcacacctttcacaacatagaagatccttatgactgcaagaagtgcaggatgagtttccccactcttcaggatcaccggaagcacatccatgaggtgcactccaaagagtaccacccctgccccacgtgtgggaagatcttcagtgccccgtccatgctggagcggcacatggtgacccacgttggagggaagcccttcagctgcgggatctgcaacaaggcctaccagcaattgtctggtttgtggtaccacaatcgaacccaccaccctgacgtatttgctgctcagaaccaccgatcttccaagttctcatcactccagtgcagctcctgtgacaaaaccttccccaacaccattgagcacaagaaacacatcaaagcagaacatgcagatatgaagttccatgaatgtgaccagtgtaaggagctcttccccacgccagccttgctgcaggttcatgtcaagtgccagcattcagggtcccagccattccggtgcttgtactgtgctgctactttccgttttcctggagcattgcagcaccatgtcaccacggagcacttcaagcagtcagagaccaccttcccctgtgagctctgtggggaactcttcacctcccaggcccagcttgacagtcacctggaatctgagcacccaaaggtgatgagcacggaaacccaggccgcagcctcacagatggcgcaggtgatccaaaccccagagcccgtggccccgacagagcaggtgatcactttggaggagacccagcttgccgggtcgcaggtgtttgtgacgttgccagattctcaggcatctcaggccagctctgagctcgtggcggtgactgtggaggacttgctggatggcacagtgacgctgatctgtggtgaggccaaatgagcagcctttcatccggcagagccttcctgcgtttgcagcagagaggaggccccacagcttgccctttgccctccatccctggctgtcctgagtggtgagcatcttagcttagcaccaaccaacacagtctcacctagaaaacagatggaagcttcgttgttctcatagaaccaacagcatctgagccctcaacaccaacagcaccatcctctgtagcagacaggcctccctccccacaggcccgctgctgcagcctctatgacactgtccatccccaagtgacatgtggcttcagaagtagagtctgaaagagcagtgggatgggagctggtgaccagggtaccccaggaggcatgatgtgccgacagcgctcagtgggcagaatggcagttagatatgggacttggcccacagtgggggctgcaaatgctgccactgcctctggccatttaaagtgagaggggcaccaacagacaattcggggaccttaggccccttcctgaggcacacttggccccttcctcggtcctatcatcctaccctctgctggggttccccctccacccagtggccacgcccagcaccctattgatggctataggacaggtagccctcatttccatgcctgataaccccttgtcagttgtcagctcttcccaaaacaaagctctggagtttctgctggaagtgtttaatgtgaggcatcagctgctagacagtgtctgcctttccaggacattcttcttggtattccttacctgaagcctggttcccacagctcttccgtgtcatcttcatccccttcctttaatcaaaggctgaaatctctgcctgacctggcagcctggctccctctgggtcatatggtgcagactgtgaccagcaccaggcaggcagtcctgtctgcgtgtggaggagcagccgtgactgcccgtggctctgctgccgcccactccctgccttgtgagtggcctgctgcctcacctcccgcaggccgccacacttattgcaggtcagtgatcctttggagtttgaatttcacaaagctttttttatcttcagttcctaaaatataatctgataattaatggtttgtggaatccattatgaagtgcaattagatagatgtaggttcctgccgtttggagagaatgactagcatttatcttcttttccttccatgccaaaggttggagtctgctggtgcggtgtttacacaccaggcagggctgtctgccaccttgtgtggcttgaccccctgtggaggggagtgcctggttggatcccacactggcagagatggggccaccccttccttccaggcacatctcacattgccatgtacagaggcaggagtcacgtttggtcaccatggaagcttttattgctcccacatggtcaggtctcaccctgcttgaagcgcagaaggcacagccttactgaccagcacgcccactgactggcatctgccggctttgtgcaggcagccccgacggtttccacagcgagcgccagctccggccagcctgggacagctcatcccagccgactacacctgcttctggtcctgtccacattttgatacgcagatcacttgagcttgtcaattagggttctgccattctgaaataaatgaagtttctaaagcagagtcggcctcagaagccaaaaactgaccagaagatggtgctcaaacctttaagacttcatctccatgtgaagggctcactgtttctaccaaggctgtgcctgtattaaggcttttccgtcctgggaactgtcagtctgggagagctcttgatctgcaggtggcaaaatggcactgaatatccccttggcagcagagaaaacccactgaaagatcgtagagtggcacatgcttacagggcattggtgccaagtccagtggatgagaatccagcccctcacaagctgtgggatggggcttgggagttgcagtgaatgtcattaaaatttcttccaaaacaaaactagaaataattgctgagggcttatagggaagtgatttaaaaagaaaaaacaaacaacaacaaaaaaaactcttcggaataaagagggctgtaaattttg

SEQ ID NO: 22310 - DNA, 5406 bp, Homo Sapiens
cagtctcctgccatgcaaagaaggctcatagagttgctttggaagtggattctttgtacagcctggaagaagacgctgtgtaaatgacatgctttgggggctcccccggccacagaaggagaaaactggagccttctgatttcctgttgtttactttccagaggctggagttgggtaggaaacctgagcataccggcacactggcttgtgggtgacttctctccctgctgtatttcccggacaggtgaggcggaccctgttcatcacaggactccccagagatgccaggaaggagactgtggagagccacttccggtaagcaggtggggtgggaggggagctgagccccctccacgtaggaccaacacagccccacccgcagggcgagcaccttaggtgagcgccttctgtctctcgcttgggtatccaggtgagatctgagaaggacctggccctgccacacgtgtatggagtggctcctgtgtgccagccctgctggtgctgtgcagtgaatagcgccctggtggcctatcctcttcaagcagcctgtgcacagtgtccagagcacagaccagggtgtaggtgcgaataaacgtcttgagagcatacgggggaaaaaattgttgaccccggggttcttagcatcacctttgcagaataagagagacgtgagctgagcatttgtatggacccacagggctagggtctcacaggtggaaggacctcggggccatctctgcgtttgttcgtttgtccacccactgagcgggtgtctgttgagtgagcactgtgtctgagtccaggctctccctggtagaacctcctttccagcggctccctttgagtatctgcaccaccaattcctgcagatggaggctggaggaaagtctttcctgtgaggagattacgtgtgcagccagggatgcggggaaaggcccagagcatcaggaaaggtggcggtggggtgcaggggggcagggcaagcagtccgggaaggctcccaggaccccatgctggaggacctgaaggctgggctgaggagctgacattttattctttcttcattcctttttttgtaatcctatttttttagagacagggtcttgctctgttgcccaggctagagttcagtggtgcaataatggcttactgcggcctcaactcctggacttaaggcatcttcctgcctcagcctcccaagtagctgggactgcagacacatggcaccacacccagctaatttttaaattttttatggagatagagtcttgctatgttgcccaggctggtctcgaattgctgggctcaagtgatcctcctgccttgccctcccaaagtgctgggattacaggcgtgagccaccatgcccggcctctcttcattccttatcaatacagcagccactaatttgttgcatggactaggagttggctgcactttaactttgcactatttgtgaagaaagcacttgctaagcaaattgctagacaggatcgtaaactgaatgtttaaaatttgaaaaacttcttcagaaactctaagtattttagaaatatttactaatatgtaaatactcaataccagaatcatttttctgtatttccttgaagcaactcctcaaagttgcctgctaggcaacacctggaaacagtaattccacttaatgtataactttaaagagaaaaaaaaagtctcctcattctcatacaaacattgcatgactcatgctttcccctattttaagaggcctttttagtgaatgctgttgcagtccgtggggattgatgtatgaatttgcctttcaagcagggatgcttaaattgcagttttcttcctcacagctcttattgagaccagaaattgtcctactgtttaatttcatgattgatatacctatgggctgtctctctcactaaaatgtaagcacatccaggccctgttaccagcacctagaacagtgcctggcaggtggtaggtggggatttacatggttctggaatcccctggaattgtatgtataattttgcgtgtatggtgagggggtattgcatggtggccatgagcattgaccttggagccaggttgcctgtattcacctcctggctcagacactcactagctgtgtgatcttgggcacaagccacttacctctgtcggcctcagtttactcatctgtaaaatggggacaaaacctcacaggttatgatgaggattaaataaataaatatatgtaacaatacctggtcaatagtgagtatgtattttgctgggtgacagagtgagaccctgtctctaaacaaaacaaaacaaaacaaaagccctctttgtattaaatttcaaaatttcccccttttggaggataaaagacaaagagaagagaggtctccgctggcacagaaaccagcagcgagatcactctgccatcctttcccttggatccgtgggcacgtctcctgcttggggtgttttcttttccaacggtgtcttttgcctccttctctccctggccacagggacgcgtatcccacgtgtgaggtggttgatgtgcagctgtgctacaacgtggccaaactgatctacctgtgcaaggagaaaaagaagactgagaagagcctgacctattacacaaacctgcaggtgaagacaggccagcggaccctcatcaaccccaagccctgtggccagttttgctgctgtgaagtgctgggctgtgagtgggaagacgccatctcttactacacacggatgaaggacaggctgctggagaggatcacagaggaagaacgccacgtccaggaccagcccctgggaatggccttcgtcaccttccaggagaagtccatggccacctagtgagtgtaggcacatccagaccccttcttggctgactccctgttcccctccagataactcactgtccctctcgagtggagatggtactgctgacccaccatccctgggatttatctgtggtgtttccttctcctccctcagctacccacactcactttcagccagcccagcccatgtttgtgtaacaggcggtgggggtgtgggcagcagccacggagtgggtgattctggctgaccccctcgagctgatgtggcctggccccactgccgggctcttccctgctgccctggacccatcctgttggcttcatgtgccagccttgccccaggggagatggaggcaccctcctttcagacatctgctctgggccacagatccttctgtctgtggctccccaccttcccacaaatgcaaagctgtggggaagacccctggggcacgctggggcgctcactgcagtggggagcttgaccctggggagtggcttttcacagtggcccttggcatgggactctaggctctcatgcctgtggtctcagtgtcatctcgccttaggagcagcacagggtgggtcgggagaggggtgtggaaaggtgtccagccactgccccaggcattgtgacactaggaatggactcacacaggacttcctgcctccttgcagacactggggcaggaggaaaggggaaggcatctgaggcaggagtagaggggctgctgggctccttacgggaggttaaaggaggaaaagctgtgacctgttgagatggtgagggtcgaggtgggagccctgaggagggaagcttgggaacaggcaatgtgtaacgtggtctattgctacacttgggcctggggaaaaagtgacagaatgaaaagttgagccactggcctggcagtagcactgatcagagctccagcttaacaggcagggtggagggggatggccctatggaagagcagtgtgttgccctcagtttccttatctgtaaaatgggaatcgtactccctttgttgctggtggttgcgaggattaaacaaaattctccacacactgtgctagcgtggcacctcttacatagcgttactcataatacactaatcacaacaaagcaaaggtcctatgccactgcctcccactcctactcagtccccacttgccacatgtgtgctggtaacctgagtagcctgggcctggctgttgctacatttccttgcagcatcctgaaagatttcaatgcctgcaagtgtcagagccttcagtgcaaaggtgagccccagccgtcctcccatagcagggagctctatacctccaagtggacagtcacctttgctgctgaccctgaggacatctgctggtaagctcctagaccaaggagaggtgggagagaggcctgggttcctggtgggagctgcccatcacctggagcacaggtgtgacctggcagtcaatggagatctccacacatctgcaattctgtgggctgtgatgctgtgatgtgctcggtgtggcccaactggggtatctgcccagcccttccctccagtgttcctccctagcattcaagtgctacccagcagaaatataatgccagttctgcatctaattttaaatttcctaatagccatgctaaaaaagtaaaaagaaacagttgaaattaattttaataatgtatctcgcccaatatatccaaactgttatttcaacatgcaatttttgaaaaatgtgagatgttttacattctctttttcacacttagtcttcaatatctggtgtgtattttacacttctagcacctctcaattcacaccagccacatttaaaatgctcagtagccgcatgcagcttgtgcagccttacttaggtccagtgtcagcctggggccgtgctggggagctgagctgtgtccatgggggccctggtgagcctccagtgctgtgctgagggtaagggcacccagcgcaagccccagcgcagctgcctgtccagccctgcctcagctccttgcacagaatgagcttgaagtgctcccctctgctcggttctagttctgcctctgacagttttgctctttggttcacaaggcttcctaaactcaggattgctttgtgggtctgttctttgggatgagaggccagggcaggtgcaagctatgccttcactcctttgtccctgccttcctccttcctgtaccccagctacagccccgttgggaagaatgtgtcgttagtcacaaagcattgcagatgtgtctaagaaatgccacgctggggccgggcgtggtgctcacacctgtaatcccagcacttcgagaggctgaggcaggcggattgcctgagctcaggatttcaagaccaccctgggtaacatggtgaaaccctgtctctactaaaaatacaaaaaaattagctgggtgtggtggtacacgcctatagtcccagctacatgggaggctgagcaggagaattgcttgaacctgggaggcagaggttgcagtgagccgagatcacaccactgcactctagcctgggtgactgagcaagactctgtctcc

SEQ ID NO: 22311 - DNA, 6357 bp, Homo Sapiens
gtggatccctagatgggagccggggatgggccgggtgcctggtgggtggcagtcggggctgacggcggcggcactttgccgcctacaggccctggacaccttcaccccgccgcctgcccaggcgggccggccctgcccgtccaccggccgccgagagtccccggccttgggtccccggggccgctgactggcctcggtcacctcccggggaaggctcccgcgcctccatctgcccccgcaggaagggaccctcttctcgcccgcgaggcttctccgggtgggatcgtcctggcccccagccctaagggatccgccccctccgagcatccgccgcccctcggagaccactccagctcggacggacccactccagcccccgctgcacgcggaagcgctcatcctccccgcctgccccgttccctcccccttctcctgtgggacaaccagggaccgcagctccccgctccccaggtgtgggggctccgacacgaacgcctctgctcgcagggcggtgagcgcagatcccacgggtccctcggtcgggggtcgaggctgcttccgtttccatcccggacccgacaatgggcgggaaaaagaaggctttacacgactacgcggcggagttcaccgacctggtggtgaagcacctgattgagcacagtgactctggggacacgtctgtggtggagaccctttactgcagggcctgcgagctgcccgtgcgcgtgcggagggaccgcatcctggaacacctgtcctcgggcaggcagcacggcctgcggacgcccattctcatgtaaatgtcagtgccaacgctggtgtttcaggagtcatcccagcgggctgcgggctattttaggattctctgccctgcaaacgtttccaaagtacgtggacaggccgcctgatgacactacgtttacgggatctgctagtggcttgcctacttagggagtaaaccctgtgaagtctcgcagttttgttaaagtgtgcgtggccacctgaatgctgccttatcacaagccagatacatactggtctgtagggtaactccccactgttgatcctctgagatgattgtggactgggtgctgtgagtcctgccactttgtttaagtgaatgtgtcttttgtccagctcagccgcctcggatctcgctgccaccagccttactgcacacccgtgccacccgcccttgccccgtcagcctcagcctcagctcattctctcaggcagtcccagcattggcacggtacctcctcccgctgtgggccacacgtctctgctccctgtcaaccctcctgccatcagcaccaccaccagcgacttgtctgcccgggaggatgcaacaccatctgcctccaccggccacctttcagtgtttcctgctttccaagtaaagataccagcagtgccctcagagcagaccagccagagtttttctgaagcctcccacagggtgctccccggaggaggcccgagatgctctcgtgactttggagccggggtggctggccaccttggcctgggcatctttggggtgggcttcgggagcccggcactgctgcagagtgtggtggatgagaacagctgctgcttgctgtacgtggtggaggaccagctgtgtgatgtggagcaagccttcagagctgagcatttgggccaacaccagagtggttcgggaacaggatgcagacattgtcctcaacgaccagcggcactttgatccggttttccagttcttgcacaagcaagtttgtgtcagccacgccctggggaggatccactggatcaccgccgtcactgcctgttcccggcggcctctccggcttccctaaagagagcaggtgggactttctacaacgctgctgtgcacgacgtggatgccgtatgcatgttgctgggggaagccactccggacactgtgttttctctgggacatgtcttctgcccagatatggccgccttaaaagatgcagatgctgttgtgatcagcatgaagtttccctgtgaggccgtggttagcgtggacatcagccagcactgcacagacagctgcgaccaggacgtcagccagcactgcacagacagctgcgaccagagactggaggtgacccttgcccttttccacccttcgccagtccactgtgaaaagctgggttgattgtgcgggttagatagaggtcatcagccgggttgattgtgtgggttagacagaggtcatcagccaggttgattgtgtgggttagatagagatcatcagcctggtagattgtgtgggttagatagaggtcatcagccaggttgattgtgcgggttagatagagatcatcagccgggttgattctacaggttagatagaggtcgtcagccgggttgattgtgcgggttagatagagatcatcagccgggttgattgtgcgggttagatagaggtcatcagctgggttgattgtgtgggttagatagagatcatcagctgggttgattgtgtgggttagatagaggtcgtcagctgggttgattgtgcgggttagatagaggtcatcagccgggttgattctacaggttagatagaggtcgtcagctgggttgattgtgcgggttagagatcatcagccgggttgattgtgcgggttagatagaggtcatcagccgggttgattgtgcgggttagatagagatcatcagctgggttgattctgcaggttagatagaggtcatcagctgggttgactatgtgggttagatagaggtcgtcagccgggttgattgtgtgggttagacagaggtcatcagctgggttgattctgcgggttagatagaggtcatcagctgggttgattgtgtgggttagatagagatcatcagctgggttgattgtgtgggttagatagaggtcatcagctgggttgattgtgtgggttagatagaggtcatcagctgggttgattgtgtgggttagatagaggtcatcagctgggttgattgtgtgggttagatagaggtcatcagctgggttgattgtatgggttagatagaggtcatcagctgggttgattgtacgggttagatagaggtcgtcagccgggttgattccgcaggttagatagaggtcgttagctgggtgtgtgggtcccaaggcgtgctgcagatggagaatcagaattccttgggcatcaccgggcggggcatgtccctgtcccttcgctcccagacccaggctagccgctaccaggactcctatcgagagctcttcagacactttttcagaacccttaaaggtgggtgacgttttcaggaggaacctgggatgtcctgatgctcaatgggtagatgccttccaggctgcagtcagtgcagatgatatgccaatttcaggtggaaaattgcattccagataccgggttcagatttgaaattgtccatctcagtgatcatttacgttgcgtgtacttgagggagattctgagagatgctcctttggggttctgtgcgtgtaccatgttgcctgacacgtcctgagaaatcttcttaaactctgagtttataaaataactacttctgaactcctgagatctagtggataccatgtatcctggaagataggacactttctaccctctgtcagtcctgggggtgactgggaaccagagaggttgagcagaattcctggacctgggtggggcttgtccaagaggggcaggtgggcctctctaggatcagtgtcccacccagaggccagtggccccttcacatgccccaacaagaggaagactgtctggctccgcagtgttgggttttgtcctgaatctgtgcaaatgtgcagggaaataacctcctgaaatcaccaaagagcagttcctcagggccttccgggtgaccgtggccgtggagcagtcgtggtgaaaccggtcagctgtggacctgccctgcgaatcggcagaggcctccgtggtgaagacagaagctccgtgaaccaactcgaggctggagccaagatcctgcctgatatccagttgcctgtttcacttgttactgttactgggagagggagacaaaacctcatggcaatcttgtcctcactggagactcagaaggggaagcattgggaaaccatgtatgtttcatttctggtttaaccaggcttttcaggatgggacttcagaccaaggacacaagttgggcttgcttaggtgttttgtgttgtgcgcaggcctcagagatgctcttccggtcagagttcccttggcagggccttggaggcctctggttggctctctcaggaagagggcaggtcagggattgggcggtgtaaattgactcagaaacctgcggtttcagcttttctgtggcaaacagggccgagggctggtgaagctgttaaggctaaatgtcgcatgcatgaggcgggctgcaggcctccttaggccttttttggggtaattacaccagtatttaaaaacatttttttttgtttgttttgagatggagtcttgccctgtcacccaggctggagtgcaatggtgcgatctcggctcactgcaacctccgtctcccaggttcaagcgattcttctgcctcagccttctgagtagctgggattacacgcgtgtgccaccacgctcggctaatttttgtatttttagtagagatgggatttcaccatgttggccaggctggtctcgaactactgacctcgtgatccacctgccacggcctcccaaagtgctgggattacaggcgtgagccaccatgctcggcctaaaaaacaattttcttgaagaatctgattttgtgcatagtaatgacacagcaccattcctgagaaataggaaatatatgtgtgtggtatgaaaagcccatattctgttcttgtcacctgaatctaggcttcctctttggatgtgaacgcgggaatgaacagtggctgttttccacccaaaggggcgtggagaccttttggaaacgggctttctcctttccattttgcagccgggggcgggtggaaaccttccttcgaagggtagtgccttggggagcagcagacctgctctgagtccagcttagctttccaaaattctgtgtggaacttactggagatgtttttatatatttgaaaataatggcctgtatttctcacgctatacttaaaaaaaataactaaccttttaaacaaagatattcaaactcacccttgtgctgaaagcactcacatttctgtgttcattcctgaaagggcgttttagagtccccgtttctacgttctatgtggcaccctcttgccgagggaacatccagaatccctccacttcctgtctagtttgaggcctcaacaccttcatgatccagagtcctgcggctatgagggggtgggcccaccaccgcccagccctccttggtggacgtggggacaggtaggagcctagggaaaggggtgggcgggctctggtgtgacggcgtgagcgctagccaggaaggtggggccagggctgggcatggcacctcacctgtgggggaactcggcggagcttcctggcggcatctccccctcttgccttggtcctttctatctttgttttaggccaatttctaaaaagactgaggcctccttcaaggttgaacagatttctagagccttgtttttgctgtgacaagtccctagtccctgttcacaactctgaaaccaagaaacctgagaaccaagagaactgaaatgaagcccgttggtctcagcctggcttgagccaacatgaggctctctgctgccttttgttttcttaggttttgctgagaaacgggagtgcgttctgtgtcggtgtttgtgacgccctgagaccctgcttggcctagctaaagtccagaaggcctgggccccacagggcttggatgagggctcatgggcctgtacttcaggaggcctgagaggcccggtcagtcccatgaggctactcggcttggcccgcaggtcctccgaggcacagggcagagggacaccccagggacccatcagactcacgacacagagaaactcaagtggggtgccagggccggccacagaggccacgggcttcctgcctgtgacgagccgccctgtttgtctgagccctttggagatttaggttgagtcatgagaaccggtcattggaacatacactttattatgttacaaaaacaaaaatccccactgaaacacagctaaaaaaataacacattttcccaagattacattaccaaaaacagttgttatgtcattggagggcgtccattaatactgctcggagaagcacgatcttacacgaaaaacacggatgggatttcgttttcaccttaaagcattaaagtgctttaactggt

SEQ ID NO: 22312 - DNA, 6151 bp, Homo Sapiens
cgacctctgtcaagggcctgtgggtccctgacccctgggtgagcgagggcactgctcccatgggcctgggcactgtgccatcctccagtgggaaacaggaggtccccagggtctgagagaaccatgcagtccaggtgtgaaaggggtcctacaaggtcagctgaccatagagaccttgggaccaccaggaaatcgtgggggccctcagccaggggatggggtcagggctccttgagcctgttccgcccatctagctcccctttaaccccagggaagaagtagctcaggtggagaccctgggtctgcatgggggtcacgtgagctgcctgtagccagcaggggggagggctgggtgctgtcctgaggatgcaggtgcaaatggccatttctgggccacctgtgtgtatcagcatctgcagaggggcctggggtctggctcctggggttggcagccccaggggctctgccatggctgcccaaggtggtgatatttcctgtctgcctgttgggtgtggggcagtgccaccctgtcccatcccacctcatcagcacagaatgaagctggtcctatactcatcacctgtgcacatgaggaaactgaggccccaagaggggagcccaaggtcatattactggggatctgtgggctggcgtctgagcccagcactgtggcttcaagcccacatctgccctaggagggcccaggaggccctgtgatgtcattcccccgtgatgtcattcccccatgacatcattcccctgtgatgtcatacatgtgacgtcattcccgtgctgtcaccacatgatgtcatcccctgtggtatcacctctgtgatgtcaatacctcttttaatgtcatccccatggtgtcattccccccatgatgccatccccccatgatgtcagtcccccatgatgtcaatttcccacaatgtcttcccctgtaatgtcaatactccctttgatgtcatccccgtaatgtcatcccctgtgatgtcattccctcatgatgccagtgtgatgtcatctctgtgatgtcattccgtgatgtcaccccccatgatgcaattcccctgcaatgtcatgcccctgtgatgtcatcccccggtgatgtcatccccccatgtgatgccagtctcccatgatgtcccccctgtgatgtcattcatgtgacatcatcccgtgatatcattcccgtgatgtctcccccatgatgtcattccccatgtgatgtcaatttcccacgatgtcacccctctgacatcatcctctgtgatgtctcgcccatgatgtcatcccccatggcgtcattcttggtcgtggggggttgtggatcccctcctctcccctcccttggggtcttcctggctggtggggagaggtggcctggcctgggtgccacagcagctgctctggaaggtgcccgggctcttgggggccttggcccacgccatcccctggactgtgcggcgccctccagggcccagcttctgttgggtgttgggcacaagtcagaatcaagtgcatctggccagatgctgccagggccaaggatgcagctgcctgtggcctggccttggtgtagagccagagtcttgagcaggggctgaggggacccagatggtggggaggctccggagcatgtgaccagggaccgtcctgctgtggacagacctcctgggctgagtgttggtcgggaccgggccatgcacctagagatgtcctttgaccagtggggagggtctgggggtgagtgtggctgtgtcccttggctactgggccagtgtagtccagggcactctagggactccctgtgttctgacttgaatggagctattggggctgaaggggcaatggccctgtgtctcctcggagcttgcaggtcctcttggaggcccagagagagccagaggagggcagggtcactgctgcctcctcatggtatggaattgactgagcccatgctgggatctggaggccccaaaggaatgaggcctgtggccaggggccggcccaggagctggggtggctttcgggggagaggcccgcagtgctgggaggtaagtggtgatgtgcttggcagcctcagtgctcccttaggagggtctaggaccccacctcgaatcttcctgggctatgcagagccaggaagagaggccaggtggccttggtgggtggcattagatgctccagccctgcctggaactcccttgggggtcgggccacagccaagaagagtgctgttttgcctgtgctaaggccactgtacgtgcagagctggacccagaacctcgtccaaggcccccggcagtctcaccaggaggtgtttagagctggccacgtggagtggcatacctccggggggcgggggggctgtgagagggcagtggtgtgggcccttggtctgtgcctcccacaggacagctgcttcaatagcatctgtgccccctcctgcctgtagtccacccaccactgacccctggacttggctggcggattttcacaccttctcctgggggcaggtctcagcttgtccccaacccagtcagagccagtctcactccctgcctcaggcaactgtgtatgttttaatttttatttatttatgtattcatgagatagagtctcactctgtctcccaggctggagtgtagtggcaccatttcggctcactgcaacctccgcctcccgggttcgagccattctcctgcctcagcctcctgagaagctgagattacaggcgctcgccaccatgcatggctaatttttgtatttttagtagagatggggtttcaccatgttggccaggctggtcatgaactcctaacctcaggtgacctgcctgcctcggccttccaaagtgctgggattacaggcatgagccaccgcctgtaattttaatttttaaccaaactgagaacttgaggattgaatgcaggtaacgggtggtgttcatgtggatgtggattccatgaaagagggctttgtcctcactgtcggttctccacatgtaggtcctttgactcagcaggccttaggcctagtccacaggtgctgagtgaacagccccagcgtctgacagctccttagcttggggtgcacaggcagctgaagcagtaggatggcagctcagacttcccagggccccacgtgtgcagggctggcctcccagcaccaccaggcagggccggcctcccagcgccaccaggcagggccctgtgagtgtcccctccctgacacacaccttgtagagaggctgggcctgggcaggctgctctgctgcaccacatcccattctcaagagggtcccaggtcccaaaggaagcctgtagcccagtggctttctggaggtttgcatggctggcaagcctgggccggctgctggagaggcatcaggacaggagcaactctgctgactgctcccctcagcgagctctaagagtctttgggtgggaggcacatcacatccctgtcactcctggctggccctggaatgcctcagcccacacaccccactccagccagggctgtgggaactgtgtctgctcaggtacaaaaggctttgtttgttcttggacctcttggttctggtctgggcttcccacctcccatgctgtgagcccccacgggctgggaccgcagcttgccatgtgtctctcagtggcaccaagtggacgctcgaggcttatgttgagggagtgagagccaggataggccactgggcgtgctgggagcccacacaggcagggagcccagcgggaggtgccctgctcctgccagccccggttaccccagcaggctcggcacccactcagagcccccatttctgctccccaggcactccctgtgtgcctacctgcccttgtccttgtcctgggccagcttggctcctgcctcccagctctgaggaggcctctgcaggtagccgacctccctggacgagggggcagctgcctcctctcacctgggctcaccctgagccaagtcctctcaacccaggataaatggcctttctgaaggcccagagagcatgcctgccccagtgtgggagctgcatccgctccccacctgacagtgatggccaagagcccagtgttcctggagggctcccaaactctggacctgtaggggggtcagggcagtcgctggtccctaagggaaaagcgtgaccctcggccccaggtggctgaacccgtcactgccagggcgagctgtcacctctgtgagctgataaggccttgcttttaggacctctaatctctgcaagaacccaagctggctctgcctgtttctcctgagcagctcgcagtgttcaccacactccagcacgactcgggacaggcacgtgcgcccctctgcaccagctggagtccctcaggacacctggctggagctgatgggcatgggcgggtgtgtgcgagcatgagcccgcaggtctgtgagcttcgtctccctttccttcttcgcagtgtactaatggtcacttgatgtgcgctggctgttttatccacctactagcagatgcccggctgaaggaggagcaggccacgtgccccaattgtcgttgtgagatcagtaagagcctctgctgccggaacctggccgtggagaaagccgtgagcgagctgccttcagagtgtggcttctgcctgcgccagtttccccgctccctcctggagaggcaccagaaagaggaatgccaggacagggtaacccagtgcaagtacaaacgcatcggctgcccatggcacggccccttccatgagctgacggtgcacgaggctgcgtgcgcccacccgaccaagacaggcagtgagctgatggagatcctggatgggatggaccagagccaccgcaaggagatgcagctgtacaacagcatcttcagcctgctcagcttcgagaagattggctacacaggtgaggcgccccgccgcctgctgcatgccacacaggtgtgggttggggggctggcagccaggagtctgggggcagcaggctctgggcactgggcactgacagcgccggacagccgggctctggacaagctcccggtggacaggtggacacctcggtcgagaagacaggccggagactgagtggaaggaggggccgaggcagaccccaggtgcacacctgtgtggctctcacagcagccccgcccacctgtcctcgccaccctggcttcaccacccctgcaagtggcatctcactgtggggctccagagcctcaagacagtcacggtctaaccagaaagtgggcaggtctcagggggcctgggagctaggggcctgcccctcggaccctggggcaagaagagcaccctgccgagtgaggtcctacctgcaggcagtcactgccccggccatgggcctctcaaggctggcacgaagccattcagggagagggctccacaacaagctgagggtgcccgactcaaactgtagaaccgggagtggacacccacagacgcccaggctggatgcgtgcgcaggcacactggatctcgtggctctctgggccgctgccaccgcctttgaacgtgtcggggagcaggagccaggccagagtctggcccagaggacagcgagaagcacctgttgatgctggggccactggaggaagctccatccctctactctcagcccgcaccaggcggccagctcagagcaccaggcgtggcgcaagcagggtggtcgtgggcagccagtcccgccctgctgcctggactgtgcccagcgggatgtgggcccgagcaggccagagaggccgagggcctggggtctctgcggcagccacagcccgtggtgagtagcagccttagctgtcctggagataccggggcctcgtggagtctaggcaggctggggcactgtggctgtggccgtggccaggtgagaagccccattcgcgcaggaaagactggccacctgggaacccacgcctccacggagggacttgccggccacaggctgtgggctgcccaagaggactgtgcaggcagggctgcctgctgattggcagctccggatcaggcccggtgcctgcagacctggtgctcccctcgggcagggctgggtgccgcagccgcctgctggcttttctggcagctcctctgtatcagaaccaataaagtgcacttgttctcgg

SEQ ID NO: 22313 - DNA, 2076 bp, Homo Sapiens
agacagttttgaagttttcaaagactggctctgctgttaagaagttgtacttaaagcggaggagctaagccacctgccaaaatgtgcaaaggacttgcagctttgccccactcatgcctggaaagggccaaggagattaagatcaagttgggaattctcctccagaagccagactcagttggtgaccttgtcattccgtacaatgagaagccagagaaaccagccaagacccagaaaacctcgctggacgaggccctgcagtggcgtgattccctggacaaactcctgcagaacaactatggacttgccagtttcaaaagtttcctgaagtctgaattcagtgaggaaaaccttgagttctggattgcctgtgaggattacaagaagatcaagtcccctgccaagatggctgagaaggcaaagcaaatttatgaagaattcattcaaacggaggctcctaaagaggtgaatattgaccacttcactaaggacatcacaatgaagaacctggtggaaccttccctgagcagctttgacatggcccagaaaagaatccatgccctgatggaaaaggattctctgcctcgctttgtgcgctctgagttttatcaggagttaatcaagtagtaatttagccaggctatgaaatcatcctgtgagttatttcctccataataaccctgcatttcccattaatctacatatcttcccacagcagctttgctcagtgatacccacatgggaaaaatcccaggggatgttgcttactctttttgcccacactgctttggatacttatctactgtccgaaggccttctttccccactcaattcttcctgccctgttattaattaagatatcttcagcttgtagtcagacccaatcagaatcacagaaaaatcctgcctaaggcaaagaaatataagacaagactatgatatcaatgaatgtgggttaagtaatagatttccagctaaattggtctaaaaaagaatattaagtgtggacagacctatttcaaaggagcttaattgatctcacttgttttagttctgatccagggagatcacccctctaattatttctgaacttggttaataaaagtttataagatttttatgaagcagccactgtatgatattttaagcaaatatgttatttaaaatattgatccttcccttggaccaccttcatgttagttgggtattataaataagagatacaaccatgaatatattatgtttatacaaaatcaatctgaacacaattcataaagatttctcttttataccttcctcactggccccctccacctgcccatagtcaccaaattctgttttaaatcaatgacctaagatcaacaatgaagtattttataaatgtatttatgctgctagactgtgggtcaaatgtttccattttcaaattatttagaattcttatgagtttaaaatttgtaaatttctaaatccaatcatgtaaaatgaaactgttgctccattggagtagtctcccacctaaatatcaagatggctatatgctaaaaagagaaaatatggtcaagtctaaaatggctaattgtcctatgatgctattatcatagactaatgacatttatcttcaaaacaccaaattgtctttagaaaaattaatgtgattacaggtagaggccttctaggtgagacacttttaaggtacactgcattttgcagaaaaaaaaaaaaaaaagtaatcttttagcaaccccagtattccttcactatttcgcttcctgcattagcaaattttacttacagtcaaaagtgcagatttatactcctgacgtgtctcattcacagctaaataataggccataggacttttggtaggtttaaacttttaattctgtatttcatgattataagtcttgctagaattttttctaatctttagtagatttgattaaataatgattcacagaatttagtaacagaatcaaactaagccatgtatgagggtaatcgagatgaggatattaactcaaaagaaatagggtgatttttaaaggattaataaaattctgaaatgttaagtag

SEQ ID NO: 22314 - DNA, 4351 bp, Homo Sapiens
gtcgacccacgcgtccgcccacgcgtccgcccacgcgtccgcgaacccagagcgacgctccgggacgatgtggggcagcgatcgcctggcgggtgctgggggaggcggggcggcagtgactgtggccttcaccaacgctcgcgactgcttcctccacctgccgcggcgtctcgtggcccagctgcatctgctgcagaatcaagctatagaagtggtctggagtcaccagcctgcattcttgagctgggtggaaggcaggcattttagtgatcaaggtgaaaatgtggctgaaattaacagacaagttggtcaaaaacttggactctcaaatgggggacaggtatttctcaagccatgttcccatgtggtatcttgtcaacaagttgaggtggaacccctctcagcagatgattgggagatactggagctgcatgctgtttcccttgaacaacatcttctagatcaaattcgaatagtttttccaaaagccatttttcctgtttgggttgatcaacaaacgtacatatttatccaaattgttgcactaataccagctgcctcttatggaaggctggaaactgacaccaaactccttattcagccaaagacacgccgagccaaagagaatacattttcaaaagctgatgctgaatataaaaaacttcatagttatggaagagaccagaaaggaatgatgaaagaacttcaaaccaagcaacttcagtcaaatactgtgggaatcactgaatctaatgaaaacgagtcagagattccagttgactcatcatcagtagcaagtttatggactatgataggaagcattttttcctttcaatctgagaagaaacaagagacatcttggggtttaactgaaatcaatgcattcaaaaatatgcagtcaaaggttgttcctctagacaatattttcagagtatgcaaatctcaacctcctagtatatataacgcgtcagcaacctctgtttttcataaacactgtgccattcatgtatttccatgggaccaggaatattttgatgtagagcccagctttactgtgacatatggaaagctagttaagctactttctccaaagcaacagcaaagtaaaacaaaacaaaatgtgttatcacctgaaaaagagaagcagatgtcagagccactagatcaaaaaaaaattaggtcagatcataatgaagaagatgagaaggcctgtgtgctacaagtagtctggaatggacttgaagaattgaacaatgccatcaaatataccaaaaatgtagaagttctccatcttgggaaagtctggattccagatgacctgaggaagagactaaatatagaaatgcatgccgtagtcaggataactccagtggaagttacccctaaaattccaagatctctaaagttacaacctagagagaatttacctaaagacataagtgaagaagacataaaaactgtattttattcatggctacagcagtctactaccaccatgcttcctttggtaatatcagaggaagaatttattaagctggaaactaaagatggactgaaggaattttctctgagtatagttcattcttgggaaaaagaaaaagataaaaatatttttctgttgagtcccaatttgctgcagaagactacaatacaagtccttctagatcctatggtaaaagaagaaaacagtgaggaaattgactttattcttccttttttaaagctgagctctttgggaggagtgaattccttaggcgtatcctccttggagcacatcactcacagcctcctgggacgccctttgtctcggcagctgatgtctcttgttgcaggacttaggaatggagctcttttactcacaggaggaaagggaagtggaaaatcaactttagccaaagcaatctgtaaagaagcatttgacaaactggatgcccatgtggagagagttgactgtaaagctttacgaggaaaaaggcttgaaaacatacaaaaaaccctagaggtggctttctcagaggcagtgtggatgcagccatctgttgtcctgctggatgaccttgacctcattgctggactgcctgctgtcccggaacatgagcacagtcctgatgcggtgcagagccagcggcttgctcatgctttgaatgatatgataaaagagtttatctccatgggaagtttggttgcactgattgccacaagtcagtctcagcaatctctacatcctttacttgtttctgctcaaggagttcacatatttcagtgcgtccaacacattcagcctcctaatcaggaacaaagatgtgaaattctgtgtaatgtaataaaaaataaattggactgtgatataaacaagttcaccgatcttgacctgcagcatgtagctaaagaaactggagggtttgtggctagagattttacagtacttgtggatcgagccatacattctcgactctctcgtcagagtatatccaccagagaaaaattagttttaacaacattggacttccaaaaggctctccgcggatttcttcctgcgtctttgcgaagtgtcaacctgcataaacctagagacctgggttgggacaagattggtgggttacatgaagttaggcagatactcatggatactatccagttacctgccaagtatccagaattatttgcaaacttgcccatacgacaaagaacaggaatactgttgtatggtccgcctggaacaggaaaaaccttactagctggggtaattgcacgagagagtagaatgaattttataagtgtcaaggggccagagttactcagcaaatacattggagcaagtgaacaagctgttcgggatatttttattagagcacaggctgcaaagccctgcattcttttctttgatgaatttgaatccattgctcctcggcggggtcatgataatacaggagttacagaccgagtagttaaccagttgctgactcagttggatggagtagaaggcttacagggtgtttatgtattggctgctactagtcgccctgacttgattgaccctgccctgcttaggcctggtcgactagataaatgtgtatactgtcctcctcctgatcaggtgtcacgtcttgaaattttaaatgtcctcagtgactctctacctctggcagatgatgttgaccttcagcatgtagcatcagtaactgactcctttactggagctgatctgaaagctttactttacaatgcccaattggaggccttacatggaatgctgctctcgagtggactccaggatggaagttccagctctgatagtgacctaagtctgtcttcaatggtctttcttaaccatagcagtggctctgacgattcagctggagatggagaatgtggcttagatcagtcccttgtttctttagagatgtccgagatccttccagatgaatcaaaattcaatatgtaccggctctactttggaagctcttatgaatcagaacttggaaatggaacctcttctgatttgagctcacaatgtctctctgcaccaagctccatgactcaggatttgcctggagttcctgggaaagaccagttgttttcacagcctccagtgttaaggacagcttcacaagagggttgccaagaacttacacaagaacaaagagatcaactgagggcagatatcagtattatcaaaggcagataccggagccaaagtggagaggacgaatccatgaaccaaccaggaccaatcaaaaccagactggctattagtcagtcacatttaatgactgcacttggtcacacaagaccatccattagtgaagatgactggaagaattttgctgagctatatgaaagctttcaaaatccaaagaggagaaaaaatcaaagtggaacaatgtttcgacctggacagaaagtaactttagcataaaatatacttctttttgatttggttctgttaagttttttgatggcttttccatatgttgtaacaggaaaaaaatggtgtctatgaatttcttcttaatttaacaaatttggttaatttataaaatcacagattggtaaatgctataattatgtaatgatcaggattgagattaatactgtagtataaattgggacattataacagattccatattttatttcctaaaatctaaattcagtctttaatgaaataatattagccaaatggtggaacttaatttatttcttttgaggaaaagataataaagaatgtaattaaatttaaatttcttggaattcccagttgtatattcatcacctttgtagcatttgacaaattttatgcttagcagcttcttcactgttttgaaataaaatatcctattacctactg

SEQ ID NO: 22315 - DNA, 10902 bp, Homo Sapiens
gatcaccctgccagtcttttgtcttgggcaatctatacttttctcagaggttcccaaggcctactgaagggacttaacatactcttaatggctttcctctctcttgttttaccttatgccctcacttcctgagttaacctcccaaatacaggatcacctgtacccaagcccttagctcaagctctgctttggaagaacccaaactaagacagtgctcctggtgccctccccaagcaacctcaagttctggctgttacttgagcagaggcctttctttttccttcccccagctctatccatctgccaggcacccctcaaatctcttcatttccaagttttgcttgacttttccaagaggagagggctgcttcttagtatgtccctactcatcctttcctttcttgtcttgtatcctggtgcagcctggtaatggggcctcttcatggttgtgtgtcatgactccctaaccattatgcctccatgcatcccctgttcctcctggaacctagcaccatgccttacatggaaaagctgtcattgacagcccggtgagagccctgagggtggagtgactggggcagggcctgaggcaagaggtgggaggaggtaggaggccaggggctcagccggaccaggagactggaaacaggcaaggataaggcaggtgggggactgagttgtttgggtcacctctgcaggccagagagaccaggcaacatacacactgcagaaggtgggctgggaggattggggccagagctgggggagggatgagaacagaagcaggaccaggattcagcagagtcctcctatttccttccaccaccagggaatcttactgccccacttcagcttgtgctgtttcctggcaaggcaggctctcacatgcctggacgcctgggtgcgttggtgatgggaaggagcagggtgagggaggggccccaggagaggcccaggatgagcctcatcttgtccctccccattcttgtcttaccctctgcaaatgtgataggcacaggacaggagtaggcacctcgcctactgctgcttaacctttcagcttctccaggcccccaatcctgcttgctcccagcttggtaagtagatctgtgcacgtccctttacaccccaccatccagttttgcccagatgtgctagaatggggctggacaaagaaggaggggccagactagaggagtggtggtagagatagtgacagcctggggtgaggactttatgcctgtttaccactgagctctgggaaggaggccaggagtggggcaggtcaactgactgggagcaggggatctgggttccaagaaggagttgtgtttgaggtggggtctgggtcctcgtggaagtcaggactcccaggcagaaaagaggcaggctgcagggaagtaaggaggaggcatggcaccttctcatcgggcatcacaggtggggttttgccccacccctgaacgccctctgtggcgccttccacccacctgtaggcccagaaggatgtcggtctgctaccgtcccccagggaacgagacactgctgagctggaagacttcgcgggccacaggcacagccttcctgctgctggcggcgctgctggggctgcctggcaacggcttcgtggtgtggagcttggcgggctggcggcctgcacgggggcgaccgctggcggccacgcttgtgctgcacctggcgctggccgacggcgcggtgctgctgctcacgccgctctttgtggccttcctgacccggcaggcctggccgctgggccaggcgggctgcaaggcggtgtactacgtgtgcgcgctcagcatgtacgccagcgtgctgctcaccggcctgctcagcctgcagcgctgcctcgcagtcacccgccccttcctggcgcctcggctgcgcagcccggccctggcccgccgcctgctgctggcggtctggctggccgccctgttgctcgccgtcccggccgccgtctaccgccacctgtggagggaccgcgtatgccagctgtgccacccgtcgccggtccacgccgccgcccacctgagcctggagactctgaccgctttcgtgcttcctttcgggctgatgctcggctgctacagcgtgacgctggcacggctgcggggcgcccgctggggctccgggcggcacggggcgcgggtgggccggctggtgagcgccatcgtgcttgccttcggcttgctctgggccccctaccacgcagtcaaccttctgcaggcggtcgcagcgctggctccaccggaaggggccttggcgaagctgggcggagccggccaggcggcgcgagcgggaactacggccttggccttcttcagttctagcgtcaacccggtgctctacgtcttcaccgctggagatctgctgccccgggcaggtccccgtttcctcacgcggctcttcgaaggctctggggaggcccgagggggcggccgctctagggaagggaccatggagctccgaactacccctcagctgaaagtggtggggcagggccgcggcaatggagacccggggggtgggatggagaaggacggtccggaatgggacctttgacagcagaccctacaacctgctgcccttccctgtccctttccaccccccacccaccctccagaggtcagtgttctgggacatttggggacccttctttgactagagtttggatctggctgggtaggattactatacacttggggcaggcccaggctcctccaaactgagggattatgagggtggtgatggtccctgttaaggactattgtgtgcttgcaagttggcatgtacccatgtgccagcattgcttacttgttgccaatagctgttattgtgaaatacactgggaagccattagatgatgacttaagtgtgcttcccctggtggttcttcatgcctgagttgtactgaagccacctagttccctgctgggtcaagccaggctgggcagtgccagccttcagtggcatcttgacctgccctcctcagcccaggtgccctggttccacaggccaacccatagaaccactctggaaataaaggagaaaatggaaggagaggtatgggagcttggatgaggggtaggaatgggatccattctctgaggcttataaaagcctctgaggaggaaatggctctgaaggggaaaatgaatctgtggggtttgaaaaggaagttttcctgcctgtcttgtatttggtccagtgagtatgagacaggcacacaaggagtggacagtggtgtaggggccctgggagtctgagacttaccttgccccctgaccatctgatcctccctgcaaaggccacctgacgtgaaaaggagccaggagcaagcactcagtcagggaagtttggaggttggccattggggtatgaggaatggcaggaatatttagaggacaggaataatttttcagagaagtgccacatattctttttctctttgccaagtctgggctccttctaagatgctgctagctattcctagcccgttccccaatacttctctgcccccaccttttggaatccttatctaggtctaaaaacggttctagatcctgacccctttgattgggggatgtagaatgggattcttttcaggggacatccacaagtacacatctgtggtcactaaggtgaccagctcatcccagttggcctggaactttcccagtttaagcactgaaaactccttgtcccagccctgccggtttcccaacaaactgagatggttggccgctcaagtggctaccctgaccatcaccccaggctctactttagcgactgctcacacctccctgcttcccagacagaagtcaaaacagcaaaagaaacccagtccccagggtcatgctagggctaccaaaactgggatgaactagcacctgtgaactagaacagcagggagtatgcttagagtgcctggtcctgggtgtggggaagaaaggccatcaaggtagatgcgggtggggaacagcttgagagaggaggcaaggacaacccagtttctgtctgaaggggcctctggttgaccctggagtttctgtccccaaacacaggcctcacgggattctttctgtcctcatgcactgggcagaggttccttaacttcctttgttgcacattgccattctctcacatcccgtgcggtcaggaagcccttcctgaactctgacttcagttcttgctgcggtttctgcccatttttttcatatcctctgacagctgcgaggtcatctctgctctggcttttctccaagcagaacaagtgggggctctggaaaggttaagggacctcagtggccaccattatactttgcatctttcctgagaagtgagagttgaaagggaagcaggaaggcccatggtcagattgaaggaaggactttttagtttcttttttttttttttgagatggagtctcgctctgtcattcaggctggagtgcagtggtgcgatctcagctcactgcagcctccacttcctgggttcacatgattctcctgcctcagcctcccaagtagctgagactacaggcacatgccactacacccagctatcttttgtatttttagtagagacggggtttcaccatgttggccaggctggtctcaaactgctaacatcaagtgatctgctcccctcagcctcccaaagtgctgggattaccggtatgaaccaccacaacctgccaggaatttttagtttttagcttttgcaggagacttcaaggaaaggagacattcctctgtccaggaaacgggtaaggggaccatttctgcattgctggtttcccctcttggcagggtgggcatgaggcatcactgttcctgctccctcactcctgctcctcatgctcagcctgccagctcggcctcaactttgtgtgtctaaagtggaactgaatagtaggctgtgagaagataggaaagaggtagtgccaatctccttgcccagatcataaatccagactcagcagggtaaccacatgggcaagcacaaggtaggtgcttggcgaaaggggaagtaattggcattctgtgtgataccaaggagaccatttggattttggcttctaccaaagagaatggagaattggttgacctaaatggaaccagtccctttaagtaaggggaggaaagggggtgctggaagatggccctcttcccaccacctagatcatagcttgaactgaagccaaggacagagtgctgcccccttcggcatttactgatgtgccctctttaaatcatgatgttatctaacccaaacccagacccaggacctagtcacagctccaacctacacttcctattaatcttaaaacaaagcaaaacaaaacaaaaagatatcagcattgtagcctccaatctgagcccatttcccttctctggctaccatacctccttctcctatatgataccattcactactttgttcaattatccagtctagacctgcatcttgaggccacacccagccttctcactccccacacccctctttcctctctcactgctccttcctggtctcttctcatctggccccacctctaaggagtcctcctgccttctgggttgccctggaaaacagactatcccccctcctagtgaagggagtgggtaggggtttcagccccaccctcaggaagatgcgtcttccctgtcctctgctctgtggtacttcctctctggctgatttagcaaacagcacctagacctggggccaggcctttggcagtgggacagatccagggataggctacaccaccctgccctgaccctgggattggcatcagcttccaaccagttcctgccaaagcttgtaagtaagtttcctgggagcggccgtggttgtggtggtggtgggacagtgtgcagccatgaaagaaggtgcaaaggaatctccaaagaaagcctgaccagcgtaaaaagttgggaggctttgtccttgtcacttgtccactaaactcctcccctccctgttattcctggttgaccctgggcatctctggggacagtaggcaggtgattgggaaagttaatgggattgaggggctgagggcctggcagggggcaaaaagactggcctttcaaggggtgcagcattggtaggaactctgtttggttctgggctttagggtctcctaaggggaggagactgaaaaggtctggaaatgctgctgctgctgtggtcactgtatattttgcaattgggtctgtggacaggaaggggccgcatgacccagttaggaaactagtctttgtactcaaccagatccctttaagttgtcagtctgcagcgatgggggcagtatatttcagggggacctctgatgctgctgaccctggagatagactagagttctcagcctaggtgtgtccatggcgtcaggaaacccttggtcctctactctcatgcgtgtgtccgccctcactctccaggtcctcccgacggccatgaacactacatcttctgcagcacccccctcactaggtgtagagttcatctctctgctggctatcatcctgctgtcagtggcgctggctgtggggcttcccggcaacagctttgtggtgtggagtatcctgaaaaggatgcagaagcgctctgtcactgccctgatggtgctgaacctggccctggccgacctggccgtattgctcactgctccctttttccttcacttcctggcccaaggcacctggagttttggactggctggttgccgcctgtgtcactatgtctgcggagtcagcatgtacgccagcgtcctgcttatcacggccatgagtctagaccgctcactggcggtggcccgcccctttgtgtcccagaagctacgcaccaaggcgatggcccggcgggtgctggcaggcatctgggtgttgtcctttctgctggccacacccgtcctcgcgtaccgcacagtagtgccctggaaaacgaacatgagcctgtgcttcccgcggtaccccagcgaagggcaccgggccttccatctaatcttcgaggctgtcacgggcttcctgctgcccttcctggctgtggtggccagctactcggacatagggcgtcggctacaggcccggcgcttccgccgcagccgccgcaccggccgcctggtggtgctcatcatcctgaccttcgccgccttctggctgccctaccacgtggtgaacctggctgaggcgggccgcgcgctggccggccaggccgccgggttagggctcgtggggaagcggctgagcctggcccgcaacgtgctcatcgcactcgccttcctgagcagcagcgtgaaccccgtgctgtacgcgtgcgccggcggcggcctgctgcgctcggcgggcgtgggcttcgtcgccaagctgctggagggcacgggctccgaggcgtccagcacgcgccgcgggggcagcctgggccagaccgctaggagcggccccgccgctctggagcccggcccttccgagagcctcactgcctccagccctctcaagttaaacgaactgaactaggcctggtggaaggaggcgcactttcctcctggcagaatgctagctctgagccagttcagtacctggaggaggagcaggggcgtggagggcgtggagggcgtgggagcgtgggaggcgggagtggagtggaagaagagggagaggtggagcaaagtgagggccgagtgagagcgtgctccagcctggctcccacaggcagctttaaccattaaaactgaagtctgaaatttggtcaaccttgtgagtggggtacatgtgctgtgggtatcggggtgctcgtgggcgccctggtggggcccctctcggtagttgagagtcacgtcctttagttccccatgatttacaattttggaagggacacaaagaaacatagacttcccccatcccagatgattccgagtacatagtctgcagataatacttagcaaaacgcagtctacagactcctaaagcagcttgtctaggaagaccacccatgtgggcttatcactccaggttctgtgacccgggaccttctgagaaaacagcactgctgtgaaatatcttccttgaagcctgtgataagtctccttgttagaatgactccaacttcctgccaataatctttgtcctctccataggagatgttctaggggatgccttccttccctccatttcacaaagaggccagacttgaggactaagtcattagatcttatcccttagaattttgcatatcagcatctgctaacctccacaacacaccctggcacagggtggggctgagggccccaggaaacaaagattcccaaaagtgagagggatgagtcattatttcctagagatgactgttgttttagagaaccttggtccaactctgttctgacaaggttttaggaagatggcaacaacagtggcagcagtgtactttttggatctttctcataaaaaaacaaaagagcaagtaagagagggaaaccaaatatccacatgcaacatccgcaacaaatctagtatgtcaaggtttgacatactcccatggaccccaaagtatgagccagtgagaatgagtcatcaatatctcaagacccatataccagcatctgtgcagaaggatgcagaaggaagcaaagggatgttggatggacctaagaagaggagatccccaagctgtctacagatccttactggaaggtatggtgcaccaatttgagaacagcagctgaaactgggagggacctaacggagtatttcccagtcctctcgcccattctgtatggtgagcacataataggtacttatttagtgtttgtcgaattaataaagttcaaatgacatttccctggagattcttccggtatttttgagtagggggcaggaaagggcaaatttttgttttgagtcatgtggctaaattctttatgcttccaaggtgtacaaaatactataatcaagttggcagagaggctgagggagttctcttcctgagcttgtgaaaaaaatcactccctttcaaaatgcttagtctcacatgcatgcatgtgtgcaggcatgtgcacacacattcacacacacactcgcactaaaattggcctgggaagaagaagaattcccactgaagggcaatgagaaggtgatccccagctatatcagcagcttcagacatcaatgggctccagacaccccagagtctctttattgaggttcttagaaggcgagtgcaatctcagcctagggtagctgaaggaggtccagttcgtgtcaagtctgtgttcaggaagtaggtgcagagctgccctttgcctttcaccttgatgacaccccggctgtagcaggtgtagcccagggactgtagggcccatgctgtctcctcagtcacctacaattggaggggggcgagggaatatggaggtggccctattcttagtccccctccccctatgcctccaatgtggttccctcacttggattttgccaaggactcctgtactctccatgcggctggccacgttcactgtgttgccccaaatgtcatattgcggcttctgggccccaataactccagctactacgggtccatggttcaaccctaatgagggatgtggtaatgacagacttggagaaggaagaggggaagaggaagccacaaggaactggaaggaagggagaagagcctggggggccctagaggagaggaggggtctctaagggctggaggaatgtagcttaagaaaaagagtgggagagcctcgtacctccttgcccagcaccttcacaccccatcccagggagtgagtcaggaaaggggcttcaggatgaactgggagcagctaacaaaggacttggagtggggcaagctcaggaaggtgaggaggtaccagactgctgcagcaggggaagtctctcacccactcgcaggcggaagttgttgaatgaatgcttgttgatgacgtccagcttagaccccagggccacggcaaattccaccatagtgccaaggtggctgcagctccgttcagcatcctggcaatgggcccgcccaccagggtgggccagtgagggcacaggaataagtcccactaataagcccatcaatgagagcccagaggaggatggtaggtaaggaagggttgccgtacctgttgtgcatcctgtccagaggtggcatttaagcctgtggctgccatgtaggtgctgccgatggtcttgatcttctccaccccactgaacttgggcttggagagcagctgtatatagagaagagtcctgtccccagtctctcttactctctccatcacctctcccagaagcccagccccaagcctttggagttaaaggatcaggctgtgggagtggagatagtgtcaggaaggagagggttggtggtgggcagtgttgctggagtgggtagatctgggggatcagaggaggtgagggagtactgtggaggggaggattgacttcatggccagaaaagcaaagtggaaggaggtactggtggaaaattctagaatctaggacatagggtctgggagactcttggaattttcacctcatcaaaatcagcaattatctcattgagcagcctcagacactctaggccctcatgattgatgttggattcagagtagaactccttgaagtctgggactgaggcgaagaggacacaaacgcattcataggactggtggtagagatcctgggggaacaggagactggagtgaggggtgtgtgtcatgttcctctcccttctagaggtctgcgtggggccctcctccccatgtccacactcctggtctccctgtttaagaagaattgggaaggagggagaggagtagggccaggctaccccagggaagtgacttaggagtcaaagctt

SEQ ID NO: 22316 - DNA, 7349 bp, Homo Sapiens
gctgcagcctgctgttgagtgagaaaacaaaattatcttcctttccaaatccaaaaagatgaaaacgactgagatactttcaaaagacaaccaagtgagcagcacagactaatgagtagaatcaataagaacgtggttttggcccttttaacgctgacaagttctgcatttctgctgtttcagttgtactactacaagcactatttatcaacaaagaatggagctggtttgtcaaaatccaaaggaagccgaattggatttgatagcacacagtggcgtgcagttaaaaaatttattatgttaacatccaaccaaaatgtaccagtgtttcttattgatcctttgatactggaattgattaataagaactttgaacaagtcaaaaatacttctcatggctctacttcacaatgcaagtttttctgtgttccaagagactttactgcatttgcactgcagtatcacctatggaagaatgaggaaggctggtttcggatagctgagaatatgggatttcagtgcctaaagattgagagtaaagatccccggctagacgggatagactcactctctggaactgaaatccccctgcactatatctgcaaactggccactcatgcgatccacttggtagtctttcatgagaggagtggcaactacctctggcacggccacttgagacttaaagaacacattgacaggaaatttgttcccttccaaaagttacagtttggtcgttatccaggagcttttgacaggccagagttacagcaagttactgttgatggactggaagttctcattccaaaggatccaatgcactttgtagaagaagtaccacactctaggtttattgagtgtaggtataaagaagctcgagcattctttcagcagtaccttgatgataacactgtggaagctgtggcctttcggaagagtgcaaaggaattactgcaactagcagcgaaaacattaaacaaattgggagtaccattctggctgagcagtggaacttgtctaggatggtatcgacaatgcaacattattccttatagcaaagatgttgacctaggaatttttatacaagattacaaatctgatattattttagcatttcaggatgcaggacttccgctcaaacacaaatttgggaaggtagaagacagcttggaactatccttccagggaaaagatgatgtaaaacttgatgtttttttcttctatgaagaaactgatcacatgtggaatggaggcactcaggccaaaacaggaaaaaaattcaaatacctgtttccgaagtttacactgtgctggactgagtttgtagacatgaaggtccatgtaccctgtgaaaccctcgaatacattgaagccaactatggtaagacctggaagattcctgtaaagacgtgggactggaagcgctctcctcccaatgtgcaacccaatggaatctggcctatttctgagtgggatgaggttatccagttatattgagatagtaggttgaaatgggagaatttctcttttggaaaaaaaggtagataactgtttaaaaaatacatgtctatttgtcaaacataagtgggaaccaaagaaaaaatgtgacaagtttgaagacacagaaagagtcatctgatgtaattctctcacttagtactgaggaattttcatgtgccacatacaatgctaggttacagtggagaagccaagatgaatgagacaaatacctacttcttttattcctccttttggtaaacaactcaattttcctttgagggaaccctcccccaccctttgaagagttcaagttctgtacaggtttttaaaacgtgaagtaatgtttgaactggaagatgagctcaccaggcaaagctaaggaaggatatactagttgaaaagaataacccactcctcttctgggcatttaagctggtatgttagtgctacttttaagattgtggagtctgagttaatattcaagtgatcagactttgagtgacatcaagaaaagatgatatcaggttcatttttcaactaatcttatgtggaattgaattagagaacaaggcattattcttttagggaaggtgagagcttatttgtatcagagcttattacttgtcaggataagtaaatttctgtacatgtactgttttcatatgtgaagtgagaagaaactttatgcttgtttaatgcttaaatttccatccattgtgagaatattttcactgacctctgatggcacttgttgacaaatcattcaagtgagaccatgttactagacatgatcttgaaagaggccatgatttcacaaaactcatttttattttattctcagacagtctgttaggtaaaaatatgagaaattcatgtacattttatattttctgaatttataatctgtgcactcccaattttaatgacactaaaatattaatagaattttttaaatatactctaatttttaaaacatactctttattatcttcatttatcaattacagcttcgtatctctaatttatggtctatataccaatttaaatggcatgtaaacctgcctgtttcttctcctcttctaatatatcagatctccaaaatggaagctaaatggtggacttgacaactattcaccctacctcagatcatagagtttgtaaagtttgtgtccctccccagtttttcagtctgttgaatgtcgatggggcaagaactcagacttctactttaccaagtaccacacactctggaatgctttagtttccttttcccctcaagatgtctgagtcagctaggatgctgtttaccccatctctctcttatatcacttgaatgatatattgtaagtgagaggtaaaggaaaatgtaggcacaataagcactgctatttttctctttgtctaggaaaggaagctgaatcttatatcttatctatgctatttaggactactttctggagcttggcagattttcctctgacaccagagaacaatagtagtctcaagaatggaaacctgaatgtctgagggaatgggctggtagactttttcgaaaacaaattagagaaagtaacttacaaccacccattccggatttgtaaagcaacatgaaaacctttgataaatgataaccaacagtcttctgtcctaatttgcattctcaatgcagaattattgggtctttcataaacaacatgagtggtttctggagacatttaagattgtcagcaaacttgtcccaaaatggcacatcatcataatccattttctctttgctagaaaatcagcccatagagtgcattcccaaattctaaatagctgaccctaaattcatttttcatgcttaaaaataatagaacaaataataatactatttttgggcaaaatccaccctacttgatgaggaccatttgcttgtgctcagtatttagaaatgcatacactccacatttctccccatttccaattgggactcccattctttgccaggagatcttacccatcccttttcagattaatcttttatcctttcctgaagtacaaagtcttaagagtgtctgaaatccaagacatcttggcccaattgacacaggttctatattcttccctacatagaccactggctgctgaaatacttttcttgtcttctggtttcacaggcttcagctcatgggttccaccctaacttggggaaacaaaagccttctctagaatctgaaggccaggcttacctctgattctgattcatccatacttcatcttatgtattttaacagttgggttctgtggagtgtccagagaccttgggttaggtatatccatcttcagtacctcattggatcacttttctttcatcacttgagtattctagcagtcattctcctaatctgaccactttcaggtttagtttacctggcttaccaggggaagttgacaacttgttggtagttaggcacccatgaatgtctccagagacatcctgagaggcaagattcctcttaattgataaccaggacaaccaggtagtcacccagtcctctctaagcagggagcacttgtccttctctcctctgctgcagctactgatatctggcccctggaataaaaccatagttcctaaaattgagcatccctaagagtagctgcttggtgggacagctgatttctttgattccctagctgcaaaacctgaaattgaccactaggtgacagaatgtttgccagtatccccacaaaacaagttaaaacttaagtgaaaatcattctgcttttgaatcttaaaagctagaaaaaccataatgtaatattctttttaaaccctcttattttataactaaataaataatcacagaaaagaatgatctgaacaagaacagctgaggctaaaacccaagactgccgtgactcctagtccaatgtctgtttcgcatcacaacacagtatctttaacagtgcttgagatgcttaacagagaaggcatccagtgcttcattgaggctaagtctcagggtgtttctgccgcttagtatctttttgttcagattgagaacctaaggcgacagagaggtcaaggggaagtattttctagttcagaattcagaattcttaggcaaccttcatacctttatctggaaaatgccttctctccagacaataagacagttcacatctggagacatcagcctttggtacctaattctctaagctcaagatgcatcccattgccactttaccattctatttcccaagggaaccatcagcaccaacctgctaaatgcctgtatttgaagtctctccccttcctgaagtgaccttttatgaggctctttccttcctaagggacctttccctggtagtagtggtctcattcacaaaaaagaataatagatgtaactggagtcactttgcagttttcaagattttttttttatctgcttggctggaaaggagactagagtatctagtttttagtatttaaactacttttaattatttatattgatactctctgataaatgcaggtagttaagaatagattgtactcattcctttttgagtttgtgacctcaaaccattgtttttattcttacacgactacagtacttcaaatggcacatagataggcaggatattacataggtaagcaggaatttatacattgggtaccagagctaaatctggaaaacacatttggaatgagcttccacacttcagtctaaaatctcacccaaacttatggctacatatttttctaagtttcccccctagtttcactttctggaaagtgaacagttttttaaatcctaaatgttataaatccttaggagaaatattccctcaaaacctagtcaagaaagtgccacattcccaccttctaacaggtaattattagttgtaatagctttaatgcatggaaaaacttcagttactgaccagtcaagagaatttctcaagaaaaatcccagcaacgttccctctttcctccttgtcttccactatcattaagacctgggctagatcacctctaacatctcactcagggaaggcaatgtgttgccataaaaagaccacaagcttttgagttaggcctgaatttgaatttcagcttaatcatgtgggatttatggtgggggccctttcagtctcaatttccacattagtgaactggggaaatgatacatacttctaagggtttttagggggattaaatgaagtatacagttcttagcctcaggcctaggattaagtaagtactcaagaaatgtgcaattttctagttccatgtttcttttctaatcttcaaatggaattatagaaaccatgggtcagaacatattcctttactcaaaagattgcatgactgaatttgcttaagaaaaaaaaaattgtatcaagtcattaatacaattatacattaattatattacattaatacaatatatggtttgtgaattcagagacattaccagtttgcctccttctctcaatagaacttgtattttcattttcttggttaagcagttgtctcctaatattatcccatatgctacctagtttgctggtcccaagcagtttactgtacttcactagatttggtacctgctctcccctggacttctttttcaatattctagcctttcctagatgtaaatctttacctccttgttagtgaaattagatataagccatgatttggagagggaagaaatctggaatacttaatttcatttaattatctatgctgatgaatgcctgtatcattgttaataaaggagaattgaaaatactcatttctactttctgccctcaaatttctgtttctatctcaactaggcaagaatcagcagggtgcatgatgccattttaagctgcttcacatcagactgaaatcctaattacagttcataagtgaaacagactaattcaatggcaataccttttgtataggtcctgtgcttaaaggaggcaagtataaattttctaataagaaatccctgcttcttttgggtgcagtggctcacacctgtaataccagcagtttgagaagctaaggcaggtggatcacttgaggccaggagttcgagaccagcctggccaacatagtgaaaccccgtctcttctaaaaatacaaaaaaattagctgggcatggtggtgcacgcctatagtcccagctacacaggaggctgaggcaggagaatcacttgaacccgggaagcagagtctgcagtgagccaagatcgcggcattgcacttcagcctgggcgatagagcaagactctgtctcagaaaaaaaaaaaaggaaagaaagaaatctctgcttccgtactatcaaaacttctaccctagaataccccctggcaccttctaacccaacctaatacagagattttgtagggacccattaacaagctcctatataattataagcagctctcacagtagggttgaaagagaatataaggaaaattagaagtactgtatttttgctattggaaatgaaatattgtttcatgcacctttgaaaaaaataacaggattttacagccttctgatgattcattcaaagcatggggaatagttcatatgtttgttaaatgaaaatcttatgtagcaatttgtgtgtccctcccacttcataactacaaaaacatatatatgaatttctaaacaaagtgatattttaaagatgaattgattcaatgtgtacttaccagtttactgtgtggttttatcttcaggtacagatagtttgtggtactacttgaaaatacctttaatattattttcatcagaatttgtaatatataatccagtttgggatgatgaataaaatttttctaatctcttg

SEQ ID NO: 22317 - DNA, 3442 bp, Homo Sapiens
cgccgcagccgccggcgctgtggagatattctctaagccgctttcatcatgggagaaatagagcagaggccgaccccaggatcacgactgggggccccggaaaattcggggatcagtaccttggaacgtggacagaagccgcccccaacaccttcaggaaaactcgtgtccatcaaaatccagatgctggatgacacccaggaggcatttgaagttccacaaagagctcctgggaaggtgctgctggatgcagtttgcaaccacctcaacctcgtggaaggtgactattttggcctcgagtttcctgatcacaaaaagatcacggtgtggctggatctcctaaaacccattgtgaaacagattagaaggccaaagcacgttgttgttaagtttgtggtgaaattctttccgcctgaccacacacaactccaagaagaactcacaaggtacctgttcgcgctgcaggtgaagcaggacttggctcaaggcaggttgacgtgtaatgacaccagcgcagctctcttgatttcacacattgtgcaatctgagattggggattttgatgaagccttggacagagagcacttagcaaaaaataaatacatacctcagcaagacgcactagaggacaaaatcgtggaatttcaccataaccacattggacaaacaccagcagaatcagatttccagctcctagagattgcccgtcggctagagatgtatggaatccggttgcacccggccaaggacagggaaggcacgaagatcaatctggccgttgccaacacgggaattctagtgtttcagggtttcactaagatcaatgccttcaactgggccaaggtgcggaagctgagcttcaagaggaagcgctttctcatcaagctccggccagatgccaatagtgcgtaccaggataccttggaattcctgatggccagtcgggatttctgcaagtccttctggaaaatctgtgttgaacatcatgccttctttagactttttgaagagcccaaaccaaagcccaagcccgtcctctttagccgggggtcatcatttcggttcagtggtcggactcagaagcaggttctcgactatgttaaagaaggaggacataagaaggtgcagtttgaaaggaagcacagcaagattcattctatccggagccttgcttcacagcctacagaactgaattcggaagtgctggagcagtctcagcagagcaccagccttacatttggagaaggtgccgaatctccagggggccagagctgccggcgaggaaaggaaccgaaggtttccgccggggagccggggtcgcacccgagccctgcgccgaggagaagccccgcgggtaacaagcaggcggacggagccgcctcggcgcccacggaggaagaggaggaggtcgttaaggataggacccagcagagtaaacctcagcccccgcagccaagcacaggctccctgactggcagtcctcacctttccgagctgtctgtgaactcgcaggggggagtggcccctgccaacgtgaccttgtctcccaacctgagccccgacaccaagcaggcctctcccttgatcagcccgctgctgaatgaccaggcctgcccccggacggacgatgaggatgagggccggaggaagagattcccaactgataaagcgtacttcatagctaaggaagtgtctaccaccgagcgaacatatctgaaggatctcgaagttatcacttcgtggtttcagagcacagtgagcaaagaggacgccatgccggaagcactgaaaagtctcatattcccgaattttgaacctttgcacaaatttcatactaattttctcaaggaaattgagcaacgacttgccctgtgggaaggccgctcaaatgcccaaatcagagattaccaaagaatcggcgatgtcatgctgaagaacattcagggcatgaagcacctggcggctcacctgtggaagcacagcgaggccttggaggccctggagaatggaatcaagagctcccggcggctggagaacttctgcagagactttgagctgcagaaggtgtgttacctaccgctcaacaccttcctcctgcggccactgcaccggctcatgcactacaagcaggtcctggagcggctgtgcaaacaccacccgccgagccacgccgacttcagggactgccgagccgctttggcagagatcacggagatggtggcacagctccacggtacgatgatcaagatggagaatttccagaagctgcacgaactcaagaaagatttgattggcattgacaatcttgtggttccgggaagggagttcatccgtctgggcagcctcagcaagctctcggggaaggggctccagcagcgcatgttcttcctgttcaacgacgtcctgctatacacgagccgggggctgacggcctccaatcagtttaaagtccacgggcagctcccgctctatggcatgacgattgaggagagcgaagacgagtggggggtgccccactgcctgaccctccggggccagcggcagtccatcatcgtggccgccagttctcggtccgagatggagaagtgggttgaggacatccagatggccattgacctggcggagaagagcagcagccccgcccctgagttcctggccagcagcccccctgacaacaagtcccctgatgaagccaccgcggctgaccaggagtcagaggatgacctgagcgcctcgcgcacatcgctggagcgccaggccccgcaccgcggcaacacaatggtgcacgtgtgctggcaccgcaacaccagcgtctccatggtggacttcagcatcgcagtggagaatcagttgtctggaaacctgctgaggaaattcaaaaacagcaacgggtggcagaagctgtgggtggtgttcacaaacttctgcctgttcttctacaaatcacaccaggacaatcatccccttgccagcctgcctctgctcggctactcgctcaccatcccctctgagtccgagaacatccagaaagactacgtgttcaagctgcacttcaagtcccacgtctactacttcagggcggaaagcgagtacacgttcgaaaggtggatggaagtgatccgcagtgccaccagctctgcctcgcgaccccacgtgttgagccacaaagagtctcttgtgtattgatggccggacacactcgtttccgcagtggctgctttcctggaagacgtttcctttcttctgtattaatgaagcctggtaaaattaacacctgtctgaaaatcaaaaacatggcttcccagcagctctcctgtctccacagccgcgttttttaaccccgacctctcagcgtttgaatgaacagcgctcccacctccagtcctggcatccgctgggggcgctgttctttagctagtgccagtattaaaacattgtcatt

SEQ ID NO: 22318 - DNA, 3468 bp, Homo Sapiens
ggcggcgggcgcggtgcgcgatcccgggtggcggcggcaacggcggtggtgacggcggcgactgcagcggccggctctcacctctcccctgtgcacccgcatctcgccgcgccgccgagcagccagcagtccccgggtcgcccagcccacgcgcgcacggccgagcccagcgcacaatagcggcgacagccatggggaaaccggcgaggaaaggatgcgagtggaagcgcttcctgaagaataactgggtgttgctgtccaccgtggccgcggtggtgctaggcattaccacaggagtcttggttcgagaacacagcaacctctcaactctagagaaattctactttgcttttcctggagaaattctaatgcggatgctgaaactcatcattttgccattaattatatccagcatgattacaggtgttgctgcactggattccaacgtatccggaaaaattggtctgcgcgctgtcgtgtattatttctgtaccactctcattgctgttattctaggtattgtgctggtggtgagcatcaagcctggtgtcacccagaaagtgggtgaaattgcgaggacaggcagcacccctgaagtcagtacagtggatgccatgttagatctcatcaggaatatgttccctgagaatcttgtccaggcctgttttcagcagtacaaaactaagcgtgaagaagtgaagcctcccagcgatccagagatgaacatgacagaagagtccttcacagctgtcatgacaactgcaatttccaagaacaaaacaaaggaatacaaaattgttggcatgtattcagatggcataaacgtcctgggcttgattgtcttttgccttgtctttggacttgtcattggaaaaatgggagaaaagggacaaattctggtggatttcttcaatgctttgagtgatgcaaccatgaaaatcgttcagatcatcatgtgttatatgccactaggtattttgttcctgattgctgggaagatcatagaagttgaagactgggaaatattccgcaagctgggcctttacatggccacagtcctgactgggcttgcaatccactccattgtaattctcccgctgatatatttcatagtcgtacgaaagaaccctttccgatttgccatgggaatggcccaggctctcctgacagctctcatgatctcttccagttcagcaacactgcctgtcaccttccgctgtgctgaagaaaataaccaggtggacaagaggatcactcgattcgtgttacccgttggtgcaacaatcaacatggatgggactgcgctctatgaagcagtggcagcggtgtttattgcacagttgaatgacctggacttgggcattgggcagatcatcaccatcagtatcacggccacatctgccagcatcggagctgctggcgtgccccaggctggcctggtgaccatggtgattgtgctgagtgccgtgggcctgcccgccgaggatgtcaccctgatcattgctgtcgactggctcctggaccggttcaggaccatggtcaacgtccttggtgatgcttttgggacgggcattgtggaaaagctctccaagaaggagctggagcagatggatgtttcatctgaagtcaacattgtgaatccctttgccttggaatccacaatccttgacaacgaagactcagacaccaagaagtcttatgtcaatggaggctttgcagtagacaagtctgacaccatctcattcacccagacctcacagttctagggcccctggctgcagatgactggaaacaaggaaggacatttccgtgagagtcatctcaaacactgcttaaggaaaagagaaacactaatggccaagtgtacatttgatttgatatacagacctccagattattttctatatttggattcacagcctttgcgctctgggttttgggatttgggtgtggggtaagttgaagggaaatcaatttaaaggaaagttctattatctgggttttagaaattctataagagacaaagtttggaagtacataaagtaataactgttagaattaggtaatggatatgaaagagaaaatgctttctcatgcatagacaagtgttttgggtttttaaaaaaaatattctgtcattggttacaaatttttactcaggctttctattggcatggatttcctttgacctctcacttttttataaattataatgcatctaaaccacctgtccccagttaatgtgccaaaatgtcaatttttaacttatctccagccaatttcaaagaaaacagaccagcatagttctgcaataacagttttaagatgggcatagggtttggaagaaagggagaaggattcttttttcaatgtactgtattgggacgctggtaactgttaacccagtgttcagcatagagctatatatatatatatatgtatatatttattattttcatataatttgccagacagagatcagaattgaaccgtcaatgtgaaataaagagttctccttgtacttgaataataaccacgattccaacccaggtctgctttggggcttatcagaactcctttctaaggagcactagaatgagaaatcatgttgttcgatcgtttcacatctgtatatcagctctaaagcagagatgtattatggtgatactccaaggtggcatagccattcatttacaacttccagatttgagctgcctggagggaatccatatcagctctgcataagattatatacaaagctgtcactcacaaaaggctggatgtgctttcatccaactggaaggctttattcttccaagttcattcatactcaaagaggccagtactttgccatccttgcacttctgttatcagggcccaaataacagtggcaagctaccaactaagttgtattttaataaagattccatgggttgaacaagccacgttgcagaaaaagagcttcccctaacctgggttgttgcagagtaaatcccacgacataagctggtatcactggttcgggggaaatagttccattctatgactcttgtctcctcctccaggaggactgttctaactagtaatcttggccctattcattacatcctctgcttgtcattctgctaatttatgaagatagtttattatagtctgtacttcagttctcatcttgtaaataatgcttaacataaacttgtacttacactgaaatccaaaatagtcatgtttctgcagtattctgtagccaacttaaacctgtgctttcatgtttaagaaatgagaaattgtgccaaagatagcagaagagtagataagtgctcagtattgacgacctacatctgaaatctacaacataatgatactgaattgttatgtaaacatcataaatagtaaataatgattcaatgtgaattttaaaatgcaaatattgctattgtttataggaaataaatctaaatataaatg

SEQ ID NO: 22319 - DNA, 7864 bp, Homo Sapiens
ccactgagcagccaaccgcagcctctggccacaaggagagcggagcacaggagcaggaagccgcctaccaccatgagcagcacgctgtcacccacagactttgacagcttggaaatccagggccagtacagtgacatcaacaaccgctgggaccttcctgactcggactgggacaatgacagcagctcggcccgcctctttgagaggtctcgcattaaggctctggcagatgaacgagaagctgtgcagaagaaaaccttcaccaagtgggtaaactcgcacctggcccgggtcacgtgccgggtgggggacctgtacagcgacctccgggacggacgcaacctgctgaggctcctcgaggtgctctcgggagagatactgccaaagcctacaaagggccgcatgcggatccactgcctggagaacgtggacaaggcactgcagttcctcaaggagcagaaagtgcacttggaaaacatgggctcccatgacattgtggacggaaaccaccgactgacccttgggctggtctggaccatcatccttcgattccagatccaagacatcagtgtggagacagaagacaacaaggagaagaagtcagccaaggatgccctgcttctgtggtgccagatgaagactgcaggttatcccaacgtcaatgtacacaacttcaccaccagctggagagatggactagctttcaacgccatcgtgcataaacaccggccagacctgctggattttgagtctctgaagaagtgtaatgcacactataatctgcagaatgcattcaatctggctgaaaaggaactgggacttaccaagctgctggatcccgaagacgtgaatgtggaccagccagatgagaagtcaatcattacctatgtggctacttactaccattacttctccaagatgaaggccctggccgtggaaggcaagagaattggcaaggtgctggaccatgccatggaggcagagcgcctggtggagaaatacgagtccctggcctcggagctgctgcagtggatcgagcaaacgatcgtgaccctcaatgaccggcagttggccaactcccttagcggggtccagaaccagctgcagtccttcaactcctaccgcaccgtggagaagccgcccaagtttaccgagaaagggaacttggaagtgctgctcttcaccatccagagcaagcttcgggccaacaaccagaaggtctacacgccccgcgagggccggctcatctcggacatcaacaaggcttgggagcggctggagaaggcggagcacgagcgtgagctggccctgcgcaccgagctcatccgccaggagaagctggagcagctggccgcccgcttcgaccgcaaggctgccatgcgggagacctggctcagcgagaaccagcgcctcgtgtcccaggacaactttgggctggagctggcagctgtcgaggcagcagtacggaagcacgaagccattgagacggacatcgtggcctacagcggccgggtgcaggcagtggacgccgtggctgcagagctggccgccgagcgctaccacgacatcaagcgcatcgccgctcggcagcacaacgtggcacggctctgggacttcttgcggcagatggtggccgcccggcgggagcggctcctcctcaacctggagctgcagaaggtgttccaggacctgctctacctcatggactggatggaagagatgaagggccggctgcagtctcaggacctgggcaggcacctagcaggagtggaggacctgctgcagctgcacgagctggtggaggcagacatcgccgtgcaggccgagagggtgcgggccgtcagcgcctctgccctgcgcttctgcaacccagggaaagagtatagaccttgcgacccgcagctggtgtcggagcgggtggccaagctagagcagagctatgaggcactgtgcgagttggcagcggcgcggcgggcccggctggaggaatcacggcggctctggcgtttcctctgggaggtgggtgaagctgaggcctgggtgcgggagcagcagcacctcctggcctcagccgacacgggccgagacctgaccggtgccctccgcctgctcaacaagcacacagccctgcggggcgagatgagcggccggctggggcccctgaagctcaccctggagcagggccagcagttggtggccgagggtcaccctggggcaagccaggcctctgcccgtgcagctgaactccaagcccagtgggagcggctagaggccctggccgaggagcgtgcccagcggctggcccaagccgccagcctctaccagttccaggccgatgcaaacgacatggaggcctggttggttgacgcactgcgcctggtgtccagccccgagctggggcacgacgagttctccacgcaggctctagccaggcagcatcgggccctggaggaggagattcgaagccaccggccaaccctggacgccttgagggaacaggcagcagccctgccccccacactgagccgcacgcccgaggtgcagggccgggtgcccaccctggagcggcactacgaggagctgcaggcccgggcaggcgagcgagcgcgggccttggaggcagccctggcgctctacaccatgctcagcgaggccggggcctgtggactctgggtggaggagaaggagcagtggctcaacgggctggccctgcctgaacgcctggaggacctggaggtcgtgcagcagaggttcgagaccctggagcctgaaatgaacacccttgcagcacaaatcaccgcggtgaatgacattgccgagcagttactgaaggccaaccccccaggcaaagaccgcattgtcaacacccaggagcagctcaaccacaggtggcagcagtttcggcgtctggcagacggcaagaaggcagctctcacctcagccctgagcatccagaactaccacttagagtgcacggagacccaggcctggatgagagagaagaccaaagtcatcgagtccacccagggcctaggcaacgatctggctggggtgctggccctgcagcgcaagctggccggcacggagcgggacctggaggccatcgccgcccgggtgggcgaactgactcgagaggcaaatgccctggctgccggccatcccgctcaggcagtggccatcaacgcccggctgagagaggtgcagaccggctgggaggacctcagggccaccatgcggcgtcgagaagagtcgctgggggaggcgcggcggctgcaggacttcttgcgcagcttggatgacttccaggcctggctaggccgcactcagactgctgtggcctctgaagaagggccggccaccctgcctgaggcagaggccctcctggcccaacatgcagccctgcggggagaggtggagcgggcccagagcgagtatagccggctgcgagccctgggcgaggaggtgacccgggaccaggctgacccccagtgcctcttcctacgacagcgactggaggccctgggaactggctgggaggagctgggccgaatgtgggagagccggcaaggtcgcctggcccaggcccacggcttccagggattcctgcgggatgctcgtcaggctgagggcgtgctcagcagccaggaatatgttctgtctcacacggagatgccagggacactccaggctgctgatgctgccattaaaaaactggaggacttcatgagcaccatggacgccaatggggaacggatccacgggctcctggaggctggccgccagctggtatctgaaggcaacatccacgccgacaagattcgggaaaaggcagactccattgagaggaggcacaagaagaatcaagacgcagcgcagcaatttctgggccgtcttcgggacaaccgggagcagcagcatttcctgcaagattgtcacgagctgaagctctggatcgacgagaagatgctgacagcccaggacgtgtcctatgacgaggcccgcaacctgcatactaagtggcagaagcaccaggcattcatggccgagctggctgccaacaaagactggctggacaaggtggacaaggaagggcgagagctcacccttgagaagccagagctgaaagccctggtgtcggagaagctgagagacctgcacaggcgctgggacgagctggagaccaccacccaagccaaggcccgcagcctctttgatgccaaccgagctgagctgtttgcccagagctgctgtgccctggagagctggctggagagcctgcaggcccagctgcactcggatgactacggcaaggacctcaccagcgtcaacatcctgctcaagaagcagcagatgctggaatgggagatggctgtgagagagaaggaggtggaggcaatccaggcccaggccaaagcactggcccaggaggaccagggtgcaggggaggtggagagaacctcgagggccgtggaggagaagttcagggccttgtgccagcccatgcgggaacgctgccggcgcctgcaggcttctcgcgagcagcaccagttccaccgcgatgtggaagatgagattttgtgggtgacagagcggctgcccatggccagctccatggagcatggcaaggacctgcccagcgtccagcttctcatgaagaaaaaccagaccctgcagaaagagattcagggccatgagccccggatcgcggacctgagggagcggcagcgtgctctaggtgcagcagcagcaggtccagagctggctgagctgcaggaaatgtggaaacgcctgggccacgagctggaacttcgagggaagcgactggaggatgccctgcgagcccagcagttctaccgcgatgccgccgaggcggaggcctggatgggcgagcaggaattacacatgatgggccaggagaaggccaaggatgagctgagtgcccaggcagaggtgaagaagcaccaggtgctggagcaagccctggccgactacgcgcagaccatccaccagctggcggccagcagccaggacatgattgaccacgagcacccagagagcactcggatatccatccgccaagcccaggtggacaagctgtatgccggcctgaaggagctggctggagagcggcgggagcgcctgcaggagcacctccggctgtgccagctccgccgcgagctggatgacctggaacagtggatccaggagcgcgaggtggtggcggcctcccacgagctgggccaggactacgagcatgtgactatgctccgagacaaattccgagagttctcccgggacacaagcaccatcggtcaggagcgcgtagatagcgccaatgcgctggccaatgggctcattgctgggggccatgctgcacgggccaccgtggccgagtggaaggacagtctcaacgaggcctgggctgacctgcttgagctgctggacacacggggtcaggtgctggccgcggcgtacgagctgcagcgcttcctgcacggggcacgccaagccctggcgcgggtgcagcacaagcagcagcagcttccggacgggactggccgcgacctcaacgctgccgaggccctgcagcgccgacactgtgcctacgagcatgacattcaggccctcagcccccaggtccagcaggtgcaggacgacggccaccggctccagaaggcctacgctggagacaaggctgaggagatcggccgccacatgcaggccgtggccgaggcctgggcccagcttcagggaagctctgccgcccgccggcagctgctgctggacaccacagacaagttccgcttcttcaaggctgtccgggaactgatgctctggatggatgaggtcaacctgcagatggatgcccaggagcgtccccgggatgtgtcctccgcggatctagtcatcaagaaccagcaaggcatcaaggcagagatagaggcccgggcagaccgcttctcctcctgcatcgacatggggaaggagctgctggccaggagccactatgcggccgaggagatctcagagaagctgtctcagctgcaggcacggcgccaggagacagctgagaagtggcaggagaagatggactggcttcagctggttttggaggtgcttgtgtttggaagagatgcagggatggcagaggcctggctctgcagccaggagccactggtgcgcagcgctgagctgggttgcacggtcgacgaagttgagagcctcatcaagcggcacgaggccttccagaagtcagcagtggcctgggaggagcgattctgtgcgctggagaagcttactgcgctagaggagcgggagaaggagcgaaagagaaagagggaggaggaggagcggcggaaacagccgcctgctcccgaacccacagccagtgtgcctccaggggacctggtgggcggccagacagcttctgacaccacctgggacggaacccagccacggccaccaccatccacacaagcacccagtgttaatggagtctgcacagatggagagccctcacagcccctgctgggacaacagagacttgagcacagcagcttccccgaagggccgggacctggctcaggggacgaagccaatgggccccggggagagaggcagacccggactcggggcccggccccatctgcaatgccccagagcaggtctaccgagtcagcccatgctgccaccctgccgcctcgaggcccagagccatctgcccaggagcagatggaggggatgctgtgccgcaagcaggagatggaggccttcgggaagaaggctgccaacaggtcctggcagaacgtgtactgtgtcctgcggcgtgggagcctcggcttttacaaggatgccaaggcagccagcgcgggagtgccataccacggagaagtgcctgtcagcctggccagggcccagggcagcgtcgcctttgattaccgaaagcgcaaacatgtcttcaagctgggcttacaggatggaaaagaatatttattccaggccaaggatgaggcagagatgagctcgtggctacgggtggtgaatgcagccattgccacagcgtcttctgcctctggagagcctgaagagccggtggtgcccagcaccacccggggcatgacccgggccatgaccatgcccccagtgtcacccgtcggggctgaggggcctgttgtgctccgcagcaaagacggcagagaacgagagcgagaaaaacgcttcagcttctttaagaagaacaagtagttgggggcaaggtcccaggccaactccctccctccgttcaggaaactgccagggacagtcgacagggaccgccctcttgtcaggacaactgcctgctgctagggtctgttgccaaggtcaacccatcaccaggaactgtcactggggacgagtccatgttcccaagggcagcccttctcttctgctgtttaattccagactggtggtgggacccaggtaaccccctctcccacccccgccgacttctcccctttccccagcctcgtgcctctgtccctcaccacggtgtggacagtgccgcaccctcaacataggccatgtggggagtggctgcccctgcctcagggtcattctcctgccatgcgagggcactcgccttctgccttctggttcctcacccctcagaccagccaggaacctctcagagctgaagcaggccctgggggcagaagtgccagatgacagtcagaggcgcaggagccctccctccccacccccaccctgtaactccagctgccactccatctccagctgctctcaatggcttccaggtgtgttgttcggggacagccaccgccttgagtctggccaaggaggtgattaaacagctcagcttctc

SEQ ID NO: 22320 - DNA, 52985 bp, Homo Sapiens
  misc_feature (4415)..(4415): n is a, c, g, or t
  misc_feature (18280)..(18280): n is a, c, g, or t
  misc_feature (18349)..(18349): n is a, c, g, or t
  misc_feature (18370)..(18370): n is a, c, g, or t
  misc_feature (22021)..(22021): n is a, c, g, or t
  misc_feature (33420)..(33420): n is a, c, g, or t
  misc_feature (47538)..(47538): n is a, c, g, or t
  misc_feature (51685)..(51685): n is a, c, g, or t
gttgggatgtgtggtctgtgggatcctcaaaggcaaagagaaactgggagtcacagtgcaggggaatacagaaggcatccttgaggtccagaaccatgaaccattctgcttcctctggtatttgagagagcaggatataggggttgggtacaactggatatagaggaattactgccttattaatgcgtctaagatcttgcagtagtctccactgactgttctgtttttgtactcctagaattggggtgttgcagggactgctgcattttttttttttttttttttttttactaagacttgagcttttaaatgtctaacaatatcctgtaatcctttatgaacttcaggccttaagggatattgcgtttgatagggaaaagtggtggggtcttttagcctgatttggattgggcgggcatttttgcccttctgcattgtccttccaatgcccagacttcagtgttgattccctccttaagcagggggacaacaaaagggtaacttgtttcccatattcacgtagataatagctccagctttggctaatatgtctctccctaataaggatatgggactttcaggcataacaagaaaggcatgtgaaaagagcaaagtctcccaattacaattgaggaggtgggagaaatacctggttacaggctgtcccaggattcctcacgatggtaatggactttgaggacagccgaccagggcaggagattaacactgagagggccgcaccagtatccaagaggaagtcaatttcctgtccctcaatagttaaatgtacctggggctcagtgagggtgatgacataagccggtgcttgttccaggcaccctcagtcctgttgttggatcggctggttgggggactctggcctagagcacctttgtcctctggggcagtgtgccttccagtgattgcctcagcatagtggacatgggcgagggggaagcttgtttctcactggacaatcttttttaaagtgtccttgcaaaccacactgataacaagccctaccagctgattggcctgctctattttctgtcctctctgaaccaccagggtttgtttgtctgagggccatgactaaggctgtgccctttctctgatttcactttttcttctcagcctgttcctcttggtcccttttatagaacactgaggttgccatgtttaataatgcctccagattttgttcagggcctagggctttcttttggagctttctcctgatatctgtgactgattgggaaataaacttatcttttaggataaattgaccctcgagggagtcaggtgacaggggagtgtattttcttaaggcctcctgtagatgctcaaggaagacagaaggattttcttcctttccttgagttatggtggacatcattgaataattcatgggctttttcctaaattctccttagtccttctagaacacaggtcaacagatgtttgcgacaccaagtccccatgatctgagtctaggtcccagtggggatccatactggggatggcttgctgaccggtagggaatttgtccctttcttcagctgtcattctatcatttacttgactaaaataccaggtatctccaaactctcgggttgcagctaaagccacattcttttcattaaaggcccagggtttgatctcatagcatgacatctctccaagtggggtcaaaggtttgccctagaccctgtaggacatctatatacctatcaagatcatctgaaaacttccccaggtataccttaatctgctttaaatcagagagggagaaggggacatgtacctggattgggccaaattcccctccccctacagtttgaatgggacataactgatagcctgggggtttttgtggtcctttggagatttctttgcttgtttccttctgggcagagaagattagaggaggcttatcattaataggaaggggagctatagggaggctaggataatgggggtaagctgagaggtcctcctgtggaatgaaaattgcaagctttgcatagttgtggattctccttcaatgaaaagaaagcttggacataaggtatttcactccatttgccttccctcttacagaaaaggtcaagctgcaggatagtattgtaatttacactcccctcaggtggccatttttccccatcagagagagaatattggggccaggccatagtgcagaaaaaaatgagtcacctctttatcagggtttgcgggtcaaattggtcccagtggcttaggatgcatttcaaggatgagcctgttgatgcctgagtgtttcccatctgaaagaaaaaaccgcccatggttttggtttgtttctgcccatgcccccccacccctggcctgcccaagaatctgcaatggtccctggaccctgctgatcagaatagttgtactcactgatgcagtagcagaaacactagttttcctcctaaaccacaaggaggactgaggaaggtcggatttagtggcccttaccgacacattcttgaaaacctgcacccttgccttccctcttagaccgcaaagaggaccaagaaaaatcaggtttagtggcccttaacaacacattcttgaaaacctattagagtcctaagcattttctcctgttagtattgggaccttacccctttcctataaagatgatattccccaaaaatggagtggagggccataccctgagggagggaagagatctccagggttggaagagtaatgccttttgtccttacttctcatcatatggataggaaggatataatttctgaagctccccatatagcctttgttaggcctgcttgtctgaggagggatcctaaaaggatagttgaactcccccacgcgacggggctttgggcaaaaattatgtctaattggtgagcctgggtgcctaaagaagggaacagagtcatgaaatttatactagacatcattcttataggagaaactagaaaagcaccagaaacagggagtgctttctaaaagcgggactagtctcggagaagagaggcaggaggaagtttgtctgacaggcattaggacccaggaggcaagggtcaggatagataggatagatgggcaagtgttgcttgggcaatgtaactttgagagttccactcatggctacatggtcaaccaacattttgttgggaccttggagctgaatggctttcctttctgtcaacccttgggtcagcccagatgtacaggaaaggtggaagctggttccaggtaaaccaacgctcccaactccgaagagtcagggtttgttagagagccctttcccagaaagcctgacacccatgtctttagtccggtggccacgctagtcacttttaactggctgacaggtgcctggtgtttagtccctgaatcctaaggaaaaataggacagaatagctagcgaaaggggtccaatggtactcactgcttgacgatagtcccttcttggtcaccaagaagtgtctggaattggttccttctggtggattcttggtcttgctgacctcaagaatgaagtcgtggacctttgtggtgagtgttacagctcttaaaggtgccacggacccaaagattgagcagcagcaagatttattgtgaagagtgaaagaacaaagcttccacagcatggaaggagacccaagtgggttgctgctgctggctggggtggccagcttttattcccatattggtccccacctatgtcctgttgattggtccattttacagtgtgctgattgccagattagagtgctgattggtccattttacaaacgtctagctagccacagagagctgattggtgcatttttacagagtgctgattggcacattttacaaacttctaggtaaccacagaatgctgattggtgcattttaaaatcctagctatagagcactgattggtacattttacaatcctcttgtaagacagaaaagttctccaagtccccaccccatccagagtccagctggtttcacctttcagtagcaaccctgagtgaaaagaacaaagctggaggcatcacattaccttacttcaaaatatattacagggatgtattaacaaaaatagcatggtactggtataaaaatagacacatagaccaatggaacagaatagagaacccagaaataaagccacatatttatagccaacgaatctttaacaaagctgacaaggacttatattggggaatggaaaccctcttcaataaatagtgctgggaaaattgggtagtcacatgcagaagaatgaaaccagacccctatctctcaccatatacaaaaaccaaatcaaaatggactaaagacttaaattcaaaatttgaaactatgaaaataccagaagaaaacctagggaaaactctcctggacattggtctaggcacagnatttatgactaagacctcaaaagcacaggccataaacacaaaaatagacaaatgggactctattaaactaaaaggcttctgcaaagcaaaagaaaccatcaacagagtaaagaaacaacctgttgaatgggagaaaatatttgctaagtattaatccaacaggggactaatatccagaatatacaaggaactcaaacaactgaacaggaacaaaatcccaaataatcccattaaaaagtagacaaaggacatgcatagacattttgaaaagaagacatataaatggataacagcatatgaaaaaatgctcaatgtcacttatcatcagagaaatacaaatcaaagccacaatgatataattatcttatcccagctggaatggctactattataaagacaaaaaataacaatgttgacgaggatgcagagaaaatggaactcttttttattttatttttggagacaaggtctcactctgttgcccaggttggagtgcagtgtcacgatcatggctcagtggagccttcacctcctgggctcaagtgatcctcccacttcagcctcctgaagagccgagaccacaggcatgcaccaccacatctggctaattttttttttttttttgtagatacaagcagggtctccctatgttggtccaggatggtctcaaactcctgaactccagcaatcctccctcctcggcctcccataatgctgggattacaggcatgtgtcaccacatctggccgaaaagggaactcttatacactgttggtgggaatgtaaactagcacagttattatggaaaacaaccgtatagagagttctctaaaaactaaaaacagaattactatgtgatcctgcaatcccagtattggatagctacccaaaggaaaaggaatcaatatattaaaggaatacctccattcttgtttattattgcactattcttaaaagagaagatatagaatcaacctaagcattcatcaacggatgaacagataaagaaaatgtagtatatatacacaatgaaatactattcggccattaaaaagaatgaaattggccaggcatggtggctcatgactgtaatcctaacacttggagaaactgaggaggaaggattgcttgagcccaagagtttgagaccagcctgggcaacatagtgagaccttgtctcataaattttaattaaaaaaaaaagaaaccctgtcattggcagcatcgtggatggatctggatatatcttaagtgaactaagccaggcacaacaagacaaatatatattctcacttatatgtggaaactaaaatattttattttatggcagtagagagatagataacagagactgggaggggtgagtagggagctggggtgggtgggtgaagagaactgggttaaagggtacaaacatacagatagaataaactcaatgtctgatagctgagtagggtgactatatttaagaataatgtattgatcttgggtgatggatacctaaatgccattacttgaacaatacacattatatacatgcaacaaaatttctcatgtcctccatgaatttgtacaaaaatacctgtaaaaatcaaattaaactaaaatccttgactgataatcccattatctctgtcacttctgtatctgttcctattgaatgatttttctgcttcttttgggtcacattttcctgcttcttcctatgcttagtaattcttttattagatgtgggcatttaaaatatttttttactgagtgtcagattgatagaatttctttaaaaagtgatggttcctctggtgggtagttaaattaacttatagatcaagttgatcatgtcaaggcttgttcctttagcttagtattgaggtttacaatagcctttattatctagggctggtttagctccactatggagtgactctctgggtctctactgaatgttctgagttttccatgaagactccaattttgctgggtggagctaaacatttccccatcctgtgtgaattcttggaggttctcaggtatgtcatataccctgttgtatcctgctccctcttgcgcagaggctcgccaacacagcttttgttgctattagtagtttgtctctatttgcttgtattttgatgttttgagggaaatcctgtcacctggtttttcagtgagtgcacttggatggtctggttttttccatacagttgctctgtgtttttcatttttatttatttatttattttaattaattaattattgctattttgtgagacattcaagtcttgctctgttgccaggctggagtgcagtggcatgattttggctcactgcaacctccacctcctgggttcaagtgattctcccacctcagcctactgagtagctgggactacaggtatgtgccaccatgcccagctaatttttgtatttttagtagagacagggtttcaccgtgttggccagaatggtctcgatctcttgacctcgtgatccacctgccttggcctcccaaagtgctcagattacaggcgtgagccaccatgcccagccttatttttatttatttttaacaaacgggggtctcactatgttgtccaggctagtcttgaactcctgggctcaagtgatgctcctgcctcagcctcctgatgtgctgggattacaggcataagccatcacacccagcttactctgtgttttcatgtgaagattttgaaagattcaaaaacaatgcagccaacaacctaaccatcatcttcccagtctggtagaagttttaagggccagcatttaccatgctctctttcccttgtctctccaatagtagaagcatgtatcaaaaggtagccctccttagtctgtgtccctggagttattacaatgagtagagcttgtttgttgacctccaatggatatgtatcacgagaaagatataaattttgttattttaagccattaaggttttgggatttttccattagcacagcataatctaatctctcttgagagatagtgttagctttctacccaagccaattcatttttttgacctcaagtaaccaccattaagttaagagaaaggggtggggaaagtacgaggtctaggaagaaaataaataaggcaaagaaataaagcactttgagaactgtgtctaggaaataacagatagcttattaagtcttgggggaactgtattaccaaagaaagtatacactgcccacccctcccccaacaattatacactgtgaatggtactctcataaaattgtttaatttcgtattgctatgcctaaattacccactacagtgaatgtctaaccagggcctctcagaaactgagagagggtgaggccacttatattttctcaaatgaagaaattcccaaataacattataaaaactgtggttactttcaaagtttatcttgctaaatgaatgtatttaatcccttaatagaattcattataattatatagatgccaagtcttattacaatgctatagttttccatcttcttccatagcttgatactaaagaatgtcatgttcaactgattcttctcaattccttggtttctggtcttgattgttgaagggtggggaagccagggaatagtggtcctaacacactgaatgccttaatggcagaattcactgccataaattctacagcagacatttggggtttcagattttttttgcctttcagtttttggtcacccgatgtctgataccaaatgtgatatttagcaatcttgtagtcgttcaaaagaacagaaaacccaaatagaactcgtttttcaaatatccattatcacctttctcaaccagcctagtatttgcttgatgagctcatgatcaaaatgatggcagggaatcactttggttactatatggaagatttatttaaggcaagaatgaattcagaggaccagttaagctcccttctggttcactgctattgcaacagtccagatataagacaatgttgcagtagtgtacatggaaaaaagtagtcggatggtggatacacttttgaggctattttgctgatggactgtatatgggaggaatcaagtattgttaccgaaacaccaggggtttggtctaggtcctgctgctcggtgcacagaaagccaatcactgagatgacaagtattgccaaggaagaaggctttaatcaggtgctgcagccaaggagatgggagtgcagtctcaaatccatctccttgactgaccaaaaccaagggtttatatagcaggaaagaaatgtaacaatatgtaagaaaacaggaacatgggaggggcaaggaagcaatcatggtgactgaggggcccagcatctagtgcagtgatctggtttcagttcttttgatactttttatggcttcagttctttgatactttttgtgagaggcctgaaggtcctttcctgaggaaggaactcggataaaacaagtaagtttccagctttaactgcaaaagggtcaacttctataatcccagcactttgggaggctgaggcaggcaggtcacctgaagttgggagttcaagaccagcctggccaacatgatgaaaccctgtatctactaaaaatacaaaacttagctgggcatggtggcgtgcctgtaattccagctacttgggaggctgcggcaggagaatcacttgaactcaggaggtggaggtcgcagtgagccgagatcgtgccactgcactccagtgagggcaataagagccaaactctgtctcaaaaacaaaaacaaaaacaaaaacaaaaacaactgtctataggactctttggctggtttcagtaggactcataaggttctgatttgagcaatggtgtagctgcttatgccattgattcagacagggaaaactggggaggagatttacggggaaaatgaggacttctgctttggctaggtcaaatttgagacgcctgataggctaccaactgcagttgtcaagtaagcagttggatataaatttggggttcccagacaggtcagagtggaagacacagatatttgggcagcttggaccactctgagtccttattatgatacctgacctggtatggagtagaagagaggaaccagccaatctaatttttggcacatggataaaagtcgatacctttcagtccatattggaatggagataacgatttatactccctagaaaagacacttaaactggatatggaattacttccgttatcacagtctatcactgtggcctcctgtgttattaccagataccttatacacagctagggtgtcccatacaacactgcttcttgcttggcacacagtcgcatagtattcaatcctgtgttaaatggcttagataataagtcacctgtagggattatagcaagcagggaccatcattttcacatagaatttcccaggactggcagggacttttaaagacccagaaatctttctgggcagtgcctccaaagtgtggcccctgaggtgttactgctgctctggtgaccgggggtagttgaccctatttcaatgtcaatcagaacaatatacattcctttataaacttgttttttttttgagagagagtctcactctgtcacctaggatggagtgcagtggtgcaatctcagctcactgcaacctccgcctccctcctgtgttcaagcgattctcctgcctcagcctcctaccgagtagttggaattacaggtgtgtgtcaccatgcccagctaatttttgtattatttagtagagacaggtttttgccatgttggtcaggctggtctcgaactcctgacctcaagagcctcctgggcctctaaaagtgctggaattacaggtttgagccacctcgccccgcctatactgaacatttacataatattttgtttgactaggtttctgccattaagaagatgcaaaaccctgagggagtgtacctcttcactttgcatatgggaaaactgaggctcagagaagtgaaatgactgagacctccaggtgccacctccctttcagctgctcctgccctgctccaagcaaggatgtgccaagtcaagagaagacagaggacaattaatgttatctgaggatctcggagcctcatccctgagctatgatggtctttccctccttagttgggagccccatcacgttcctccgaagctctagttgtgtgataaggagggtggaatctgagacagagaacgatggccctccaaggagggagttcggggtgaggaaaacagcaaaaccatgtgctagacaagatcttcaactgcagggctctggaggcaactgggaagttttgaaagtgcagattgaagctcagggccgctgtgggtggcgcaggaactgcagaagacaagataggattagggagggccagcaggttgccagaggcccttttccacctgctgggcttagaggggcgggactctgcccgctccctcacttggttgggtttaaatgaccactccccgccctagctgtgcctttgagtgtgtggcaagggattgcagacgggagactgcttgtcaattcagggaagtcagcctctttctgccacttaattcgcccatcagtagagatccgactttcccacggttcactgtcacccccattgcacaggtggggaatccaaggcacagaggcgtctgggccagagtcccgggactatccactcattccggggttgtagggcagcatgtgtcaggagcttgggctcgagcgtgcggggcactaattgcgagtgcagtggccacaggctcccgggcaaagtggtcaggagcccattcccgccacctccgtccgcgcgccccgccctgtcctccagcaagttggtgcacgcgcgtcctcccacagggcgcgggatgggggcggggcctccgtgttgttgtttctctggggccccgcccctcaggggggcgcggaccacgcggccggagggcccgcctcccctccccctccccgcccagcccgcccgcctctttgtatccaacatccgggtttccccgctggctcggctccgtggccgccgctcaggatccattttggactcggttcagctcccctcccccccacccctccccccgttcatggcccctccggactcggcccctgcgcccggggcccgggcccagccccgccgcgctatgcctgagtcgggcgcgccccggcccccgcgtcgccccggagcccgggccgcagcctgcgccgcccgcagcggccctgagcccggccccgccgaccggcccttggagcccgaacgctgctcggggacgaaggcgcaggaagcgcgcagggaacgagaccgaaggaaggagcgggaaggagagcgcagccgccgcctggccctgcgcgccccgggagcgccgtgcggccctgcccgcgggctccgggtgtgcgcggggcggcgccgcggaacatgacggcgccctgggtggccctcgccctcctctggggatcgctgtgcgccggtaagaactgggcgcggcgtggggacgccgagagggcgcgcggggctggcctctggcgccgcgcggtgtttaccaacaaagggcgggcccggggccttgtcgccgcaccacctgtattcagccctcacctccgggggcgtgggctgggggcgcggtgggcgcccggctcgccgaacttgggggcacgatcttgtctgtgtagtcatctgcgggattctggttcctagaggcgcccctgcgatgggggccgggacgcggagcctcagggtcggagttcgggctacgcgggcgcgtggaacccagggaaagagtgaggaaaacctgagcctggggaaggcggccaagaggggtgggcagatctcattgggggtggcaggattgtaggtgcagcagcagcagcagcatgcggggagggttgcatgtccctcagagtcactaagtgtagcgaagcgaagggggcggcttcacgcagcccaaagtcccctgcatctcttgccaccagtctgcgtcgcgttaccggcccggcgggctgttggtgctggctcccacctgctccctctttccctgccgttggccccgggatgcggagtgtggtcgcttcgcgggaccgctttgtttgggcacttgggaggggagggggtgggtaagatggaaaacccaacaggtccctcttccttcgggcctccaggaggcacgtggcggggtgggtgaccagcgctcagctcgcccgcggctgcgggcgtgtggctggaggtgttcggccagcgcaagagagtttgggggtaagtgggcgcgggcgtaaacaagcggagttccgcctggaaagcttgtttctcctacggtccaagcaccgatttccctctctcagtggtgccggggtgcgcctaaccccggcgggcgcgccgggacgtcccctggccagtcctgggaaacgtggggagctgggcattgaagctctggcgagaaggtcggggcggctggtacccggccgccgggtcctgcgcgtctttgttcccagcccccattacacatgcagcgcgggtcccccgccgccctcggtggcacccgcctggagtctgggaaaccctcgaggggcggggccgggcgtgcaggggcggggccggagtccccacgctgctgcgggggtggggatttgggatttgcgtcccattcccaccctggttctaccttctcctgtgcgtcgtcgtgaggcttagtttacaccgaaagcgagtgagttctgtagggtagtagcgcgcgcgcgcgcagcctgagtccggaaaccgaagggcaaagaccagctggcacctgagtaccgtatggaagagggcgttgcagctctcctggagccgctttttggaggcgaagtggtggtcgtgttggactttctgcttttttttgccccgctcccttgggatgccttttccccaagaaggagtgctcgaaagtgaaaggggaggcattggtctgctagagggagggcggcagcaagctgacttgataggcagaccgcagcccacctgactgcctccagacccgctgggtgcctgatccctggaagtgctggggctcttccaagcccaggcctttaggagagcttcctcccaagacaggacagcttgagacctgggatttggggatcacaccagtctcacacctccctccttaggcagggcagggcggcatcagacccctggaaggactgtatgtcctttctttttcctctgcttcagtcacctagcttgggcagtgctgagcagtgtaccctgccagggggcagtcagagtcacactgtaaggacctgtattcctgccctgggaggaaggtgggggtcactgggtatttcttgtagtcacatcaaccagtccctgacctgtggagaactgtgaaaagagctgccccaggcccagtttggagcagacctgaccgtcctgttgctttggcttcagggatgccctttaatttcaagctcctggcttgctgtttggaataacccccatactgtgcagcacacaatgcctgctagaaggaacatctagaagagtgctgtgtgacagaaatagtgtatgaactatggatagatataaaacaacgttttctagtagtcgtgttaataaaaggaagaagaaacagctgtgtcttagctggggctgccataacaaaatactgtagactggtggcttaaacagcagaaatttatattgtcaaagttctggaagctctaagtctgagcccagggtgcagggtgctggcatggttgggttctggtgaggaccctcttcctggcttgcagacatctgccttcttactgcattctcaaatgacaggggtggggtggggcaagggggtgttttcctctttttgtaagactgtgaatcctgtcctcattacctgatggccccaccctcatgacttaatctaaccctcactacctcccaaaggtcccgtctccaaataccattacactgggggtcagaacttcattgtatgaattttggggggacacattctttccatgagatggaatgaacttcaatagtatattttactggcctggcacagtggctcatgccggtaatcccagcactttgggaggctgaggtgggaggatcacgaggtcaagagatcgagaccatcctggccaacgtggtgaaatgcgtctctactgaaaatacaaaaattagctgggtgtggtggcacacgcctgtagtcccagctgcgccagaggctgaggcaggggaatcgcatgaacccgggaggtagaggttgcagtgagccgagatcatgtcactgcactgcagcctggtgacagagtgaggctccgtctcaaaaaaaaaagtatatttcactgaatttgatatatacaaagtaatttcagcctgagatcagtattaaaacgagacattttgcattccatttttgtactgtcatcaaaatccagtgtgtgccttacagaacatcctcaactctaactttccacatttccagtgctctgcagaacatttggttagtggctaccatattagacaatggaatctcagaagggaaggtagaatttatggtgtaataaatgtcacatggtgcttgtcacaagatcagtcagtggttagttggttctttaataattcttcaagtcttttgtggtctgtgcttggccgagtgtccttgggaaacaagccatttggctcttgcatttcagtggacatcctggacactcaatgctgtatcctacaagaactcctgacacctgtctctgtactctgtacttggggttcagatcaaagggcttatgggggtggggtaaacagtattctaagtgaagtgaccagagctcttggagagggacctgcctcctgtctatcccatcaggaagtgcaggccctgattactctgataggctgacccaaagaagtttcttggccacttccttgggggagggcggagggagtgagctcatgaagtgaagtgactttcatccctcaggcctagtgtagcggtagctgccaaggacatgggctacagagccatgggccgtgggtgcccctcccagagaagagtgttttctgctacctgtccttgtatctgctgggcactcgaggctctgccctgtctgggtgggctgccttttgggaggaatgggtatcctccctagctcttaggggccctttcaaggcagatgatgtgagaaacctgcccatctttccaggccctatagctgggtaaaaacataagatctaaaccctatggcctcccatcacttgggtgggcctctactgtgtactactctgtgggtctttctgggcatcaagaatctccagaagcacctggacctctgctggcacttcacctaaggaactcctgttataaggagccaatgaagagcccacattctatacagtggtcctccatgtcatagacccctctgagaatctgatgaaagctgtggacccttcctccaggaaaatgtaaatcggtatatgtgtgcatgtgtgtgtacattgtatgcacccactctgttttgtacagatactgggaacctactgccccctgattagactccttgaagtcctggctgccctgcacatatccactgtagtagtcttaaggggcagcttgttctgcgggggaggggtgctttttccaccttggtacctcacttactttgccttttgtgatcctgccggatgttcagattctagccctggtctctctttccagaaagctgtcctcttgagtgccagcctatgcattcagcccctctgcttgggagctcagggtagtgcaaatgagaaccaaggagtatcggttcaggagtttagatccattcacggatactgacctgtcaccatggattgggatctggagggttgaggactgggtctggataatatttttgctagtgactgtagatagactctagatagtcctgaggcagggtcctggttgcatgggcctcactgtagaacagggtttctcaaccttgacactattacattttgggcctgatgatactctgttgtgtatgggtagtggtgggttgagctgttctgtgcattgtaggatatttagcagtatccccgcctctacccacaaattccagtagatcctctttaatcatgtcaacccaaaatgtttccagatcttgctaaatgtccctggcagaggtgagagccaaatcatttcagattggggaccactgatttaggatgttctcacgctttcaaagaggtctacagttgtaagaagtaggggtaacggcttttgagtgcatatccatccccccactctggatgcagggttggaggtgaggttctcctcaaagcctaggagattcctgcttagtgaaatctgctcagcacgtgagagtttggttcaaaattagtggttctggtgtacagcttaccaccgaggagaatcctggcgtccttgagttttcccagaagtggttcaggtttcagggaggcggaggctgtgggtggctgggcagcctgcctgcccgcacccgcccactcgcctctgaccgttgccttaaggctggcactcagcctcttcctcccgtacacgcagaaatgccaggaagtgcctgttgctggggactctctgcctgcccagcagcccctctctgctcacctgggggcctcaggagctaaggctagccctgtctgccaagcggagcactggggttgtagcaggccgtgggcatgccccttcccctgagtggacctgccatgtggcgctccggggagccgcagaggctgtgggcctggagcccccaggccggggacaccagggcaggtgggcagcctctccccaaaggtatgggtgcaagtctctccctcagggtgtggtggccagatgggaatctgagggcagggccaggcttcctgctgtggacctggggaggtgtgggcagcgctgccttagacaggcagccgacactggaggccctggtggagcggttggtatctgtggaggcttgtctattgggcttggcaggctggcagccccctgtggctgcccccatgtttattttctactcctcccctggcctgcttcaagcttggctagggaacgcttctgtgggactctgtctgtctcatcttgaactcagtgagacacagtttgctgcactgggaagtgattacaaactggactcttagggtggaggaagcatttttcaaagacccagtttccaagtgctccacatcactggtatgtgaagtgcttgctgaggttcagacttcctagttccatctgtttttggggtctttacaaaggggactttatttccttctcagaattctttctcttccttccctccggttctatcactaattctgtgttccaaaacagacacccacccccttgttctgggctttcttttttggtctctcattctctaccagacttacgggtccatcccagccctagaggtgcctattccttgtggtcctgggggtactgctactgaatgcccaggttttctggtggtggaaatgctgctgccttcttctgactctattacattgctcagtgatgtctctgactaagacagtggtaggtactggaaatcaatggataaagcaggctgggattgttcaagggtcagccatgtctcttcccggcccaggaccaataatggcttcccgccttcggacagccccatgctttcccctggttattctaggcttgctgtacacatgcatgtgcctttttcagattctttctgggactggcagctccaactgggtgttttcattcatggacgcatgacctctggaagcgggtgtggaaaggaagcctgtcccactgggccaaatgtgaggccctcttcccaggggaaatgttgtctggatgggtctgacctgctggacaatgggcctnctccctggccagtttctgggctggagctgaggtgttttgtgaggcaagctcatgctctttgcatgtgtncctctgccgactatttcagtnccactctgacaaccaaggaggctaaaattagttctggagaaggaaaaggaaggctggttggaaacccaagcccttggctggagaatggaggaggctgcttcccaggtttgtgcctgagcatttcggaggatgggatgagaccagctgttatccgtccatctgaggagaaggaggggtccctgtggcctcccagacttgaaccaattaaaacaggaaactaacttggaagctgactctctcgagtgttgatgccaggatattttttccttctggcttgtgcagtggcgcacagtgttttcaggtatgaggacaatgccttttaatgaatgtccagtgccattgacaaccctcctccccctcccctccaactggattatgtgtccgttgatttagaaagcatgcatgagttttcccagcctgggctggcaaccatggtttaagaactcttattttatgcactttttgggaatttccttctcactgaggtttgatattgggttagaggggagtcctgtggcccagggctcacacaagaggtcccgcttctctgtgtagtgagggcatagtgaatcaaggctcatctgctctgggccttagaaaccagaggagcagaagggttagagagatgaattctggtttcttttcccacctggctggctccttctgtgaaccttctggctgagggtgagacctacagggctgtgtgggagtagaaggagggccagggcaatgtagtcctatctcccctgccctgaaacctcgcatccaaacctcccatcactgagaggttagccaccctggggtatagttgggggagtagaagtcacttcccccataactaattttcccatttaaaaaaaatttattactttttaaacaagtaatatacctacattatattgcagaaatttagatgttacagataatactagggtctccttttatcacttctgttccccatccgaggccccctccaaaggtaatccttttaagattgagatgtattcttccagacatttttacttgtgcatctatagaaatacttatagaaatagagaggcttttggccgggcgtggtggctcatgcctgtaatcccagcactttgggaggccaaggtgggcggatcacctgaggtcaggagttcaagaccagcctgaccaacatggagaaaccccgtctctactaaaaatacaaaaaattagcccggcgtggtggtgggtccctgtagtcccagctactcaagaggctgaggcaggagaatggcgtgaacccgggaggcggagcttgcagtgagccaagatagcaccactgcactccagcctgggcaacagagcgagactccatctcaaaataaataaataaataaacaaacaaataaataaataaataaataggcttttttccacctaaaatggtattcaagcatttaattgaagtataaaacatatacagaagaatgtacaagtaattaccataagtaacagctaagaagcattttcacaaattgaatacactggtttagtcagcatccaagtcaagaatcagaaattttccagccccccatccccagcaagccctgttttgttccatttcagtctctgcccacacccactaaggttaactactattctaacttctaacagcataaaatagtttcatctgtttctgtgcttcatatgaatagaaccttacagaataaactgctttgtgtccatcttttcctcaccatgtttgtgactttaagctatgttggatgtcatggctttttaaactcggagatttgctttggcaaactttctgatacatatggatctactttgatctttttaataactacgtaatattctaaagtttaaatatagactacattttacctagtttcttactgatggactttgtgattgtatagaatgtatgcagactgtttctcaagagtagatgagaaaataacatctggatcataagcacgtatgttatcggttttaatagatactgaaaaatggttataccattttatttatttattccttgaggctacccaagtgatggcagtgagggtagaagctgggtgatatggcagttggctctctgcagtaatctgtgaacatccttcctacctccacaccccaacccctgctgaaatgctaggttacagagtttagaaatagcctggtttcatgaagggtgcgcggacatgggaagggctcacttccactggcttaatgtatgaggagacctggagataacctctcgtgcctgtgtctcctaccttgtgcctgagtctcctgggtactgtgctgatgagggaggtagcactggactagccaggatgtgctggtctgggtttgggatggaagtgcatatgtatgttcacttaccaggctctatgctgcgtgcagactctgaagagactaaggcacttgttgaaggtcgctgaagagctctgggtaacagcactactggcaagcccactgcatttgacaaaatctgagtgtgacaaattctgatttcatatgtcgtgataatgacgttgggggtattggagaaacctgtagaaaaactattttagagtctggtgagaagcttttcatgacagaaggagctctggtgagtttctgttcctggctgagtgtatgccttgttccctgtataagtctctgccacagttggcagaagacttagggaagatagtttgggatgacttgttcaccaaagctgttgcttcccagtcttgttcttcagcttgctgcctactctttactgttatgttgggattctttatgtaagtccacttgtcaggccctgctaatggatttagatgacactcaagtttgtggaactgtttctagtacaaatgatactccaatcagctttcccacattatacatatgatgtgcgctgtttgtgtcttagtctgctcaggttgccataatggaataccatagattgggtggcttaaacaactgaaatttcttttcttacaattctggggactggaagttaaagatgaaggtgctgtcaggattcgtttccagtgattcttctctcttgggttggcatatggtagccttcttgctatgtactttttgctgtgtgtatccactccaggtgtctcttcttataaagataccagtcctgttggactggaggcccacctttatcacctcatttagccttaattacctccttaaagtccttatctgtaaatatattaatggcaaaacctgcaattacttttgcaccaacccaatagtcacattggaggttagggcctcaacctatgaattttggtgggactcagttcagtctatgactgtctgaaacaataaagtttggttgaaagtgaattctgttttcctcttgagtgacattttggaatggaagttaattttttcagggctttgccctggtgtctctgttgttcttgcttaatactgcccatggacaatcttgtctacactggtgggcttaatttccgtgtatgtgtgcaggttcccttgcctttgggcatgttatgatcctgaaaatatgtctaaaagctgggtgaaaagtagattggagatgtactttcctgataatcaggaccaaatatctttctaaaggtaactggacaaactacaaaaaataaaacttctctggttgaaggcatngtatatctaagaagatactgaagaactaccaggccagtatctgcatgagaacaaaggcctagggtgatgattttggtattttgagtctgtttttagtcataggggcaactgagaggctgcatttgatagctttgtggggctaggaagacaggaattggagttctaagcaaagggtgggcagagtcaatcacttatttgggattgagatcccaaagatatagaagttagggggaccaaaatgtagacaaaccctaaagttagattgaaatattctgggctgctgggttgggtggtgcacacctgtaatcccagcctacttaggagactgaggcggggaggatcagttgagcccaggagttcaagaccagcctggacaatataggaagaccccatctccaaaacagaaaatattttctgggattaatggtacctttagacatgttaattctttctagaggatttatgtcatcctaggcctcgaattatctctataattttgcaaatacaatgactggctggtaattttaagtaaacagccagcagaaacatcacagttgaaaccaacctggatgacctccaggttggagttgccatatacatatttaaaaatagaagtgttcgggctgggcgcagtggctcatgcctgtaatcccagcactttgggaggccgaggtgggtggatcacgaggacaggagttcaagaccaacctggccaacatggtgaaaccctgtctctactaaaaatacaaaaaaattagctgggtgtggtggcaggcacctgtaatcccagctacttggggggctgaggcagggaattgcttgaatctgggaggcagaggttgcagtgagctgaaatcgcaccactgccctccagcctgggtgacagaatgagattccatctccaaaaaaaaaaaaaaaaaaatagcagtgttcactgtggtcaaggaaatgagagtgggaatttcagcagatagctgaaaactataaacccaaggaaaaatctcttaaagaattgttttacgtaataacagaaattaataaatccatgaatgcttttatcaggggattaggtgaaactgtatagagcattagtgaattggatgatagatcagaaggagatataaactgaagcatggacaggcagaaagatggataataacagaataaagagaaacgcatagaggatgaaatgagaaggtctaagagtcatgaaatcacagccacagaagtaaaggagagagaatgaggcagaaaagttaatagctgagaactttctaaaattaattaaagacatcaagccacagattcaagaagtcctgtgaatcccaggtaagacaataaatttgaaaaatccacatctatttccatcacagtaaaaattccagaaaacaaagacagaatgttgaaagcagctagagaaaaaaggcattactatcaaaagagctgtagttatactgacagctaacttctcaatagaaacagtggaagccagaagataatagaatgatagctttaagtgctgaaagaaatagttgtcagcctaaaattctgtatcaagtgaagctgttgttccagaatgaaggcatcatcatgttaagtgaaataagccagacatggaaggacaaataaccacattatctcacttatatgtggaatctaaaaaggttgatctcatagaaatagagcgtagaatagtggttaccagaggctaaggaggtaggtaggaggtcagatggggagagggtggtcaaagggtacaaaattacatttaaaggaaaaaattctggtctgttgcaccgtagggtgcttgtagttagcaagaatgtatggtatatttcaaaatagccagaagagaggattttgaatgttcctaccacaaagaaatgataaatggtaatggatttgttaattaccctgatttgatcattacgcagtgtatatatgtatcaaaacgtattctaccccataaatatgtacagttattacgtgtcaatttttaaaccaaaacttcttttttttttttttttgagatggagtctggctctatcacccaggctggagtgcagtggggccattttggctcactgcaacctccgcctcccgggttcaagtgattgtcctgcctcagcctcctgagtagctgggactacaggcacacgccaccaagcctggctaatttttgtattttttagtagagacagagtttcaccatgttggtcaggctggtcttgaactcctgaccttgtgatccacctccctcagcctcccaaagtgctgggattataggcatgagccaccacgcccggcctacaaaacttcttaaaaaagaatgaacatgtcaaggaatgtgttcttcaggcagaaggaaaataaatccagatggaatgtcagagatgaagagaggaatgaagagcaatgaaaataataaatattcgggcatttatggtgagaatgtgttactgagttggaaataccacaaaagaaaatgcttggcaacaatgctatctgtgagagtggagtgaaaatcaatttaaattgttctaaagattcttacaatgtccaggaagagagtggaactaccaaataatactaaatttggataaggcatgctatcatctctagggtaaccaaaggatagattataattttcaagctaaaaaagacacaaatgggctgggtgcggtggctcacgcctgtaatccaaacacttcgggaggctgaggtgggcggataacctgaggtgggttgttcaagaccagcctgaccaacatggagaaaccccatctctcctaaaaatacaaaattagccaggcatggtggcgcatgcctgtaatcccaggagggaggctgaggcaggagaatcactcgaacatgggaggcggaagtttcggtgagctgagattgccccattgcactcccgcctgggcaacaagagcgaaactctgtctcaaaaaaaaaaaaaaggcagacaaatgggttgagtgcagtggctcatgcctgtaatcccagcactttggtggttcaagtggggaggatcactggagcccagagtttgagaccatcttaggcaacgtagtgagaccccatctctaccgaaaataaaaaaaattagccgagtgtggtggcattgcacctgtaagtccgagctacttgggaggctgaagtgggaggattgtttgagctcaggagtttgaggctgcagtgagctgtgattgagtcactgtactccagcctaggtcacagagcaagaccctgtgtccaaaaaaaaaaaggagacatggaataatagagaattcttcagttgagaagaaagcaatgagagacaaggggacatagaccaaatgagataaatatagctaatatttctaataaatatatgatgttaaaattattattatttttaagacagggtcttgctctgtcacccagggtggagtgcagcggtgcaatctcagctcactgcaaccactgcccctctaggcttaagtgatcttcccacctcagcctttgaagtagctaggaccacaggtgcaaaccaccacaactggctaattttttgtatttttggaagagatggggtctcaccatgttgcccaggcttgtctcgaactcctgagttcaagcagtctgcccatgtcagcctcccaaagtgctgggattatgggcatgagccaccatgcgggcctgatgtaagaattcttaataaataagtaaggatggacctgaatacttactaaaagctctgaggccatgggtggagttggcttaatctagggtgatctgatggggctgttttgggaattagttggattccccctgagaaatatcttctgttttctctctggagggggcaggcttggatatcaacatcctggaagtcaagggggttgagaactaggggtgcctgtatttggtatattgttctgtattcctcctgtttcagtgtgatacctgtgtcctcagatttgcctgctcctctttgtcgaagaggctctctgttcattttctttagaaaataaacataatctccgctgggttggagaggggcaaccatgatgagtggtggtgggatctgaggatctgactgtaccttactaaccaactcttctgtctttagactcatttttaccccattctttcaaagacatctggtgccacaaattcctgagttttgaagggttctgtgggggaagtcacattgcttttctactttatccagagccaacttaggagtctgtgtgatcagttaccatgtgtgtaagtgctttccagccttgaaatgtcatttctgtagttctctcctgttctctttgttcttacaggtttatgcattaaactactttattgcagttttagtgggactacaagagggagcaaaaaggaaatgtttgtgtataatccttggcctttacctggaagctctccttccagtgttttccaggaatgatggggcctggaaaaaggcatgtatttcagagctgtgggaggatggtgccagggccttgtttacaaagtccaagtgggaagtgacttgaggtcacctggcttggttccttgtttctaggcgggacttctgaaggcagatggagctcctcctgtcaccttggaaggtgctcctgtatttacatttctggcatttgtagtgaacaaaacagtggaaaatcctcatgcaaaatacatagaaatgctggaaaaagtataataaacacccttttaaaatgcatatacattgctgcatgtataagaagtaagggaaaaacaagaaggagctggaaactagagctgtatgccttcactgactgaaactgctgattcctgggggactttgcctgtctttataatttagagatgtgggtttaagtagcagtgtggacaataggagagaagatgtggaattgagactgaggccttggcatggcttcagactcctgtggtgttataccttcagtaaaaatgtgggccagaagaaacatgtctttgttgacaaagagactaaataatgaaattgtctgagactgggtagggttggggttggggtagtttccccgataatttataaccataggcctatgctcatgtgagctgggcatttataccatccggttctctggtaaactaagttgagaaattaaagtggttccaaatagttaatgtcctagggagattggcagaaggcagaaatataagttaccttggaaaggttgccccttcgaacttggcctcaaagtagtccaacagaaaaggccccactgaacataagctcagtattcaaaattctaaaaccacatgaggaaacagtaccatgaataaagtcagaaataacaaatgtcagaagcagacttccaagaagttaaattacagaatcctaagagagattgggaagtaggccaaagtacagaagtatcaaaattgaccaggaagtttttttttaatagaacttctagaaatgaaaaaatagaataattgaatttataaattgagtagaagaactaaacaacagattagacatagctaaagagagaattcgtgaattggaagttgatcttcaggaattacctgtaatggtgtttagacacagaattggaaattaggaaaggagggttaagagactgggcagaataagaaggtctaatatgcttataatagggatttcagaatcatagaatttggagatgcaatattcaagttgataatagccaagaatttgtcagaattgaccaaaaacacaaatcattagactaaaggcatagtgaaccccaaatagtataaatttaaatatatacttagacacataccttgtagtgaaactgccaagagagaaagcagccagaaagaaaaaaacagaatatctgcaaagttaaattaatagcagacttttcagcaacagtagtggaagctagaaaatagtggaataatattttcagagagctgaggtaaaataacaatctaaaattttatgttcatctaaattgccattcaggaagaaagaccaaacattttgagaaaagcaacaaaggctcctctgccaagagatctctactgaaatattttttttcagtaaggacagtgatctcagaaagaaaggcagagatgcagggagagatgactgtatggatgcttaccaaatatagacacaaataatgtctgatttgggagctgggtagtaagaacagtgacactaaatacggaacacaagccatatgttaaattagatgtacattggaagagtcattagagtttaaaatatttaagttcccatgagggatggtagagatgttgatttaggcttttagtataagtgtacccattaaagtttataggcctagcttacaacggaataggaatgagatgtataactttaaaagtggctaaaataggaaattttaagagataatccaaatagaggtaacggtagaaaagaaacaaatttaaacatacccagtaatcatatatataaacatacccagaaatcatcaatgtaatgagaccgaactctaattaaaagatggtgttagattgaattagggggagggaagagagaaagattttttgtttaagttagaaaaggtaattttctctaatactaacacacgaaatgtcatatagctatgttaacatcagataaaatggactttttggccaagagcattcattacaaatgaagagggttactatatagtaagaaaaattttattaccaagaatatataaaataatttctgtaactccaaggaaaagtcatcccgtagaaaaatgagaaaagataccaaccaacagttctcagaaggaaatgttcataatcacaagaagatgatcagtctcacaagtaatcagggaaatgcagatccaaattgtgtaccatttcacactcaccaggtgaaccccaggtgggggctgtcatctgttgggaacttggattggcacatccactttggagaacagtttaacagtatttagtcagttgatgatctttagactctatgacctagccaagaaacgcccacacatgagtgcacacacacacgcacacacacaaatgtaaaaaagaattcatgatggcatggctgagatcaacaaacataaataacctgagtccagtaggtgagtggatacttaaagttatgtgaggttataagcttctgaaataaatgcacttcagggctgcaggagaggcagcagtatataaagaacatgcactctagagacaggctgcctggggtttgaagcctgattttgacacttaataagtaacttgggtaggttacttaatctctttgtgcctcagtttttataaaatgaggacctgcacaggtttatcgtgaggattaaataagttactctttgcagaatgcttagaataggacctgggatgtagtgtgagctgtgtaagtgttaaattaatgcatatcaacctggatggcttacaaatatatggatgaaggacaaaaagcatatgtattagagattgtatttggttgctagaaatagtcaagagttattctcttgggtaaaagaaatgcaaagacacaatgttggaatattttgggtttttttctcccctattgtacatgccgctccacagtgtgcatacacgtgtgtgcatgtgtcagtgtctttatctgttatacactccagccttccttcctggccccatctgtctcttcaggttccctccatctctacaccccagctgcccttaatctggtgctggggaggtggtggagatgctgctttgtggagctgggggctgtggaatcataacatggataagtcactgctcttggccctccttcgctcttatggagggacctgctagggctataaaggcagctgagcagactcagggctgcctttcgaggggtgctgtctgtggggagagctgcctttcctctctgggcagatgtgaaggctggacaccagagggagaacactggccctcctgagatgttcttgcttgtcttcctcttgggcatggaggcttctggcagggtgtgcctcattgtgctggcagaagcagacctagatagatgtagtggtgagtggcactccttctcacctggtgagtggcattccttctcaccactacagtgcccacaagggtggggctgggcacctgctccctggggtaggtggctgccaaggggcctccaggagccaactgaccagtggttctgctggctgctggggtcacacttcctctaggagacactggctggactggggacacccaattgcagaactcagggactccaggggaggtgggcatggacactccacctctgaaccatctcctcttctttctctccccattgcactttgagcccctcacagatgggaccttggtgagatttctcccttttctcctcagggcatagtgggtatgtccaaggcctactggactgagctgcttcataggagaaacgaacctcccattatttgacctcccagtgcgtggcttcgagcatccaaactagccggcttaggttctgctaccaggaatgtgggttcagagtgcagtctgcatgtactgtgtgtgtgtatgtgcatgtactgtgtgtttgtgtgagggtcgggggtggtgtatgtgggagtggtcctgccaggagggatggtttggggagcactgggtactttctctctactggcattaggccccttggagcatagggactgccccttggggacactgccacttttatttcagcttcctttggaggccagcagttggtttggctgtgactcagggatgcagcaagccccttgtcctggtgtctgggggccatgctcacttacctcagggctatgaagcagcaggcctaagggggtaccataagcacccgcatcttgggagcatggcttctcctcctgccaggttaggcgagtgggctgggggtcaaggggagcctcctgtgcatggatgccctggcttcctgggtgtgggtgggaatctgtatctattaaaaggcagaggtggcctgtggttggagtattgccagaggctataaatagctgagtgtgtgaagaaggagattctggggaagagagaggaatgggggaggcccctgggtctccaggtggcagcagagccctgtggtgagggaggggcatgggctctgaacataaagctcttgtaggcatggtgtgacttgatgggctgggagtcatacaggggacttgtgttatgagggattgtcataggcagtaggggatggttgtggctgtaatatagccaatgtgccaggcagtgttctaaccactcttaaagtgcattaactcaattagttcctacaactaccctagctgtgaagtattggagtaggacttgaattctggcccgctcacggctgccatttttcgctgggttgcctgtaggaggatctggtcagatgggggtcaggtgacatctttttgaaatggagtctggctcttgttgcccaggctggagtgcaatggcacgacctcagctcactgcaacctccgcctcctgggttcaagtgattctcctgcctcagcctcctgagtagctgggattacaggtgtccgccgccatgcctggctcatttttgtatttttagtagagaccaggtttcaccacattggccaggctggtctcgaactcctgacctcaggtgatctgcccgtctcagcctcccaaagtgctggcattacaggcgtgagccaccgtgcctggcccagctgacatcttgaacccttgggtcctctgagatttggaactcccagcctcttcacttgggtactgcccatggtagtggcaagtgggtggtccctgacttatcagtggcctggagagaggaggttactctgttggcctcccttgtttgggctcctgcctcagcacagaggcttgttgcttgtctgaatggagatggaaactctttgaggacctagggcttgggctgcaggctgaggccatccttgttgtcccctcctttcgacatgttgctctagccatgatacctatacccttctgtccttctgtctgtccacccatccatctatgatgtgtttggaatgattctgccacttaggacggcaagggtcctgcctttgtcggctttccagtcttgtggggaaggcctgacatttagaaagtagttgtcgagtacatgtgtaatgttttatttctcatacaagtgttcattgtgttatttcctcttgagattatttttggttatattattggtacactttttggatgtctgaaataatcctttaagcaacaacaggccattagtcaagggtggttaagttaggtggcaggggaagcacaagggccagtggaaatagagagtttgcctggtctcaggggagagggaagaccgaaatcagaggaaggtgggtaaccttacggccagaggtggtaacttacgacttacgctaagcctagaagccaaacacattcaagggtgtgacattatggtgtggctgcagtgaggggaggaaggtaggggagtgcccagcttccctgtctgcagtgcagcttcatggctggccccacaagtctcaggtctccacggacccccactagaactgctgccgtggatgcagtggggcccagcctggggagaggaggccctgtggcctctgggcagggtgcttcgaataacccagtaattgggtgctgctgcaggcagacagggacaatgtaggtgcaagcctcagtgcctggccccggtgtgcttgttcagcctttggtctactacccccaccccaccctctcaggttctccctctaaaccttaaagccacatgcttgatgaagggcctggctggggaagccagtgtgtacccttgtaagcctctctgtggaccctgaggcccttcctttagaagaggctgagtcccagctgactgactggtcaggaggccatgcattttcctttcacaggtgtcagagcctaggccacctggtgcaggatgaccagagctgtggctgggcactgccattctgattgggtgacatttcggacccttaggtgctacctggatccttgagattcgttgcttgctcctgcccctggaagaagcatcctgtcacttcagggagttgcagaaaggggttgggtttgacaggagaatggccgctccagtggtggggggcttctttcacctgacagccagtcagtatccttctctctggggtataccctgggaaatcaagctctttcctcatgaaggccaacagtaggggtggagatgagcgtgaggatgtccttaggctacgctagtgttcagggtactttgccctcccccagggtcagggcagggttcgtgttctttcctactccagtcagcctttcaggctgatggcgaagtagggctcttggctgatggtgggctggctgtctggtgggattgaatctgacccctccctccttcntgggatgggaatagtggtaggagaagaccagccaggagtggtgccaggtcactggcctatgtgggccccaaaagtgtggataggatggctggatgcttggtgcaactatcctctcgggtgtctgtgtggggttctggcagtgaggttgtaaatgccaccacctgcctccattgtgggcggcctataatggggtgctggcagagctctcagacagaaccgaacctcctttggcatctccatactctttcctatgtcagggctatgtggttcctgcgggtagtgggagtagactggggctgggactggaggttgttttgtaggggatggtgaggaagatggatttggggaatgtttgaaatcaagtttgaaggaaattgtttgaatgggcaggtgggggttgaattggttgtccacctggatggcacttcctgcaccaggtggaagggggtccagaagtgatggggagtgccctggggtcatcaggaccctacccaggagaatgatctgtgattgcaggttaagccaccagctagcgctcctctgcctgaggcatgtattccccttggtgactctgggaggcttaccctgtacacgcaggcctcattccttaaggtctccagccctgccgagcaccaggtgtggttgctgggtgtagaaaggacacttacagggtcctttccattccgtatgggcagggagttgtggaggacccactggcatggtctccctggggaactgttgtgagaagggggcttgggggcagagacaggagcagcaggaagccactcccctttgtagttttcccaggtggtccttgagatctttatcacaatcacctgagacagacaggggtgattaaaagcacatattctgcccccattcccattgggatgggtctggattgggcctggaaatacgtatttgaatgaacactgctcccctttcccacacctgcaacatacagtgattccgatgtgcactggggttttaagggggcctcttcatcggtttctgctgcagcagggaagtagcccccacccccacgcaggagcctcaggtgttggtgccctttctgtgcatctggactctgtctgtctggctgtttatccatccttctgtggcattaggtttcctgcctcctccctttggcttaggcctaggggcagctgtgatgggctgcagaatgaggtgggggctggtgccagctggcacacgtaaattaagaggtgtgggacggatgggtggcctacttccaggggtgagtgcaggaggttggtgaccccaacccaccacccggcctccctccctcagggtggcctggcacccaggactgggattaggggttggggtggtggtcccaggggcatgctcagtggttctcttttctctggggcacaggctctgggcgtggggaggctgagacacgggagtgcatctactacaacgccaactgggagctggagcgcaccaaccagagcggcctggagcgctgcgaaggcgagcaggacaagcggctgcactgctacgcctcctgggccaacagctctggcaccatcgagctcgtgaagaagggctgctggctagatgacttcaactgctacgataggtaccccaagacttgccctcctttcctcttggacccacctgcgcttatactgcccactgggccatttgggtctcaggatgtctgagtgggagataaaggaccaagaaggggctcttgagatggtagccatggccccacgcccttccacaccctatttgtcctaccttagccctgaggaggggtctcagtgtcaacccctggctgttcttccttggctttgggtctcctgtaggggaggtgagttcacaccgtccccctggtgttgcccatgaggtgctctgtctgtgaggaggggttggcagggcaggcctgggggagtcttgcatcccccaggtgaggggtatatggaaaattctgtgcctccaggcaggagtgtgtggccactgaggagaacccccaggtgtacttctgctgctgtgaaggcaacttctgcaacgagcgcttcactcatttgccagaggctgggggcccggaaggtaagggggcagtgtggaagtggggccttgagtcagccgacctgggcttctttggcttggagcgcttggctcctcagttgggtggggtgtggctacagggccctgtattctggctctggaagtgtgagggtgggcagactgtttgacacagggctctgtgtgtcccccagtcacgtacgagccacccccgacagcccccaccctgctcacggtgctggcctactcactgctgcccatcgggggcctttccctcatcgtcctgctggccttttggatgtaccggcatcgcaagcccccctacggtcatgtggacatccatgaggtgagacagtgctggcttggggcagggcaggatagaggtggggaggacaggccagacctttttaacccttgctctcccccaggaccctgggcctccaccaccatcccctctggtgggcctgaagccactgcagctgctggagatcaaggctcgggggcgctttggctgtgtctggaaggcccagctcatgaatgactttgtagctgtcaagatcttcccactccaggtgagtgtttgaggggctccatccaggtcctctgcctccactgtagcttgaactggaggctctcctgacctggggcaatccaaaccccaaataatattgtggtatgagagaaaagtgagccttactgggcctagttactcatgttacacttggctggtctgtagatttcatgcaactatggaattttatcataggactagggtagggctttgcaaaaccttgatttgccccggttaccagggtttggttttggacattgggttctttccagcggccctggacaccaggtctggctctgcctcatttgtggggtgatacggggtcactcacaccccatgcatggaccttagtggccccatttgtaaatcgaagtgctagccttaagtgatctcagggatcactgtgggcctcatgctctggggcctagcttaatacaggtcttctcctggtccccttacaaatgctgaagctgggaggctggggggtggggattgggctgggaggcttgagggtggggaatggggaatggttgttctgctgtagggcaatgtgactgcagcaggggtaagccagccacttgtccccccaacccctcgcccccggcctcaggacaagcagtcgtggcagagtgaacgggagatcttcagcacacctggcatgaagcacgagaacctgctacagttcattgctgccgagaagcgaggctccaacctcgaagtagagctgtggctcatcacggccttccatgacaaggtgagccacacccatcagaatggactctgagaggagatggaatgtcccctgggtggctctccataatatgatgaccccttccctgtggaggtgtccaccatgaagtacgtctgccccggtagcactatccactatggggttactcctgccataggtgtggacattggttcccctatgataggaacctctcaccctgggataagtttttatgataagagtagtgactccatgattcccacccctagccctccctgcctcctggcctcatccatcttccatatcgattgtagtagccttccaggagagcagcctagccatgggcccactgagacttctctgccagggctgggctgggtcctgtcctgtacccagaatctgtgctcaagttctgtgccgtcttctctcagggctccctcacggattacctcaaggggaacatcatcacatggaacgaactgtgtcatgtagcagagacgatgtcacgaggcctctcatacctgcatgaggatgtgccctggtgccgtggcgagggccacaagccgtctattgcccacaggtacctgggtcagcaggtgcctttcctgcacttgacctggagctgtgggaagggttggtgggcgagagcagtgtctggagatgtctcaacttcctaaacatacttactctgcttgctgtgtgtccgaggcagctgggcacaaaacctggccttcccactgtgtcctggggatggcatggcctcccaagctggttttgggtgccctctaatggccacatgaagtgctgactccattactttggttggagagttggctcagtacttctcaaattttctagtttaggatccctttatactcttaaaatgactttggtgtaagtggattatgactattgatatttgctgtatttgagcacacccacacatcccattcgctgtcagagtgaggacatcacatctcatgtagcctcgggaaaactctatgctcctaagagaatgagccttataaaagcaaataaatgaaaataattttgactttatagattcccttggaacagtcttagagatcttctggggtcctcgaaccaccctttaagaaactctggatgagctcatcactgtcatgcttactaaatggcaggcagtgctctaaacacttgagaagtatcaattcatttgaccttcattaccgcccattgagacaagtactgtatttctcagctctgtcttgcagatggaggaacagtagtacagagaagttgaatgacttagccaaggtcttgtagctagttgagtctggttctgtgactgtgagggaggggaatgaacctcaaattccagcgttcaaagctgaagggtccctgatggtaataacagtaatgacatagaaggtagactgtatgaaattgccgtttttataggtcaaaaggttgaatgttgtctctgctatatggctcaacttaataggaatacctagtaagtatgccaggtgtggccctaaacatttgcacttaccactcagtcgaatcctcacaaggctgagacaggcactggggaaactgagtaccacaagtagctttgcttagttagaggtggagctgggtgcatgcaatagcacccttgctccagccggccttcatggtgagcttgagaccctaaggggtctctgcaggatcctaggaaagctaatattaaattcctattctcattcacattccaaatgctgtaaattcttctcagaaaacttgcatcccaggccagtgtgcctgtccacaacccctctgagaatatatgggctggcctttgatagtgtggggactgggacagggtctgcccagccattagggtaggtgttgctttgccaaccctgggggaagccttccatctgaagtgcactgagggattctcacacccatgtcggcgcctgcagctgcctgcttgtgctgcttcacctctgcaccccaggtagggtgggatggcctggtctggggcctgactctagggcacagactctagtatcttgggaaccaaggtgggagttggatcatgatgttaagctttatctctgcccacttgtttccacagggactttaaaagtaagaatgtattgctgaagagcgacctcacagccgtgctggctgactttggcttggctgttcgatttgagccagggaaacctccaggggacacccacggacaggtaacaggcctcacagggcaggaagagagggacagacccagggtagatactttgccctttttgtgctcagctggggaggtgcagggatgagggtgactgcatgcgttcagagctgtctgagaacttagagcaatgctcttgtttgaccagtggagaaaccaagaccaggaaggcagtgtagtttagcttccgtaggacagtcagctgggaaatgtagagattccccactggggttttgaccactagtccttgcaatcttagtctttctctcacttttttagttttaattcctaagaccaaacaaagaaatgtactaaggatccaaacaaagaacctggaaaaagtaactaaaaattaaacttaggaaatcattcctaaaacaatcactgttattattttttaagtgttctccttccctctttgtttttggtcttaatctcagtcagatacatatcatctgtagttccttgtattaatttggtaacaattccattttagattactattatctccaggatatagtatttaaaaattattatccaagtataattgatgctgtgacctcttgtaactgtggtgaatgtggtgaatcgaggttggctatcattgataacctgtctgaattgctctgtcttgcccgccatctggtgcacagaggctgtaactcccatgtcccagctgtgtgtgtatggccagtcactgtaaatcctgccctcctctgtcctcacataggtaggcacgagacggtacatggctcctgaggtgctcgagggagccatcaacttccagagagatgccttcctgcgcattgacatgtatgccatggggttggtgctgtgggagcttgtgtctcgctgcaaggctgcagacggtaagtaggatggcagccctgggcatcctagattgagtgatagggagcagtgggaccttagagtgatcctgccaggctctctctttctcctaggacccgtggatgagtacatgctgccctttgaggaagagattggccagcacccttcgttggaggagctgcaggaggtggtggtgcacaagaagatgaggcccaccattaaagatcactggttgaaacacccggtaaggggcctggttcaggcaactttgcaggggggtggagaagggaaaacccttcatgtgtagcaggtaagctgaaatcaagggggaatgggcaaatagaaagtctgcgacgttccctggactttagggatgtgttccaggggttatggggagtgaggtaggatgatgtccttctcctgatccccactttgactgaactgctacattttgggcacttgtatggtttgggcttccaataagattttgtttgaatatcagcgcttcaaggcaagtagtcgtgtctatcctagtaggggccttggtgtctcctttcccctcctgtgtatgtagaggttcaatgaacctttcctagggctgtggagtgaggccagtaagctcagaaagatgactgccatgaaggcaggcatgctgattcctgaagtttcccccaggcctctgctggtggacctgctgctgtggttggggctggtgggctctgcctgatccttgggaatatcaagtttactgtcccccaaagcttttcctcactgaagggtcctaacaaaggtgtctttcctgtctgccctatgctgcttagggcctggcccagctttgtgtgaccatcgaggattgctgggaccatgatgcagaggctcgcttgtccgcgggctgtgtggaggagcgggtgtccctgattcggaggtcggtcaatggcactacctcggactgtctcgtttccctggtgacctctgtcaccaatgtggacctgccccctaaagagtcaagcatctaagcccaggacatgagtgtctgtccagactcagtggatctgaagaaaaaaggaaaaaaagttgtgttttgttttggaaatcccataaaaccaacaaacacataaaatgcagctgctattttaccttgactttttattattattattataattattataattattattattaatattattttttgggattggatcagtttttaccagcatattgctctactgtatcacaaacagcggacacgtcagcaggcgttgaggtgctgagctgtggatgcagaaccagcgccatgctgaagagcctcagccacctcctgtcctttgggattcgtttttcccgctttctctttgtttgtcgtctcagaatctgtgacacaaagaaacccatctcctgtcttaggaaacctaatgctgcaaactctacctagaggaacctttgaagactgttacataagaacataccttcctcagaagaggagtttcctctgccctctgcccttctcccctgcctccctccctcccctccttttattttgttttagtgagcttaagaaacagcagatgtgtctttcacggatctaacgggtgttgtcctgatcgagaaaaaaactgggatgagaatggtttggactggagttggaaggggaggacggtactgggggtagggtttggaacagagctacactggactcgggcacattcggagcagcatcctttagtatggaggctacttctcaggtaaccaggaatcgaggggaaggaccttgtggaggccgagcattaacagcaagagcggggtttggagaaagtctgagattgggtgcagccctgacttacctgctggccctgaccagtttcttttcactaacttggccttgggcataggatgaaacattttttctgccctaattttaaaattaggtgagggtagaatcatcacaggttaggaatacattcttcataagacacgatgctgtaaatacccttaatggacgaaaagttgaaatacttttgtttcctcttggagcagttcagggaaatgcccaccggggattgtcctgcacagatagggcaagaggatttcctgggtggagtctgccaaggcctgcctcgctggggaccccagagtcctgcacctctggttccgccccaggtggtgacattactgtccccgttctgtggctcgtggacaagactttctccagaccccttaaagtggtacatattctaaaaaactgtttttctattatgccataaccttgctctagtcagtgaatgttcctaatgctgctgtttcaacatttgaattctttttaatttatgaaacatgctaaattttttttttcaaacaacacacacatccacatatacacatgcttcgctatgtggcttccaaggtttaaattttgaaaagtaaaagaattaaaacttcacgaccacagatcacctcaaaccagaaatacctcagaattttctacttatgtaaggtttattatatattttgttagttgtgttgtcttgtagtaagtatattttaatgtaagttggcttttgtgacaaggaagtttaaaagaaatagagaaaaagaaaaaagtttgcatcttctagggagtgctaccatttttgtttgataacgcccccttgtaaataattgtcatcaactgtaggttggctgtctgggccaagtctgggcatttatcagtcttgtttgtgaaggcttttccttctggtttctttagatcattttatttaaaaacagtgcatctcttcatcgtgagggtaggcaaggcgggggccgtggggagaggttgacctgggtgagaactgaagaggccgcctcctcttgggttgtttggagcttcacatgtaattcacatgtaacatgtaacttgatcggtcagtgttcagaatgacaagtaaccccgcttaaacttggtagaaggatggcccttagacctgaatggggtgattttacttgggatttaacttcttcagcaaattaacagcaacgttggaagagatctgtggcgcctctgtgaagcacaccgtgactcaggccagtcttttagtgcagcgtgtctgggagtgaagggttttgcccttgctggtcttggagtccacagtgtgaggggcactgcacatgcctgggcatctacctagtgtgctatgttcagtgtctggggcttactgccccggggtcctttcctctgggtgttggggcacagggtgctatgggaggcccatttgcttccctctcggagctcagtttttgcttcatgggtcaaaatgtgggctggccaagtggttacaggaacagggtttcggtaagctaagttgtcttttttttttttttttttttttttaatggtttgattttgtgctgtggtatttttcttcccttagaataatttttaatggcaaaacaggccttacagcagttgcttttctttaccatttatttctttaagaagctttaaaatatttattgaaaagtgccatatctaatttctttagctttcgcctcaggcagtgcaggcatctttacttttcatcctcagaagaaacaaacgactaacaaatgtagcaaatttactgcaggaatagttaggtcatgatactacctgaacactaaaccccagcctctttgtttggttttagttcctctgggtggtttttcttttgtgtgctggcttgattcttgtgagaagttttgacctggccaagggagggttgagccatggttctggtgtgggactttgcggtcaagacacagtacagacaggtcaggcctgcgtgccttttctctgggtggcctccccgttaggcccaccgtacgctcagccactatagtgtccctgtggggccttgccatcagattgtgtgtcaggagatggtacctttttggtgtggctggggaggagtgtggtccatgccagttctttgggcttcaggccactcttcccctcatgctgtggtgtaaagtgcacccatcaggtggtatatctggttctgatggcaagaagaaggtgggggatctccttatagggcatgggtctaggagcacagatgggccttttgccccgggtaaatgtttgtctgtttgctgtcatgtgttctttgaggagtgagccatctcgagccctgctttgaatttactgggtcatagagcctctgcctgtgctcttttccataatgacttcatgtgacatgcacttttggtgggctcagataattggtttctttttgtttttgacctcaggctctgtggcagactggggaaaatggggcctggcatcattttccctgtcaatgggaggggctgttccatgcagggtgggaggggaccaagttagcagagagtagccaaggatccttgcttcttcctttctagtgtgctgtcatccaagcaggctcctggctgtagggatgggccttggggaagaatcttctttgaaagcatctatgataactgagaagtcatccctagttggagaaatccagtaatgagcagaaggaggaagcaagtgaggacagaggccattgtattacagtgtcacgcagagggccctcaatgatggggcattggggaaggctgtagacatagtcatcagaacatcctggcctggcataagctgggttttctcctgggaccattggtcctcagcaggagttctttgcatgagttgctcaggggcaagggctgcaagtgggctgttcttaggagaaagtgacacctggcagtgagggaagatggtgagcattattagcctttgttgtccagcatggccttcttgtcctgtctgctctggagaggagcctgtgggaccagtcctgcctggggagggcatacccacacgtgccagctgattctgactctgaatacatcatgtccggacttgggggtgtttctgcagaaaaaggaggttgtttttcagccttgaacatcttcaggaggatagagactcttgctcacatattcttagcaaagggaagggtctctcatctccaggccacagagatagttcttccattgccctaagaggctaggctaaccctcttgacataacttagacagcaaagcacttcatcctgtagttgggctctgtcacctttctcttcagttggccacattctcgtttcctccatcctgctatgctttgtgtgctcgggctgtgtgtggggttttttccctggtggaaggaagcccagctgtgtattgaatgtccttcatgtgttgtgtgtggctcagaaagcctgtcacttggcccctgtgctctgacccgtgagggtggggaggtggctgttccattaaagtgggagtattggatggccctcttgaaactagaattttgccttttttagtatgcagtataaagtttccagcatctacttggtaacacaaagatttgctggtttttaaaataatacagtaagcataagtatgtaagtttttagaattggtactagaagttggacagctagttattctcgagaactttatttcactagaaaaatatactaattggaaagcagtttccaggagttaactcagtttaattttcagtctcagttattttagcctgtggagtttttgatggcacacctttggagagatggccaggcctgattcccatttcaggggcatcagaccatacctttttaagaagctccgtgaatctagtcatctacccttcatcctgggcgaacagccaaaaagagaaggggacaaggtgtctttttctccttctcactggggtgacatgaattcttttagttaatggctgtttgcaaattctaaactaatgaaatacttagcagctaacatgttcaatctagtaatgatgagtttaaatctcaattgacagtaatgttttagataaacaggcccagtaattcagttgatgaactgtatatcttctcagtctagatttgtaaatgtttaatgaattcagggttataagcatagttctttaagtaagattccagatagttgatttgtaaccagtagtctacctatgaatgtatcccaaacctttagaagattggaaaagatttttgaaataatgatttagttttgtaggaaaaacacccccttgaaaattaattcggttgacccagtaacattttttaaaacaattggtggctccaaaaggcctgccaacaaagaaaagtccaaattatctagtgggacattttgaatgttttatgtttattttgggtccactgtaaactttggttcaaaaaagaatttgaatttaaagaatttaccattatttaaattattaccaagtttttacattttcatgatggtattttccaggtatgaatgaaacatgactttttgattgtggtacttcctgtatcccctgtagtgccaaaaccagtgatactttatttgctcctatggcagctcatagaggtaaccgaagtgatttttcctcagtaattgaaacacatattctctaaatgccaatgtgtggtgatgggccctgcactgccttcatttctctagggcagtgtctttggattgtctagggcctaggtaattctgagaactactgtaaaccaaccacagggcactaaagcaatgtacacaccactctttgtgtgtatggaaggggttatataaacctgggctatgctggacatctacagaagagtattacattcacttgcaaagtttacatttttgagctcacagttatgaaaaatatgacccacaagtttttcaggcaggtgaggatgggtcttcttgcaaatgcatgagttctgtcttgagtcctgggaacttctctgttggttgagtgtgggctcattccctgactctcctaatcatgtttgcgtcagaatgttagcattgtaaataaaagaataggttgtataatagatacacaacacttgaaactttactttaaaaaaatcgatagttctacatatatatttagttatatcacttgacagatttcttctacacagtgtggagattgttttataccacagattatttttataaagttagtgaatttgaatgattttgtaatcagagctaatgagctttacctttcaagagaaacgtacactggagcatgagtggtgtggaacttttacttagtgtttatatggattcttgtgatacactggcagactggagtcaatttgcgggtcttttttggcccaaactccacttgtggttgtgtaggacagtgatattcagctcagcttcttgtggattgggaggagagagggcctgcaatgtgttttacattggtgcttcctcctgagatttctgttgaacaaagggttctgaggtcaaaaattagtttgtaagcctttgccataggacatagtcatgtgagagtgtttggggggaacagaaattgtataggggtgccgattggggtgggatgggactcgaataagattcaggtacaaaaactttgaaatgagaatctggtggtttgagtaatccaccagactgaattatctaagatcacattatccaggttggggggcagaattacccagttaagtaattgttcagaaaagtggggagggtggcatgtggatgcagtgatccaattaaatggagagctgccaggcacattttgtcctctctggtcagtgagaatggttgggttggctcgctgcttcaatctgtggaatcagccaggagcccagntgaggaagctcagaaccccagtaacagcagagcatctttcagatagctccagagttttcctgcttttctgaggaagctcagcatcactgccacaatacggaaagtggtcttcattttagcctatttatttttaggcagagagtggatggttatttgtgtgggacttttggtggcgatatataatgaataattaagttaatttctggtatgcataatggccactcctgaggcccagctgaagacctgtcccccagaccctgcccgctggcttcaggctgctgcttctagacagaggtgcactggacgggatagttttatcaagagaatccctaatgtgtcattttaaaccagctgtgctttttattcattctggttgagcgtataggtttacactttaccctttttatacttggaataaatttagttccagcagatctagtagcactccagaaaccaaccccatctgttccccataaaaagaacattttctctgctctccagccacgtgtcttggaatgtaattctgttgtgcctttgtttttatcactctcttcgccccaaaagcaactgctgtaagcttttttctacttgtcttttctagtccccaacctctacctttttcctttttcccagccctaatttctggatgcacttctgtgatccaggtattttaagaaccagttacctcagacctcatgttgaacagtgtcgccatctgggtcctcttgatactgcagacttttaacgtacacatgcaggaaccctgctgagcgtgggcacttgttttaaagcaaaactcttcccaaggactgaagaaagggcttctggcaagctcgtcatggcattgtggtgggatgggtctagagtgtcatctgaatggtgcttcctgtgttcctctttgaattctgccattttcagtattcttgtgtgtctgaataggcaaagcgatttaattggctggtcttgcacgcaaattagttccaaagataagctctttgtaacacatttccagtcactaatgctcaaatgtagaacattcctttaaatggcaggataaaaaacccactatccaccatagtgcatttggggaagatgtctgtagcatatgttgctgtgaaattaggccttgtgggatatggctgtttgtcatttggatgtattttaaataaatatatatattttttaaagagccttttttaccagttcaaaaagtttaattaaccagcagtcaccgcatctgaatttttgtctctggggcatagatggcagaccaagattaaaagtggtaactcagctatacgagcatgggctaccttcctgggctctcctgcagtcctgtagacctgctgttccgcagaccatgggacacaaggtcagtgtgttcccagtgagggtcccaagtcagtcatcttaagtgtttgttctctgccccattcagtggactgttgacttcagtccctgcaagtgctttagcccgagtggggttttctcagagcactgccacgagttaagtgtgtgtttagccaaataatttctccgtaagggaaaaatgcagtcacccaaattttaccaccaatgacggagatgagagttgaaaagattaggcaacatctgagttttaacttgaaaagtgtccaagtcatcatgaaaggccgactgggagcaagtgattattagagattcttcaggagacctcatctgaaaatgttaagactgccagtgagggaaggaattgttaaaatgccagcggcttttttttcctctttttttctgtaattctgtaaaaatgcagagaaagttgagtggtacttcagaattgagggagagggttaccgcagcgtagaaatatatttctagatttcagttccacaccacaaatccacaacaatgccatttttcaactgtacaaaaatctgcttatgaactggacatgatcttaatggtagtgtcaaaggccaagtttttcacctgttaatatttttccacatttgtccttgaatctgaataactttatacagtactgtaaatttaacttacatcgagtttgttgtcaattcttatgaaaagagctttctgcatgtaacacatacggttaaagaacacagcaaaggaccaaatttgcaggaacagttttggaaccgacagaaaatgtcaccttttatttgccatcttatatatatctatcagttttaccagctacttctaaatttgtacattatttgtaagggaaagaaggaaaaccctaagacttgtctaacttagtggagaatgtgtgtgttgggcttaggatggatagctaagtcttattgagctgtgttacctaacttgtatataaaaattgtaattaaaagtttgggttcacctgtttctcacagtttaaaatgatgagtaattgccaactctggaaatgtgactagtatatgatttaaggctgtagaagcaaggaagctctttcaagtgctaaaactaaagacttctagtttttggctcaaataagtactgtttgtataccaggatatgtgagatgtaaatgtagtaggtcacttttcacccttgtagctataaaataaaaattttgtagaacagaaatagcttgtactactgaattaaccaaagttatactaaagtatcatgtttaaaaaaaaatatatatatatatacagagttaagcttgttgctgttaccctgtctggatttgaaaagtgtgctgatttatatatatatattacacacacacacacacacacacacacacacacacacatacacctaaaatggcctaaagcagacatccatgtaattacagttgcaaaatgaaaacattttggaaagaacattgtatcatagttcattcatttgcagtggatctttgttcctttttactgtggtaattttagaaatgagtgtcaagtttgaaattagatctgctaagttggggttttgctgcttgaactctgcactgggtcctcaaataaaccgatgtgaatgtagttttttccccctgtgtgaagaagcagttacaccccaacaataggaggaaaaatctagaactatttcaagttttatctttttgtatatgaaaataaaataataataaaacaatcttgtctttcttaattacgtggcaggggattggagtttcctttcatgaggattagacatgaaatgaaatggcgttcggctgcttagagggctgactcaagtcagttcctgtttggtatgtgtaacattaacagatgttaatggctgaatgcctagtctgccatggtcctgtggggctggagctaagcacaggtctccatttctgccattcagaagtccagggtctagttggggacattatgaatggggaccattctcctgaacgaactgttctgggattttgagtaagtttctgcaggttagcatattttccaaatgtccaagacactccccattccctcatcctctgccaccagtcctgtactttgcagacaaccctgagcaatattgttgtaagtggagcagagaagccttgaaaatagttgtattcaggactattgcagatgacaaactctgtcattcccaaacgttgctgagtactggagtcatttgcggagctattaaaaaatacaattatgggtccttatccccaacctggaattagcaaaccaggtctccagtttcagagatttggacttaatctcactaaaggaactcatggttccccaataataaaataatgatagtctttaatacctaacaaaacaggaaggccccagaaatcacctcactgctttctgcagtaacaagtttttttggtcgatgactctttcttgcctaagtggagaaacaccctttaaattcaccctttattatgagaattaagcaacggtttgaaacttgtggagaaagtttttgatgaccctttattcagggaccagttgcccaatatttggctgtttttgctctttcacgtttagaaagttcaccttttattagtgagtgcctttaatgaaggaaggagagcaaagggctgacatttttgatacaggatcttggagctgggaaagctgaaaggttggaccttaggagtcatctggtcaaactttccctatagcaaagggattctttgacccaagaaatttgacacagaagttggtttatnaaaccaggcttgtttgaatgagcaagtagaagagggccaagggaccatttcacttaccctcccatcccttcctttaagtctcaggtatccctatgggacacctagggaccttgattaaagtttacaaattactggcccaattccaattttacaggtgggcaaacaggcccagagggagttttcctaccctgaggcaggcaacccttccagtttttgacctcttgggacccaaagtggggttacacttgttcagaagtagaggatctggattaggaaaagccatctaatatttatctctctagtatttagcacagtgtctggcacttacaagggccttaagaaatacagtacctcagtgattgtgtatttagtaaattctggggaaagctgctgaagtagccttgaagcctacagataccagtgttgtctggttgtatttgttaggattcttggttgcaggtgacagaagccattagaccaaaaagggggtttcactgaaaggattctgggggaaatgactagccaagacttcagaaaggcaggatgtatgtgggcttcaggagcctgtgggagttggggtcataacattgcaggcctccacctgtgtcctggtatttcttccattattgctcagagcaagaccagatgcatctgctcctttgacttcttagcaggaaacaaggctgtagacagtgccagagcttttttttttttttttagacagagtcttgctctattgcccagattggagtgcagtggcacgatctcagctcactgcaacctccgtctcctgggttcaagcaattctgcctcagcctttcgagtagctgggattacaggcacgcgccaccacacctggttgatttttgtattgttagtagagacggggtttcaccatgttggccaggctggtctcaaattcctgacctcaggtgatcctccagtcttggcctcccgaagtgctgggattgcaggcatgagccactgcgcctgtgagttttacgtcacagctttgctacccagagagactactagatcgaaaatccctaggaaggactctggttgatgtagcttaaccagtcagggtccttcagaagaggtattcctggcaagggggtagcctcccatttgaggctgtcaaaataatgtgcacacttcagtaggttgttagaagtggcctcctggtcagtgaatcatcagtgggatcagatgaaagttattcctaccagttatctaagaaataggaaacttgaagtttctgctaagaactaagtccacacggaatgctagagatcatgct

SEQ ID NO: 22321 - DNA, 1244 bp, Homo Sapiens
cctagctgccgtcgccgccgccggggctctatggtctctccctagagctttgccgttggaggcggctgctgcggtcttgtgagtttgaccagcgtcgagcggcagcaacatggaggaattcgactccgaagacttctctacgtcggaggaggacgaggactacgtgccgtcgggtggagagtatagtgaagatgatgtaaatgaattagtgaaggaagatgaagtggatggtgaagagcagacacagaaaacccaagggaaaaaaagaaaggcccagagcattccagccaggaagagaagacaaggtggcctctcattagaagaagaggaagaggaggatgccaattcagaatctgagggaagcagtagtgaggaggaagatgacgctgcagagcaggaaaaaggcattggatcagaggatgccaggaaaaagaaggaggacgaactctgggccagcttcctcaatgatgtgggaccaaaatcaaaagtgcccccaagtacacaagttaagaaaggagaggagactgaagagacaagttcaagtaaattgttggtaaaagcagaagagctagagaaacctaaagaaacagaaaaagttaaaatcaccaaggtgtttgattttgctggtgaagaagtaagggtaactaaggaagtggatgctacatctaaagaggccaaatccttcttcaagcagaatgagaaagaaaaaccacaggctaatgttccttcagctctgccatcactccctgccgggtcagggttaaaaagatcaagtggcatgagcagccttttggggaaaattggtgccaagaagcagaaaatgagcacccttgagaagtccaaactggactgggagagcttcaaggaggaagaggggattggtgaagaactggccatccataatcgagggaaagaggggtacattgaacggaaagccttcctcgaccgagtggatcacaggcagtttgaaattgagcgagatctcaggctgagcaaaatgaaaccttgatgttacgggctaaatcaagagcagcttaatcctgtttacaatgtgagctttttgtgcgtctgtgaaatgttttacagtgtttctcatcatctgtttcccagcaaggtcttttttttttctacattgaagttctgtctatgtatcttaatcacaaatggtttcattcactttacttttaaaaatttgtccttaaatgaataaataaaataaaagttggtcctgtgagaggataatg

SEQ ID NO: 22322 - DNA, 1468 bp, Homo Sapiens
aagtagttgctgggacagcgaaatggaggggtgtgtgtctaacctaatggtctgcaacctggcctacagcgggaagctggaagagttgaaggagagtattctggccgataaatccctggctactagaactgaccaggacagcagaactgcattgcactgggcatgctcagctggacatacagaaattgttgaatttttgttgcaacttggagtgccagtgaatgataaagacgatgcaggttggtctcctcttcatattgcggcttctgctggccgggatgagattgtaaaagcccttctgggaaaaggtgctcaagtgaatgctgtcaatcaaaatggctgtactcccttacattatgcagcttcgaaaaacaggcatgagatcgctgtcatgttactggaaggcggggctaatccagatgctaaggaccattatgaggctacagcaatgcaccgggcagcagccaagggtaacttgaagatgattcatatccttctgtactacaaagcatccacaaacatccaagacactgagggtaacactcctctacacttagcctgtgatgaggagagagtggaagaagcaaaactgctggtgtcccaaggagcaagtatttacattgagaataaagaagaaaagacacccctgcaagtggccaaaggtggcctgggtttaatactcaagagaatggtggaaggttaaacagcttggatttattcttactttgtatgttgtgttgttgtccccagtgtcctacaaactaatgtatttgtgcacaagacatcatctatgaatgatgaagttttctcaccttcaaagtcttataaacatgttgactcttgttcctgctgagttacttgttcgaagcttacagcttgttttccaggcatcgaataactgttgagattgttctactgttgtcgtatattcttctatattgaattctggttaatttggagtaactaattctgtggctgttgtgagtcttcagcaccctcccatgtaccttatatccctctctgaaacagaacagctccaatagcaacaagctagttgttctgccagatgtttctatgtggattctgtaatgttcctccatacagttaaaacatcctaacttgtttttcaagctcactcaggcctacgccaaacgtttctgttttttttaaccatgaggtttaatttatttttgtgataggagggatatttacatattttagtggaccacattttaagttggatggtgtgctctaaaatactgaaaaacaatagcccatatacctatgtatttgtttttgatgggttgtttactctgaaataaaatgtatggttttcttaaaaggaagttttaaagtacctattttgtgtcatcctgtattgaaaagaatgtcaagcttgttaaaatgacatgtaacaaaaatgtattttgatttgtatttcagaaactaaaaaataaaatgttgaaag

SEQ ID NO: 22323 - DNA, 3054 bp, Homo Sapiens
tcctctgcgtcccgccccgggagtggctgcgaggctaggcgagccgggaaagggggcgccgcccagccccgagccccgcgccccgtgccccgagcccggagccccctgcccgcggcggcaccatgcgcgccgagccggcgtgaccggctccgcccgcggccgccccgcagctagcccggcgctctcgccggccacacggagcggcgcccgggagctatgagccatgaagccgcccggcagcagctcgcggcagccgcccctggcgggctgcagccttgccggcgcttcctgcggcccccaacgcggccccgccggctcggtgcctgccagcgccccggcccgcacgccgccctgccgcctgcttctcgtccttctcctgctgcctccgctcgccgcctcgtcccggccccgcgcctggggggctgctgcgcccagcgctccgcattggaatgaaactgcagaaaaaaatttgggagtcctggcagatgaagacaatacattgcaacagaatagcagcagtaatatcagttacagcaatgcaatgcagaaagaaatcacactgccttcaagactcatatattacatcaaccaagactcggaaagcccttatcacgttcttgacacaaaggcaagacaccagcaaaaacataataaggctgtccatctggcccaggcaagcttccagattgaagccttcggctccaaattcattcttgacctcatactgaacaatggtttgttgtcttctgattatgtggagattcactacgaaaatgggaaaccacagtactctaagggtggagagcactgttactaccatggaagcatcagaggcgtcaaagactccaaggtggctctgtcaacctgcaatggacttcatggcatgtttgaagatgataccttcgtgtatatgatagagccactagagctggttcatgatgagaaaagcacaggtcgaccacatataatccagaaaaccttggcaggacagtattctaagcaaatgaagaatctcactatggaaagaggtgaccagtggccctttctctctgaattacagtggttgaaaagaaggaagagagcagtgaatccatcacgtggtatatttgaagaaatgaaatatttggaacttatgattgttaatgatcacaaaacgtataagaagcatcgctcttctcatgcacataccaacaactttgcaaagtccgtggtcaaccttgtggattctatttacaaggagcagctcaacaccagggttgtcctggtggctgtagagacctggactgagaaggatcagattgacatcaccaccaaccctgtgcagatgctccatgagttctcaaaataccggcagcgcattaagcagcatgctgatgctgtgcacctcatctcgcgggtgacatttcactataagagaagcagtctgagttactttggaggtgtctgttctcgcacaagaggagttggtgtgaatgagtatggtcttccaatggcagtggcacaagtattatcgcagagcctggctcaaaaccttggaatccaatgggaaccttctagcagaaagccaaaatgtgactgcacagaatcctggggtggctgcatcatggaggaaacaggggtgtcccattctcgaaaattttcaaagtgcagcattttggagtatagagactttttacagagaggaggtggagcctgccttttcaacaggccaacaaagctatttgagcccacggaatgtggaaatggatacgtggaagctggggaggagtgtgattgtggttttcatgtggaatgctatggattatgctgtaagaaatgttccctctccaacggggctcactgcagcgacgggccctgctgtaacaatacctcatgtctttttcagccacgagggtatgaatgccgggatgctgtgaacgagtgtgatattactgaatattgtactggagactctggtcagtgcccaccaaatcttcataagcaagacggatatgcatgcaatcaaaatcagggccgctgctacaatggcgagtgcaagaccagagacaaccagtgtcagtacatctggggaacaaaggctgcagggtctgacaagttctgctatgaaaagctgaatacagaaggcactgagaagggaaactgcgggaaggatggagaccggtggattcagtgcagcaaacatgatgtgttctgtggattcttactctgtaccaatcttactcgagctccacgtattggtcaacttcagggtgagatcattccaacttccttctaccatcaaggccgggtgattgactgcagtggtgcccatgtagttttagatgatgatacggatgtgggctatgtagaagatggaacgccatgtggcccgtctatgatgtgtttagatcggaagtgcctacaaattcaagccctaaatatgagcagctgtccactcgattccaagggtaaagtctgttcgggccatggggtgtgtagtaatgaagccacctgcatttgtgatttcacctgggcagggacagattgcagtatccgggatccagttaggaaccttcacccccccaaggatgaaggacccaagggtcctagtgccaccaatctcataataggctccatcgctggtgccatcctggtagcagctattgtccttgggggcacaggctggggatttaaaaatgtcaagaagagaaggttcgatcctactcagcaaggccccatctgaatcagctgcgctggatggacaccgccttgcactgttggattctgggtatgacatactcgcagcagtgttactggaactattaagtttgtaaacaaaacctttgggtggtaatgactacggagctaaagttggggtgacaaggatggggtaaaagaaaactgtctcttttggaaataatgtcaaagaacacctttcaccacctgtcagtaaacgggggagggggcaaaagaccatgctataaaaagaactgttccagaatctttttttttccctaatggacgaaggaacaacacacacacaaaaattaaatgcaataaaggaatcattaaaaa

SEQ ID NO: 22324 - DNA, 4034 bp, Homo Sapiens
ggccgccccgcgcgcgccccagccccgccgcgcgcctgagcccggtgcggcgccagaagacagcgcgcagccgcccctgagtcgtggaggcggggaccaagctggaaggagcagcgactcccggaccgagtcgcgagtgtgcgccgtccgccgcccgccggatcccccggaccccccgaccccccagtggacaggaaagctaaggcctcagcgatgccggactccccagcggaggtgaagacgcagccccggtccacaccccccagcatgccgcccccaccgcctgccgcatcccagggggccacacgccccccctccttcacgccacacacactgatgaacggcagcagccactcaccaacagccatcaatggtgcaccgtgcacacccaacggcttcagcaatggcccggccacctcgtccacagcctccttgtccacacagcacctgcccccagcctgcggggcccggcagctcagcaagctcaagcgcttcctcaccacactgcagcagtttggcagcgacatctccccagagattggggagcgcgtgcgcacactggtgctgggcctggtgaactcgacattgacgatcgaggagtttcattccaagcttcaggaggccaccaacttccctctgcggccgtttgtcattcccttcctgaaggcaaacctgcccttgctgcagcgggagctcctgcactgtgcacgcctggccaagcagacgcccgcccagtacttggcccagcatgagcagctcctgctggacgccagcgcctcctcccccatcgactcctcagagctgctactggaagtcaacgagaacggcaagaggaggacgcccgacaggaccaaagagaacgggtcagaccgcgacccgctgcaccccgagcacctcagcaaacggccatgcaccctgaaccctgcccagcgctacagccccagcaacgggccaccgcagcccacaccgccgccgcactaccgcctggaggacatagccatggcccaccacttccgagatgcctaccgccacccagacccccgggagctacgagagcgccatcggccgcttgtggtgcctgggtcccggcaggaagaagtgatcgaccacaagctcacagagcgtgagtgggcagaagagtggaagcacctcaacaacctcctgaactgcatcatggacatggtggagaagacgcggcgctcgctcacggtgctgcgcaggtgccaggaggccgaccgcgaggagctcaaccactgggcgcggcgctacagcgacgccgaggacacaaagaagggccccgctcccgccgcggcccggccccgcagcagctccgccggtcccgaagggcctcagctagacgtgcctcgcgagttcctgccgaggaccctcaccggctacgtgcctgaggacatctggaggaaggctgaagaggccgtgaatgaggtgaagcggcaggccatgtcggagctgcagaaagccgtgtcggacgcggagcgcaaagcgcacgagctcatcaccacggagcgtgccaagatggagcgggccctggccgaggcgaagcggcaggcctccgaggacgccctgacggtcatcaaccagcaggaggactccagcgagagctgctggaactgcgggcggaaagccagtgagacgtgcagcggctgcaacgcggcacgctactgcgggtccttctgccagcatcgggactgggagaagcatcaccacgtgtgtggccagagcctgcagggccccacagccgtggtggccgacccggtgcctggaccgcccgaagccgcccacagcctgggcccctccctgcctgtgggtgctgccagccccagcgaagccggctctgcggggccttctcgccccggctcccccagcccacctggcccactggacaccgtgccccgctgaccccactggcccctggcctgccggacacagcaccgtgccaaccccacccagctccaggcccaccggatgctgtgcctggcctccgatgcctggcctgccagacactgcgccccgcctgacctgkgggagccgaccaattagtcactgctgctactgcccctctccgaaagaagacacagaaccaacaaaaccgcattcagtgcacctgcctcagctacctaatgattccgcgcggagacctcctgacaacgtctcttcaagcatcctcagaagcctcgactgagctttagacagcagagcagatgccgcaggcgcggcggctctgcccacctctcttttcctctctgtctgtctctccccctctgtcttctctatcctctctctctctatgactatcacacactttctcttcaatgaaaaaatcgaattggtggcttatattttcagcaaagaattttggggggttttgtgtgttggcaaaagagctactcagaaatggacaaagaaaacgggggggttctccccctcctgattaaaaagggagaaagaaaactgcgattttatagctggagatctgaacccagctgtgcccctcccccaggggcgtgaggctgatcagcgaagacgggaggaaagatttcgatttctgactcaagatgcatttttggtttcagatttttttttcctgtaatgttaaactctttggctttaagtaaaaatccaaaaagtttttttaaaaaagcaaaggaagcatacttgtgaactaccttgctagctagccagccaaggataccggacacacctctgctccaaaggaaatccaaaaaagcaaacacaagaaatcaaaatccaaaatttgtttgtcactgccaaagtatttttttcactgtttcacttgctcttgggtttgtttggatgtgggtctttttctcttctgttctgattttgtttgtgggtgtcgggatatttgggtgcagagggtttgtgcccagttagaagcgacttttgttctcttctgcgtaggcgttggtgcgtccgccgcgtgtgcgtggtccgtgtgccgttgctccggcctgcgtctccatatgtgtaggaaaggacacgccgtctgtcctcacgccccctgtgacttttcatatttccgttttccacttgtggaaaaaaagtgctaaagttttcttcccagagagagcataattccgaaacaaaactgtgacaatcttttgggttgattctcgactgcttttcgagcatgcggagccagcaggcctccctgaaacactgcttctcggccagcccgtcctcctctacctctctcctctccgcgccctccgacctctctcggccccctcaccccagctccgacctctctcagccccatcgccccaactccaacctctcggccccatcgccccaccgcagctactcccctttcttccaaacttttgcagaaaaaacaaaaaaactacaaacaaaagcagccctctgcctcctccccagggaagaccctgaccgtgtacatagccctggtgctcctgcccagccacccctcagatgcgttcgcctctggccctggggtgtgtctcggtgacgttttctatcagacgtgctccctcccatcctccagccctgcccaccctccctccactcctctcaactgcctcagcgatttcaagaaggaaataaagggataaagaaattcatgcttgcaccgagtacaaggacagacagcaggcacggcccgcagcctggcatctgtgcgtgtggcgtggcccgtggcttggcatctgtgtgcgtggtgtggcccgtggcctggcatctgtgtgcgtggcgtggcccgtggcctggcatctgtgtgtgtggcgtggcccgtggcctggcatctgtgcgcgtggcgtggcccgtggcctggcatctgtgtgcgtggctatcaggagttctaggaactcagtgcaatacgggagtgacccagctactgaaccagccacgaacagcccgccagaggcctgaagctgagcgtgtacgttaatgtgaatgtatatagtctttgcagaggtccaaatgatattcatgatggtaataaacgagatgtttgccaaataaaaaacagaaaccgc

SEQ ID NO: 22325 - DNA, 2527 bp, Homo Sapiens
aggaggtagtgactggcatacatggctcagtttgtccaggtcctggctgaaataggtgactttggtcgcttccagatacagctattgatcctgctgtgtgttctcaacttcctgtctcccttctacttttttgcccatgtcttcatggtcctagatgagccccaccactgtgcagtggcttgggtgaagaaccacactttcaacctgagtgctgctgaacagctggtactgagcgtgcccctggacactgcaggtcacccagagccctgcctcatgttccggccaccccccgccaatgccagcctgcaggacatcctcagccaccgcttcaatgagacgcagccttgtgatatgggctgggaatatcctgagaacaggctcccatccctgaagaatgagttcaacctggtttgtgatcggaagcacctgaaggacaccacacagtcagtgttcatgggtgggctccttgttggcaccctcatgtttgggcccctctgcgaccggattggccgcaaggccacaatcctggcgcagctgctcctcttcaccctcatcggcctggccacagcttttgtgcccagctttgagctctacatggccctgcgctttgctgtggctactgccgtcgctggacttagcttcagcaatgtcaccctactgacagaatgggtggggccctcatggaggacgcaggccgtggtcctggcccagtgcaacttctccctcgggcagatggtgcttgcgggactcgcctacggtttccgcaactggaggctccttcagatcaccggcactgcgcctggcttactgctcttcttctacttctgggctctgccagaatctgcacgttggctcctgacccgtgggaggatggacgaggcgatacaactgatccagaaggcggcctcggtcaataggcggaaactctccccggagctcatgaaccagctggtcccagagaagacaggcccctcagggaatgccctggatctgttcagacacccccagctccggaaggtgaccctgattatcttctgtgtctggtttgtggacagtctggggtactacggcctgagcctccaagtgggggacttcggcctggacgtctatctgacgcagctcatctttggagctgttgaggtgcctgcccgctgttccagcatcttcatgatgcagaggtttggccgcaagtggagccagttggggaccttggtcttgggtggcctgatgtgtatcatcatcatcttcatcccagcagatctgcccgtggtggtcaccatgctggctgtggtggggaagatggccacagctgctgcctttaccatctcctatgtgtactctgccgagcttttccccaccatcctccggcagacaggcatggggctggtgggcatcttctcacggatcgggggcatcctcacaccacttgtgatcctgctgggagagtaccacgctgccctccccatgctcatctacggcagcctccccatcgtggccggcctgctgtgcaccctgctgccagagacccatggccagggcctgaaagacaccctccaggacctggagctggggcctcacccacggtcccccaaatcagtgccctcagagaaggaaacagaggccaagggaagaacttccagcccgggagtggcctttgtgagcagcacatacttctgattgaggtctctaagagctggaccatcagcagcagggagctgcctaaacacctccttggatatggccaggacccacagggacacagggcaagaccagccttgcttatggaggcaggacaccacaatctggcccatggctgtcacctcctgccgagtccaatcccagactgggaaccaccatctgagacaggacctcccggcctccttcacctttctcatctccagagccctgcccccaatactctgtctgggttaggatcttgggtatgtcttggaattaacttgtcctctaacaatcttcatggggtatggctctcttgatctcctcaatctggagtcccctgccctcaaaacacagtgatgttcagaacagaacacaaggtaagccctttccaatttgtgggaacaggaggggagaggaaacaaatgtgaagttgtggactctacccaggcaggtggatgaaaatgctgtggataaaaggaaggttatgattccttctagcggatggaccagattcctctggctaacgtatggccccataggtcactgggtcatacagagagaagattcagttcagcctaaatcaaaacttccaccttgtgttcacttcaaagatggcccaacccccgccctacactcagctcatgcctaacctatgtgtggctcagggaccagcttggggaaggaaaggaggtttgttctgctccccgcctcaccccgcctcctcctgctcatgctcagctgcttctggaccttccagggcccatgcagggtgagggaaagggtagaggtcttttcaccgagctgctgctggttgcagttctttctggtgcacattggctaatgccag

SEQ ID NO: 22326 - DNA, 1209 bp, Homo Sapiens
ttcgcctttctctcggccttagcgccatttttttgggtgagtgttttttggttcctgcgttgggattccgtgtacaatccatagacatctgacctcggcacttagcatcatcacagcaaactaactgtagcctttctctctttccctgtagaaacctctgcgccatgagagccaaggtgagcggttcctggtagtaagcttgggaggtaggagttggcgagtagtagcggggagacgaaggcaagtccgccatacctcctgaactactgggtttcaagggtgcccaagagctggtgggagagagaaggtagtttgtgagagagctagcggttaagtgctatgggtagagagggtgggcttagaaaagggtggaattctgatcttatgttgggagggtgtccaagttactgatgtagttgttacgaccaatctttcatacttcttggttaagaatctgtccggttctaaagagtgcatttcatatccttgctaagcctactaataagcttcatcccttttttttttttttttttttaattatctgctgcttgtgatcggttgctagtggaggaagaagcgaatgcgcaggtacgttgagactttgccagcccaggaagaaggaaagttcccttggacaaaaactttaggagaaacatttggtttggaatcttaaaagatctttaggagaaaaacggtttgagtgttttctccctggagccaggatttaacagaacagagaacgatagaaccgtagtgcttgtttcattttaccacctcattctttatgtggacgtttgatttaatgtgggagggaaaggcaactctggtttgaggtgtattccattcctgtgtctgcttttcaggctgaagcgcaaaagaagaaagatgaggcagaggtccaagtaaaccgctagcttgttgcaccgtggaggccacaggagcagaaacatggaatgccagacgctggggatgctggctacaagttgtgggactgcatgctactgtctagagcttgtctcaatggatctagaacttcatcgccctctgatcgccgatcacctctgagacccaccttgctcataaacaaaatgcccatgttggtcctctgccctggtcctgtgacattctggactatttctgtgtttatttgtggccgagtgtaacaaccatataataaatcacctcttccgctgttttagctgaagaatt

SEQ ID NO: 22327 - DNA, 1368 bp, Homo Sapiens
gatctcgctatccggccgccacccgcagctgcagcacagtcatggcccaggcgtcgccgccccggcccgagagggtgctcggcgccagcagcccggaggcccggcccgcgcaggaggcgctcctccttcccaccggtgtctttcaggttgcagaaaagatggaaaaaaggacatgtgcactctgccccaaagatgtcgaatataatgtcctgtactttgcacaatcagagaatatagctgctcatgagaattgtttgctgtattcttcaggacttgtggaatgtgaggatcaggatccacttaatcctgatagaagttttgatgtggaatcagtaaagaaagaaatccagagaggaaggaagttgaaatgcaaattttgtcataaaagaggagccaccgtgggatgtgatttaaaaaactgtaacaagaattaccactttttctgtgccaagaaggacgacgcagttccacagtctgatggagttcgaggaatttataaactgctttgccagcaacatgctcaattcccgatcatcgctcaaagtgctaaattttcaggagtgaaaagaaaaagaggaaggaagaaacccctctcaggcaatcatgtacagccacccgaaacaatgaaatgtaatacattcataagacaagtgaaagaagagcatggcagacacacagatgcaactgtgaaagttccttttcttaagaaatgcaaggaagcaggacttcttaattacttacttgaagaaatattagacaaagttcattcaattccagaaaaactcatggatgagactacttcagaatcagactatgaagaaatcgggagtgcactttttgactgtagattgttcgaagacacatttgtaaattttcaagcagcaatagagaaaaaaattcatgcatctcaacaaaggtggcagcagttgaaggaagagattgagctacttcaggacttaaaacaaaccttgtgctcttttcaagaaaatagagatcttatgtcaagttctacatcaatatcatccctgtcttattagggattaccgtttcctaagccaagagtcatgtcaaattgcaatcaggctcaaaaccagagaccaggctgtgaaatccacacatctttagaactagtcgtctcctcttggcctcagcagctcttccctgttcttactggttgacattttgatcactctttgcacactcttgtgttttttgctcactgtcacattcccagcacctagtatgctcagtaaatgtttgtggaataagtgcataaaatgttcttaacctttgattctacttacagcccatgatagcctcttagatataataaatttggattatactaaaaaaaaaaaaaaaaaaaaa

SEQ ID NO: 22328 - DNA, 6189 bp, Homo Sapiens
cgcaggcggcggcggcggcggcggcgggtccctgagctggaagccggagagcaagccctggaggttcactctttcaagaagtcgtgtgctgaggtgtaatgctacacaagtcagaggaaggaagggtcctgaaacacatggcctgattgttggcaaaggcatcataagaagctggcatttatttctgttctaacctattactgtataactgtgaatagacactatgcatatttgttggtcagcaaaaccaagaaacaagagctatggcatttgaaaaagtctgtctgattccagggtgtttttcctgggtttcatcatcaggtacctcctccctttcatctcagcaagaatgtggcaccttttatcgtttgataaagattaaggacatgttctttggtcaacagccagaacttaaaatctgctggaatagggtcagagaccatttcagctgcagctgaggaaaatgaaatgttcattttatttggtgccttgtctggggagcacactaactcttctggaaacgtgtcagtgaaacagagatcgttttgtggaatagcaacccatggttatggcgagtgacccgacgtgatctggggggcaggctgcagaggactcatgacaggctataccatgctgcggaatgggggcgcggggaacggaggtcagacctgcatgctgcgctggtccaaccgcatccgcctcacgtggctcagcttcacgctctttgtcatcctggtcttcttcccgctcatcgcccactattacctcaccactctggatgaggctgatgaggcaggcaagcggatttttggtccccgggtggggaacgagctgtgcgaggtgaagcacgtgctggatctgtgccgcatccgggagtcggtgagtgaagagctcctgcagctggaggccaagcgccaagagctgaacagcgagatcgccaagctgaatctgaagatcgaagcctgtaagaagagcattgagaacgccaagcaggacctgctccagctcaagaatgtcatcagccagaccgagcattcctacaaggagctcatggcccagaaccagcccaagctgtccctgcccatccgactgctcccagagaaggacgatgccggcctccctcccccgaaggccactcggggctgccggctacacaactgctttgattattctcgttgccctctcacctctggcttcccggtctacgtctatgacagtgaccagtttgtctttggcagctacctggatcccttggtcaagcaggcttttcaggcgacagcacgagctaacgtttatgttacagaaaatgcagacatcgcctgcctttacgtgatactagtgggagagatgcaggagccggtggtgctgcggcctgctgagctggagaagcagttgtattccctgccacactggcggacggatggacacaaccatgtcatcatcaatctgtcacgtaagtcagatacacagaaccttctctataacgtcagtactggccgtgccatggtggcccagtccaccttctacactgtccagtacagacctggctttgacttggtcgtatcaccgctggtccatgccatgtctgagcccaacttcatggaaatcccaccacaggtgccggtgaagcggaaatatctcttcaccttccagggcgagaagattgagtctctgaggtctagccttcaggaggcccgctccttcgaagaggaaatggagggcgaccctcccgccgactacgatgaccggatcattgccaccctgaaggcggtgcaggacagcaagctggatcaggtcctggtggaattcacctgcaaaaaccagcccaaacccagcctgccgactgagtgggcactgtgtggagagcgggaggaccgcttggaattgctgaagctctccaccttcgccctcatcattacccccggggaccctcgcttggttatttcctctgggtgtgcaacacggctcttcgaagccctggaagtcggtgccgtcccggtggtgctgggggagcaggtccagcttccctaccaggacatgctgcagtggaacgaggcggccctggtggtgccaaagcctcgtgttaccgaggttcatttcctgctcagaagcctctccgatagtgacctcctggctatgaggcggcaaggccgctttctctgggagacttacttctccactgctgacagtatttttaataccgtgctggctatgattaggactcgcatccagatcccagccgctcccatccgggaagaggcggcagctgagatcccccaccgttcaggcaaggcggctggaactgaccccaacatggctgacaacggggacctggacctggggccagtggagacggagccgccctacgcctcacccagatacctccgcaatttcactctgactgtcactgacttttaccgcagctggaactgtgctccagggcctttccatcttttcccccacactccctttgaccctgtgttgccctcagaggccaaattcttgggctcagggactggctttcggcctattggtggtggagctgggggttctggcaaggaatttcaggcagcgcttggaggcaatgttccccgagagcagttcacggtggtgatgttgacttatgagcgggaggaagtgcttatgaactctttagagaggctgaatggcctcccttacctgaacaaggtcgtggtggtgtggaattctcccaagctgccatcagaggaccttctgtggcctgacattggcgtccccatcatggtggtccgtactgagaagaacagtttgaacaaccgattcttaccctggaatgaaattgagacagaggccatcctgtccattgatgacgatgctcacctccgccatgacgaaatcatgtttgggttccgggtgtggagagaagctcgggaccgcatcgtgggcttccctggccgttaccacgcatgggacatcccccatcagtcctggctctacaactccaactactcctgtgagctgtccatggtgctgacaggtgctgccttctttcacaagtattatgcctacctgtattcttatgtgatgccccaggccatccgggacatggtggatgaatacatcaactgtgaggacattgccatgaacttccttgtctcccacatcactcggaagccccccatcaaggtgacctcacggtggacattccgatgcccaggatgccctcaggccctgtctcatgatgactcccacttccacgagcggcacaagtgcatcaacttcttcgtgaaggtgtacggctacatgcccctcctgtacacgcagttcagggtggattctgtgctcttcaagacacgcctgccccatgacaagaccaagtgcttcaagttcatctaggggcagcgcacggtctggggaagaggatgagcagagggaggaagatggctcccaaggttcctaggcattgcaggaccttgggcacatctgctggtgggtggcccagagcctctgctggaaggggcagcaggaggagtggaaggaaaccgctgcctttatcttgaagtcagccacactgggcctggagccctgggcggagtccccggggttccccacacagggcactgactgatagcttacactgaggactgtggcgactctgcagagtcactcacaccgttcgtacgcccaggacagctggttcgtggtttttacattcaataacaactattatgattatttaaaaagagaaagtttcagatttgccattcaaggcttatttatatatatgtgtgtgtatataaatacatgcacacacttgcatacatatatatttttggctgggggagtgtgagttttgcctttctaagggagggaccgcgcaggctcctttgttctgtattctggcggagatgggtcctggccttgtgtcactggcttatccttaaagatcatctcccatcctccccagcgccatctgtgtgcagcaaccagaaagggatgaacttggccctcttgcgggcctggacaaggtctcttccttaccctttctgttgccagtcagcaacctgtaactcacattctcttcccagtgaatccctgggagcgcctgaccctggtgggctgttcagcttcctgctgctggggccagcgatttttgaggatttatctttaggccaggcttgcctccgtacttatccctgctctcccatttctctcttgtttgagagagaatgaggaagcaaagagtgagaaagaataggggctgaagacgccactcccagatggctctttctatcctgctcttctgttgaaacacacgtgctgtgggcctcaggcgtttctgaagtgctctttcttggattggacaggagatcagcagcgtgcacatctgctgtggtctgaagtggtttgcaggtcagcctcctctccctagtgtagagcaagccagtgtccttcgaggaacccacccggctggccgggaagttttacagcaaggcgcctgccttgggataattccttggtgaaattcaccttccccccgcctctgtctggagccccatcctgtgttatctgtggtttttggacccctaatgtcagcttggctgtaggactccccgaggtttggtatgtgctagaacaatgggaggctgtgatttgctgtgtaagctcacatccagccttggaatctaacgggcattcacaacccgagttaccactttccactccctgcttaggattctgttccctgggctgaaactgaaataagctaattttttgggtcacggtggcagtaggggaacctaggagggtgtgagtggcatttgtcagggatttagcccatgacgtgtttcttgaaccctactttctggaagtggagttgactctggaagttttctagcaactgaacaaaagctcaggtttgtcctggtcatgcacatgccttaagccagttccgtcttccctagaccttggcatcctgtgcttctatttcttggaatacgttctcctctgacctgcctgtaccacgtgggtcctcttcaagtactgttttgaagctgggctcttttgtgtagctcccacccacctgtagggctagctcggcttaagggaactctccccattggcaaaccggacccggccgccgccaggactgtgtttccaaaggttccccgcccccaaccccagcatcagcctgtagctcccctgctgaggcagtgtggttatgttcccagcagtgggggtcagacgcccttcctcagaactttctagttgccctctacctgactcctgacttgtattccttttagcagtagccttcttccctcggggagccaaagagtgtggtgtgtggcgctatattgtggctgctatttcatctggtttcttttaatgtgaggaactcacatactgacttcagtgggactcggtgagccggggccgtctgtgtggtgggaccccctttagcgggactcagtgagctggggccgtctgtgtggtggagccagggcctctccctttagtggagccaggttgtcgggccccgaatgtcactggtggatctaagaagggctgagtggtctgacaccaaaacatgccgcagggagggctgtggtgccggtgcttccaacaaggacagccctccttgaccctgaaaggaacactggcttgaaggactgcagacaggctctgaggggcacgccctcctcagcgagaggcagcaaggtggccacagtgtcactggtcaggtgcttctcaccacgggaaagccgccgacctgtgactcgcttgagatgggaaagcggcgccacagaccccgggtctccttggctgtctgtgggccgcccctggccaccttgtcctggctcgcagggtgcaggagcgcctcgttctctgggtggccggcttgctgctccggtttgggctgtcttaccataacaccgtcccagggctctgcaggccactgtgagcgctggctccctgggcagtgctcctccgtgtggactgtgcctcaggccagggctcaccagctggggtcctgtccggaaggatgggatctttctgggagctgcgccggacagagtggggagctcctagtttgtggggggaagctttgatatccatgccacgtccatccaccccaccccttttcgtcacgagcacaatggtcttacattggatttttgtaaaaaaataaaaataaatggagacttt

SEQ ID NO: 22329 - DNA, 4682 bp, Homo Sapiens
ggggaggagagacaagcaggggcggcagaggctcaacgggatgctgactgggttttgcttttcgtcccagccttgtggggccgggacggaagaacccatcaaagcccttcctcccgccgcctctccggaatgaggtctcagcacccgcgcgggacagcacccttcctcctgcgacagagcccaagaagaggccgaaaccgagaccatgccagggaagctgaaggtgaaaatcgtggccgggcgccatttgccagtgatggaccgtgctagtgacctgactgatgccttcgtggaggtaaaatttggtaataccacctttaaaacagatgtgtaccttaagtcactcaaccctcagtggaactcggagtggtttaaatttgaggtggatgatgaagacttacaagatgaacctttacagatcacagttcttgaccatgatacttacagtgcaaatgatgccattggtaaagtgtacattgatattgatcctttactgtatagtgaagctgcaacagtcatctcaggatggtttccaatttatgacaccatacatggtatccgtggggaaatcaatgtagttgtcaaagtagacctcttcaatgatttaaatcgatttaggcagtcatcatgtggagtcaaattcttttgcacaacgtctattccaaaatgctatagagctgtgataattcatggatttgtagaagaacttgtggtcaatgaagacccagaatatcagtggattgatcgaattcgcacaccaagggcatcaaatgaggccagacagagactcatttcgttaatgtcaggtgagctgcagaggaagattggcttgaaagtacttgaaatgagaggaaatgcagttgtggggtacttacagtgtttcgatctggagggcgagtctgggttagtggtgcgagccataggaacggcgtgtactctggataaattaagtagcccagcagcattccttcctgcatgtaattccccatccaaagaaatgaaggagtctccgctggttcatcctccaagccatggatgccgctcgactcacaacagcccaattcacactgctactggctcacgacttactcagaacttctctgtgtctgttcccactctcatctatactggtacgagactgctcagactccagagctggggagatgcaggccacgggcagagtggctgcagaggcaggcaggcaggaatgggaagtggtagtgctggaaaagaaggggggccctttaaagctcttttaagacaacagactcaatcagcgttggaacagaggggaggatcgcctcataggttctgtagaaggcgggaatttccattttttaccttgacggcatttcctcctggattccttgtacacgttgggggtgtagttagtgcacgttctgtgaagcttttggatcgtatccacaatcctgcctttgtcggaattatgggtaacacaagatcttacaaactgctagactggaatagtttcaattcagatgaaccagaaactcgagatgcatggtgggcagaaatcagacaagaaataaaatcacatgctaaagcattaggctgtcatgctgtagtgggctacagtgaatcaactagcatctgtgaagaggtctgcattttatctgcatctggcacagcggctgtactgaatcctagatttctgcaggatggcaccgtggaaggctgtttggaacagaggcttgaagaaaatttgcctacacgttgtggattttgtcatataccatatgatgaactgaatatgccatttccagctcatctcacatattgctataactgcaggaaacaaaaagttcctgatgttctgtttacaactatagacctcccaacagatgcaacagttattggaaaaggttgtcttattcaagcaaggttatgtcgcttaaaaaagaaagcacaggcagaagcaaatgctacagctatcagtaatctcttgccatttatggaatatgaagtgcatactcagctaatgaataaactaaaactcaaaggaatgaatgctttgtttggactaagaattcagatcacagtgggtgaaaatatgttgatgggcttagcgtctgccacaggtgtgtatttagcagctttaccaactcctggtggtattcagattgctgggaagactcctaatgatggctcatatgaacaacacatctctcatatgcagaagaagataaatgacacaattgctaaaaacaaagagttatatgaaatcaatcctccagagatatctgaagagattataggatcacccatcccagaacctaggcaacgctcaagacttctaagatctcaatcagaaagctcggatgaagttacagaattagacctttcacatgggaaaaaagatgcttttgttttggagattgatgacacagatgccatggaagatgtccattctctacttactgatgttcctcctccttcaggcttttatagttgtaatacagaaattatgcccggtataaataattggacctctgaaatacagatgttcacttcagtaagagtaatcagattaagcagcctcaacctgactaatcaagctctcaataagaactttaatgatctctgtgaaaatttgctcaagagcctgtactttaaactacgatctatgatcccctgctgcctttgccatgtaaattttacagtatctctgcctgaagatgaattaattcaggttacagtcacggcagtcgcaatcacttttgacaaaaatcaggctttacaaaccacaaaaacccctgttgaaaagtcattgcaaagagcctcaacagataatgaagaacttttacaatttccactggaactgtgttcagattcacttccttctcatccttttccaccagctaaagaacacctggagagtgcaagttctaactcaggtataccagctgcacagagagcaacgtcagttgattacagttcctttgcagacagatgcagcagctggatagagctcattaaactgaaagctcagaccataaggcgtggatcaattaagacaaccatgacagttgaaaaagcaagtccagtgggtgatggaaatttccggaatcgttctgctccaccttgtgcaaattccacagttggggttgttaagatgacacctctttcttttattcctggagcaaaaataactaagtatcttgggataattaacatgttttttattcgagagactacttctcttcgggaggaaggaggagtcagtggttttctccatgcttttattgctgaagtgtttgcaatggtgagagctcatgttgctgcattaggagggaatgctgttgtctcctacataatgaagcagtgtgtcttcatggagaatccaaataaaaaccaggcacagtgtcttataaatgtaagtggtgacgcagtggtttttgttcgtgaatctgacttagaagtggtgtcatctcagcaacctactaccaactgccagtcatcatgtactgaaggcgaagttacaacctgaggaaaattaggaaaaaagagctcaactaaatgaaattcatcaatctctgttattttgtcattaattatcttcttagacttaaaattgaacttgagataaataaggaagaattgagtagatttgatttgcctggagtcttttggaggcatgagaattttctaatcttgacattttgtttgcctgttctagacaggccctgtggggtcttgacccttcagtaagttaagataaatttttaaaagaaccgtagcaaagatggaacctttgtaatttatgttgattttaataaaatcataatttaaaaaatgaaatgggaagattgtcaggaaattaggatagctactctagtataatttagaaaaactaagcaagagattctccagttgctagtgagtaagcactctgatttgagaaatgtgtggggacaatggagaaaagttttcagaaaactgctatgtagatttctgaatgtgttgtattttgctgaggaattcggtaacaactgaaagggaaaagtgcttcagccatcttttgaaaacaagttaaaattctggaacttgtatctgtaatacatcctaactcttgtaaaagaaaataatttatcatagctggtgtcctttcattgaaagttgtaatactgtctctaaggagggaggaaaagattattatataattttataactggcaacatttgagttagtattgactttgtctaaaagaggcttgacttcaactgggataaaaatgtcagtgaattttgttaaagtagtaaaaatgcagttgacttagtaggaacataaaattatttcctaataagataatattgcactcctaccaaataaacaggattttagtaatatctgagggattgttgatggtgagttagactgtatttggcatagaatttggaaatgtaacttgaatgtaaatatgctgcaaaatgttgaatgtatacatagaaagactttttctgtcgacgccaaatgcccgttgtaaatgaaccttaaatattacattcctcctttgcacaataatatttctttataacacttatgattttttcccccaggacaacaaactgcccttaagagtcatttccttgttatcacaggtgtcaatatttttctgtattttgtttataattttattttttaaataaaaagtgtataaaaat

SEQ ID NO: 22330 - DNA, 6828 bp, Homo Sapiens
aatctcccaaggcctaaggaggcaagaggcctgcaaatcgcctcctgctcagcaaacgggttgctcagcaggcccggggtcctggtccaccccaggtccctggtttgcccacctccgatggcggccttcgctggcagggtgggcgcctctggggagccagctccgtcccggcgcctttagagccccatctcttccacgtccctggccttcctccccttccaggcggctgtccccgccggggtccagatggtgtcggagggccggcggttcgacggcgggcccggggttcagcctcccggcctccctccgtccctgactctcctttcttcggagagggcgcgggggccggggccaaagcgccgctcttggggttctcctggactcggagttgccccaggcgggcgcagctctgccccgcggggtgccagcctcgggcgggcaaggtccgtgagtcaccgcctgtaaccgaacaccaggcctccctgccccctcccccagctccggccgccaggctgcggcgacacctacaagaaaatgaaggggcgcccaggcccgcggcggccccggccgtatcgcgagcaggtcccggcggcccccggctcgcggcgctctttcttccccggccccggggctcggccagccgcaaccgccgccccggcgccagcaggaatccaggccgagcgaccggccccggagcccgaggcggcggagggcccgcggtagctgcgactggcgagcccgagagcgcccggggagggggcgcccggcttggaatttcccggtcccttccggcccagcgaggacaaagcactcctggccgccgccgccgccgccgccgtggcctacgccgcgccgcacaaagggcgagtcgcgacacgctcccatccccctcccagctcacggcggccccggccccgggtggctgcagggaggtgggggaagccctggctgcaccgcccctcgctccccctcccctggggccgcgcgagcgccgcccccgccccgtctgcgcgtcctcccggggaggggttggggggcgcggcgccccacataacactccccctcctgcgctgcgagccaccctctcccctccctcctgcaaacaccaccgcctcccctgccaccgccgccacctcgcccgacgctccacagctcgccgcggccggggggcggtgcgcggaccgtgcgcgccgcgggcgccagatgtgcagtccccgccgccgccagtgaccgagccgcagtccgagcggtatcgggccgcctccctgatgctgcgggggcgaccttgagcgtacagcggcttccctcggtggggaccccgacatcccagcgctgtgcccggtcttgccctctgtagcccggctcgccccgcgcttggacatggaaggggccgccgcgcctgtggcgggggaccgccccgacttggggctgggggcgccgggctctccccgagaggcggtggcgggggcgactgcagccctggagcccaggaagccgcacggggtgaagcggcatcaccacaagcacaacttgaagcaccgctacgagctgcaggagaccctgggcaaaggcacctacggcaaagtcaagcgggccaccgagaggttttctggccgagtggttgctataaaatccattcgtaaggacaaaattaaggatgaacaagacatggttcacatcagacgagagattgagatcatgtcatctctcaaccatcctcatatcatcagtatttatgaagtgtttgagaacaaagataagattgtgatcatcatggaatatgccagcaaaggggagctgtacgattacatcagtgagcggcgacgcctcagtgagagggagacccggcacttcttccggcagatcgtctctgctgtgcactattgtcacaagaacggtgtggtccaccgggacttgaagctggaaaatatactgctcgatgacaactgcaatattaagattgctgactttgggctttccaacctgtaccagaaggataagttcttacaaacgttttgtgggagtccactctatgcatctcctgagattgtcaatgggagaccttaccgagggccagaggtggacagctgggccctgggtgtgttgctttacactcttgtttatggaacaatgcccttcgatggtttcgatcacaaaaacctcattcggcaaatcagcagcggagagtaccgggagccaacacagccctcagatgctcgaggactcatacggtggatgctgatggtgaaccccgatcgccgggccactattgaggacattgccaaccactggtgggtgaactggggctataagagcagcgtgtgtgactgtgatgccctccatgactctgagtccccactcctggctcggatcattgactggcaccaccgttccacagggctgcaggctgacaccgaagccaaaatgaagggcctggccaaacccacgacctctgaggtcatgctagagcggcagcggtcgctgaagaaatccaagaaagagaatgactttgctcagtctggtcaggatgcagtgcctgaaagcccatccaagttgagttctaagaggcccaaggggatcctgaagaagcgaagcaacagcgagcatcgctctcacagcactggcttcattgaaggtgtagttggtcctgccttaccctctactttcaagatggagcaggacttgtgcaggactggcgtgctcctcccaagctcaccagaggcagaggtgccgggaaaactcagccccaagcagtcggccacgatgcccaagaaaggcatcttgaaaaagacccagcagagagaatcaggttactactcttccccagagcgcagtgagtcttcggagctgttggacagtaatgatgtgatgggcagcagcatcccctcccccagccccccggacccagccagggtaacctcccacagcctctcctgccggaggaagggcatcttgaaacacagcagcaaatactcagcgggcaccatggacccagccctggtcagccctgaaatgcccacactggaatccctgtcagagcctggtgtccctgccgagggcctctcccggagctacagccgcccttccagtgtcatcagcgatgacagcgtgctgtccagcgactcttttgacttgctggatttgcaggagaatcgccctgcccgccagcgcatccgcagctgcgtctctgcagaaaacttcctccagatccaggactttgaggggctccagaaccggccccggccccagtacctgaagcggtaccggaaccggctggcagacagcagcttctccctcctcacagacatggatgatgtgactcaggtctacaagcaagcgctggagatctgcagcaagctcaactagcattccagggcgcccaggggcgggcgggggtacgagggaggaaggggagcaagacttgggctcacaggctggttacctctttgctggctgtgacaacagactgaaaaaggattggcactgtctcacttggccaagtttgcagccttgagccaacacctaaaagggagaggtgggctcttctgccagttctgtcaattgtcagtcagaatttgggccctgtttggcatttgctttatggcacctcctagaggaccagctgtccaggggaggtggtattgaccggcactcagtgggtggagaggaagcatatgtggaaggagcatttccttagaaatgcttcattcatccagatgcttctggaggaggggcaggagacacttgggctgtttgccttgggcgagcccaaagaacttgccccttttctccttgcattagcaagctaggtctggctgcgtggagctggcaagtagatttcagcaacttgagcttgagttgatgatcaattaatagtggctgccagttgtgctggcgtaagtggcccacatcatggggaaggagtgctgtgattgactagtaatggctaccacgggaaagggaaggggaagcagtagcactaatgctatgtagttgtcatctttgatctggctaggccctgggaatcgggtttagtcatcctgtgggatctgtgttaactctttcatgccactggtgaggcatttgttaatttgctactcaactttgaggaaagacagggccttggtcagagagagaatgctctgaactctgctaaggacatagagtcagcccatggtgatttagctccttgctgttcacctcctctttcctgatgtctgccttgctctacagcacaacctcttgagggtggacagggagaaagatgatggtgtcagaggtcaaaactattatatatgacagggcacaagatggtctgtgatctttgcacagatgaatggaagttgatgcacaccaacaagaggcaacttgtcactttctttctcaatattaactggaatgctgcctcttgggttctcacctgcatggatgctttgagttggatgtgatactgtccatattctccagaggattacctggctgaaccattggctctgttcaccagtgacagatggtttccccatccactgagtgtagcatcctcagaggtaggcaagtttgcttctagggagttagcatgtagatgggatattgggatgaggaaaggaaaatcaggtagatggtgctttttttcccccaaatctaagtattctatgtcatggttttaaactttgccatgaactcctgggctttgggggaagagaaagttccattcatttaaatgaataaggtgttgaaagagtgcagggggttgggaggaagcatgtaagagagggaacatttccttagatgttacccagatggttctgggggagacagaaaagaggtgcggcaggactcttatcttaaaaagtaaacaaaacaaaacaaaacaaaacaaaaaaactagatatgtaatttctaaacacccagatcacaatgacaagatgccactccaaccatgggacaccttcatgatactaggtttgtacttcctggtctctgggatgacttcagattctgctggccaaggcaaattgaactcagttcaagatggccaccactggtagacgtgtagatagaaaagaggactggtcttgggaacatctttggaaaaaccaacaaacaatagttctagggagatgagaaaaaaattcaccttacagtgctaagaaagtgcattagaatggaattgccctttccttaaggagacagtttgggctctccccttgccaccggctctggtgttttggcttatgcgttccttcaggttgagctgagcagtgtgttatgggaagctgctcaatttcctttcattcaattccacctccttcctgaactctaatagaggttaaaagggaaaaaaaaaattctgtagatagcaaattgtgtgtgtgggggggggtgggggtgtgggtgcatggaggacaacctgcaactctgagctccctacttcctgcctcatttcatgcagtcttttctgaacagcctatgctgctgccctgctggccccttgtgcacggcagctggccgtgtccgtagctgtcagtatgacttagatctagctcctacctactggttgatgtgttttttccttttgccaagtgattgagtctgtttagtagtttccatcattctagtctttaagtaaaaatgacactattgaggaaagtcagtctactcccttcttcctccccccaaacacgtgttctcttttgtcaggaaactcagccagtgggctgtggcagagaaagtcctccactcagaggcagagactgagttaagtcataggtggccttaggcatctgcattgtttgcaggggttaagttttccttccagtgagggctggagggatgaattagctggtacctgaagccccgcttagctctgacactctgccaacatcctctgattctaggtgtggtgttgactgtcctttcaaggaaaaacttgcaatagagggaaaagccattaaagcagctccctgcttcatcattaagtcctgtcatccctaccagccaatcccagtcaaagaagttatgctttattcacttctgtggaattacaagtgagagacacttttaggacctgatggacaaagcaggagattcactgtcagctttcctggtcctctccttacttctgtgggccttgcaccgtcttagtttacacatctgccaaaggggtagaattacacttctttttacaggtaaatgtcaaggcacaatcagttttcaggaagtgcttcaagaccccaggtgaaatgaaaatgctaagtaccctctgaatggccatgcctgttaccaggtgctgcttcttcagatgatggggagcacttttcagggtgaaattcaggcgagttttgcccaggcctgctgtcttgagtacaaatgtgaatgatcgactgactgcttgttgccaaactggaaatgttctgtagggatttactggcatggtatcattcctagaagaaaaaaagagagaaacttgactgcacattaaaaaaaaaaaaatccacattgtgacttttatttaatttctattttttttggtaataaaaagttgacttttttatttgaatttgtcttttttatttattggtctgaaaggcatttcaaaggtattataataatatattggtgtaatttaattggtgcaacatgctttatggctcctgtcaaaattggttttcactcatttgattggtttgagcccagaacagcctacaggggaaaaacaagctggataaccacccaaagtgtttgtattttcgttggaaactgatttttgtttcattttggtttttgtttctgtttttatttttaaattaaataaattgcaatgaactg

SEQ ID NO: 22331 - DNA, 7594 bp, Homo Sapiens
cttgcatttttagctcagggataaaggaagataggatctctaccatcaatattttattatccacactgaaaacaaaggtagttcacaataaaaatatcacaaaaacccagaaggtgcgtttctttacggggcagttattgaaccacatagcatcgctgtacaactggaatgggattaccgatgtgaacccagaaaatgtcaaggtttctgccgaagaagcagggaaaaccatggtgcgggagcttgttcataacttcctgatggatctttgctgttcactcaagcatggaattaatttttacgatgcatctttgggtacctttggcagaggcggaaacctgacactcttgcacttcttgctgggtttgaaaactgcagctgatgatgatctggtggctgaccttgtggtaaacatcctcaaagtgtgctcggacttactgaacaaatacttcaaggaagtaacgttttcctttatcccacgagcgaagtctacttggttaaataatatcaaactactaaacaagatctatgaggctcagccggagatttcccgggcatttcagaccagagagtttatacccttgcctcggctcctggcaatggtgatggtgaccaccgtgcccctggtgtgcaataagagcatgttcacccaagcattaaacttggacagcacctcagtgaggcacacagccttatcccttatttctgtcattttgaagagggcattaaaaactgttgaccactgcctgaataaagaggtgtggcaggaatcaggcgtgtacacagctgtgatgatggaagaattcgtgcagctcttcagagaagccctgagcaagattttgccagacctgaacactgtcgtgtgggtctggcagtcacttaaaaagcaagagaccaaacaggatgacaagaaagggcagaaaaggagcgatgggcccccggctgcctgcgatgctcaccagtgcgatgatgcagaaaccattcttttgaaagctgttttgctccaggtcatatgcctctaccagaaggtggtcccccacgtggtcatgcagtacaactttgacttcagcaagctcctgaaaggtgtcatctctgagcagggccttcgagaggaggtgcctcccattctgcagcaccacatgctgaaggtggccctggagctgccggccagcaagtttctgtggttaaaggcacaggaaggcccagatgcagaaattattggaggtgaacgatcagtattttacttactaatgaaaatgtttgtgaccagtagccatttacaactgaagtcattgaccaaacttctgatcatgaagattctgcgggacacgggggtgtttgagcacacctggaaggagctggagctctggctggagcatttagagaacaccatggaagaggacaaagagactgtgattcagtttctggaacgcattttattgacattggtggcgaatccctattcatacacagacaaagcatctgactttgtccaagaagcaagcatgctgcaggccactatgacgaagcaagaagccgatgacatgagcattcccatctcccacattgacgatgttctcgacatggtggatgtcctggtggagggcagtgaaggcttggatgaggaaatagggttcacgttgagtgaagacatgatcctgctcacgttcccattcagtgcggtagtccctgcggccctggaagccaggaataagttgctccttgggacaggcaatgaagcagcggaaaacgttgtgacatatctgacggcagtgctgactgacctcctccacacccagagggaccccctggctctgtgtctcctgctccaggcatatgataagcttgagcctccatgcctggtgccttgctgccagcagctctcacggtttaacagatactacagcctctggatcccggagcaagcccgagaggcctggctgctgcaggcacagggcagcccctcgccccctgcccttcccttggcctcgtccttcacagccctgctgcaggcagcctacgagagccaagcgcttcgggacgagcacatccaggtgcagctgcaggccaccatgccacacctgtccatgcagcaggtcctgctcgcggccaagcaggtgttgctctacctgcggagcactgtggagaacttcggccagctgggcagaagtgtgggcccgcccctcctgcagctcttcctggatctcctcaggcgcctggttgtccactgtgagcagctggatgcccagaaccagcagagatgcgaggccgcccgggccgaagccgacctcttcctggacatggagtccgtggcctcgctggagttggccaatgatcagacgctggaggaggtgcttgtggccatcctcaggcaccccaccctggagggctggttcctggccctggagcagcaggccctcccgccgcacacgctcagccctgtcctcgtgaagctcctggccacccactttagtgcaggggtccttcagctgctggcagcaagtgccccgatcctccagaacattgggcagctgggccttctggccaggtactcagaggccatcacccagagtgtgctgaaggaacttcagaacaggagggcgggcccggccacatcaccaccaaagaccccgccgcagctggaggccctgcaggagctgcatccatacatggagggtgcccagctccgtgaggtcaccctggccttgctgagcctgcctgagacacacctggtgacccagcaacccacgaaatcccccgggaaagaaagacacctgaatgctcttggaaagaccctggtgcagctgctgacctgcagcccccaggatcagctgcagagtggtgagctcctgtggtcctccgagtatgtgagaggcctgggggctctgctgcccacgctagcagtggacgagctggacacagtgctcctccacactctgcagagagaccctgtgctggcccccgcagtcggggctgatctgcttgactactgcctggcccggcgcacacaggcggccctcagcatcgctgccctgctcctccaggagagctgcacccacttgctgtggttcgagcagtggtgcctgcaggctggcccagggctcggcctccagggggacctggacgacttccttcccctcatccatgtgtacctccagtgcaggacacggagccacttcacacgcccagcaggagtgtcttccgctgtcattcctgtcttgaggaagaccctgtggaggcagctacagagcaggcttcttagcactgacagtcccccagcatctgggctgtaccaggagatcctggcacagctggtcccgtttgcacgagccaaggatctcagtgtactcatggaccgcctgcccagcttgcttcacaccccaagcagtcacaagaggtggatcgtggccgactccatttcagcagctctggaagggtcagcagaagagctgtgtgcctggagaaggacccttttggagtcctgtgtgaagtggctgatcgtgtctttcagtggtggacagcaagatgatgataatactcagaatcaggagaaggaaatgctgcttagattaaatgcgttgttgcatgcacttaatgaagttgatcctggtgactggcagaaattcgtgaagaagggactcaaatttcggtaccaggaccacacatttttaaagatgctcctcaccgccgtacagctcctgtacagcccagaaagctccgtgcgcacgaagctcatccagctcccggtggtctacgtgatgctcatgcagcactcgctgtttctgccgactctactgacgtctgacggagaggagagcccggacagccaagtaaaagaagcgctggtggacctgatgctgacggtggtggagatgtgcccctctgtctgtgagagcagccactttgcagtgcttctcggggcctatggcgccactctcagcgtcctagatcagaagattttacttctgcttcgagcgtatgagcagaacaagctcagcctcatcaacttcagggtgctgctgtggggcccagcggccgtggagcatcacaagacgtgccggagcctgggcaggtcactgtggcagcagccgagtgtcggggacatccttcgcctgctggaccgggaccggatgatgcagaccatcctgcacttcccccagaaccggaggctgctgccccccgaggacacacaggagctgatattcaaagacaaaagcagggtggatcttgatggcctctatgacccctgctttctccttcagctcttcagtgagctgaccaggccagagtttgtggtggattgtcgaaaatttttggattcaaatgctctgggcctaactgtcacagccctcagcagctatgacccccagatgcgagccatagcctaccatgtcctggcggcctactactcgcacttggagggcgcacggttccaagagcagtcccagctactttacctgttggatgtagtccggaatgggattcgaactcaggacatgagacttacttttaccttggctctcttcattgccaaagcagccctgcagattttgaaaccagaggagcacatgtacctgaaggtcagcaacttcctgctgtcgcatgagtacttgaacatggacaaagtgccaggcttctaccagttcttctacagctccgactttgagcaaaaaacagagcagaagtgggtgtttggccttctgcggcaggggatccgtgacaagcagtgctacgaactgtgtgcccggcgtggcatcttccacatcatcctgtccttcttccacagcccgctgtgtgacgaggcagcacagaattggattctggaaattctacagaatgctgcccaggttgccagatctgcgtatgaaatcatacgagactatagccttttaacatggattttacacatccttgaaagcaagtttctggagactccgctgctgtctaatgtgatctccttgctacacacactgtgggtgaccaacctgggggacaaggcagtggagtgggagagccagcgcctttgccagcctagctcccaggagcctgccaagcggcttgccctgcacctggtcaatgagttcctttatgttctcatcgtgctcatgaagcacctgaggcccaccttggcccccgtccagctgaccaacttcttcgggacacttgactccgtgctgaggtaccgggccactgtcatacaggcctttagggacatgaacagattcaccgtaaatgagacagtgctttccaccaaggacgtccttgtcctcttgcacaagtggagcctcattgaaagagacctcaagctccaggaagacctgagagcagccattgagaaggcccaagcccgggagctcatgaaaatgctcaaggataagaacaagcctgtcatgccagcccgagccaaaggcccacggggccgaaagaggaggcctggggaggcagaggagatggctgaccctgagctgatggcatctaccttggagacatgcaagggcctcctgaggtccatcttgacttactggagaccagtgatccctggtcctgaccccactcaggagcctgtggactcagccagccccgagagcgatgcgccaggccccgtatatgctgccgcttccctggcagtcagttgggtgctgcggtcggtggccgagcacccgctcagcagggcagaggctgcaggactcattggctggcttaagagccatattttgccacaccctgtggtcgtggctgacctccttaaggacagtgccgtgaggagcagcatattcaggctgtatagccggctctgtggggctgaggggctggcagggcctgtgcaggaggtggcctgcctgttcaatacggtcatgctgcagctggtggctgcccagggccgggcagggagccccttccacccggccatggaagccctctccctgtcttctctgagtgagaaggatgaagccacacaagcctccgcagcattcctagtgtctctctacataaaggacatctggctgggggctcagcggccggacaccctcttaacccacgtccggatggtgtgtgaggccgcagatgatgccccgagcagtgaagaggaggccatcgtggtgctctgcaaggacgccgccagcgcagcctcagatgcttgactcctgccggccagcaccttgcaccctgatgaccagagcctcgagcacagcaccagcttctagaagtttggttgagtcaagggtttccagagaaggcatgggaaacaacaggttcagtacattggctcagttctttgacaagaaaagttgagaggactttattgaactgcccagtaaatgataaactcgggcctgtaggtgcccagcatcagagttgcaaggaatgtggggacttctaggccatgaggcccatccagtgcctcgtcaggccgccccttcctctctaggggcttggagctcatcacaggaaatagctcgagtttgaggcagcacttctgaatgcagaagagattcatctgtgttaaagctgaaatgtcaaaaggtatcagattttttttatgaaaacgaagagagatgtttaaagtttatttttcagcaggtgaggtggctcacgcctataatcccagcactttgggaggccaaggcgggtgaatcacctgaggtcaggagttcgaaaccagccttcccaacatggtgaaaccccatctctactaaaaatacaaaaattagccaggcatggtagcgcacacctgtaattccagctactcgggaggctaaggcaggggaatcgcttgaacctgggaggtggaggctacagtgagctgagatcgtgccattgcgctccagcctaggtgacagagcaagactccatctcaaaaaaataaaaaaataaagtttgtttttctataaaaagtcataacaaagtattagtatgactttttgaataagttaatttctgccagtgtttaattattttattaaagaaaaggatgttacactgaatccttaaagaataaaagtgatttgacctctgctttgagaagacagcctgtaatttttaaagctatacttcaaagaggggattttgaattttataaatgcttgttaatgtctatttttgtaaggtttttgtgttttcctttcattgttgttaagaggctatttttgctccacataggcctgcatttattttaaaggtcagaattttactcttaatggtcatatattagttggggttgtagctgacaaaagtcatgaaatttcgtggttttcacagttaaaatttccgtctgttcctttaaaactctcctgcatgcctggggctcttgggatctgctctgtggcctaggatgtggctgttttatctgccgtataatgtacatcgtgctgacaatgccttggttttgtctgaaacatttacacttctattttccaccagtgttctttagaattgtttctgttttaggtgacttaaagttttaactaaagcatgagtaacgtttgttggcatacagtcccttcaccacaaataattgtcttgcactgtctacaaagcaaggatcagttacctcacttgtccccttccctacccaaataaaccttacaacgct

SEQ ID NO: 22332 - DNA, 5848 bp, Homo Sapiens
agtggaggctgcggccggggctatgggcagaggcggccgggtctgcttcttccctgtcactgccgcagcagcttggggtgcaaggcggcctggggcggcggaaggggcgccccccgagttccgtctgaggaagcggcggctgccgaggaagtccacgagagccgggtcccgcacgcccctggggtccgggtgctgaggcgccgcctggccgcctccccgggccgcggcaccgctccgacctagccgccctctccaccggggccgcggcagcgccagtcggggcccttccctctaagcagcccaaacgtgcagaatgccccacaagattggatttgtagtcgtcagctcatctggacacgaagacggcttcagtgcccgggagctcatgatccacgcgccaactgtcagtgggtggcggtcacctagattttgccagtttccacaagaaattgtccttcaaatggtggagagatgtcgaataaggaaactgcagttacttgctcaccagtatatgatttcaagtaaaattgagttctacattagtgaaagcttgcctgaatattttgcaccctatcaagcagagcggtttcgaagacttggctacgtgtctctctgtgataatgaaaagacaggttgcaaagcccgggaactaaaatcagtttatgtggatgcagtaggacaatttcttaaactgatttttcaccaaaaccatgtcaacaaatacaacatatataatcaggttgctttggttgccataaatatcattggagaccctgcagatttcagtgatgaaagcaatactgcctctcgagagaagttgattgaccactaccttgggcacaacagcgaggaccctgctctagaaggaacgtacgccaggaaatctgactatatctctccgctagatgacttagcttttgatatgtaccaagatccagaagttgcacagatcatacgaaaattagatgaaagaaaacgggaagctgtccaaaaggaacgctatgattatgccaagaaactaaaacaagccattgctgatttgcaaaaggttggtgagcgccttgggaggtatgaggtagagaaacgctgtgccgtggagaaggaagactacgatctcgccaaggagaagaagcagcagatggagcagtatcgtgccgaggtgtacgagcagctggagctgcacagcctcctggatgccgagctgatgcgaagaccttttgatttgcccctccagcccctcgctcgttctggcagtccttgccaccaaaagccaatgccctcactaccacaactggaagaaagaggaacagaaaaccagtttgcagaacctttccttcaggaaaagccttcatcatattctctaactatttctcctcagcattctgcagtagacccgttactccctgccacagatcctcatccaaagatcaatgcagagtccctgccctacgatgagcggcctcttccagctattcgtaagcattatggggaggcagtggtggagccggaaatgagtaatgcagacatcagcgatgctcggaggggaggcatgttaggggagccagagcccttaaccgagaaggccttgagagaagccagctctgccatcgatgtgttgggagaaaccttggttgctgaggcctattgtaagacgtggtcctaccgagaggatgcactgcttgccttgtctaagaagttaatggaaatgcctgttggaaccccaaaagaagatttaaagaacacactgagagcatccgtctttctcgttagaagagccataaaggacattgtgacctccgtttttcaggcttctttgaaattgttgaaaatgatcattacacaatatattcctaaacataaactgagtaaacttgaaacagctcactgtgtggagaggaccattcccgttttgctcaccagaactggagattcttctgcccgcctccgcgtcacagctgcaaattttattcaggaaatggccttgtttaaagaagttaagtctctccaaattattccatcctacctggtgcagccattgaaagcaaactcttcagttcacctggcaatgagtcagatgggcctcctggcccggctgctgaaagacctgggcactggcagctcgggcttcaccattgacaacgtgatgaagttttcagtgagtgccctggagcatagagtgtatgaggtccgcgagacggcggttcgaattattttggacatgtacagacagcaccaggcttccatcctggagtaccttcctccagacgacagcaacacacgcaggaacattctctacaaaacaatttttgagggatttgctaaaatagatggcagagctacagatgctgagatgagggcacggagaaaagcggctacagaagaagcagaaaaacaaaagaaagaagaaataaaagctttacaagggcagctggcagcactgaaagaaattcaggctgaagttcaggaaaaagaaagtgatgctgtgaagccaaagaatcaggacattcaaggagggaaagcagcccctgctgaagctctgggaatcccggatgagcactatctagataatttgtgtattttttgtggggaaaggagtgaatccttcacagaggaaggtctggatctccactactggaagcactgtctcatgctgacaagatgtgaccactgcaaacaggtggtcgagatatccagtctgacggagcacttgctgacggaatgtgacaaaaaagacgggtttggaaagtgttaccgttgcagtgaggctgttttcaaggaagagctgcccagacacataaaacacaaggattgcaaccctgccaaaccggagaagctggcaaaccggtgtcccctgtgtcatgagaacttcagccctggagaagaggcatggaaagctcacctgatgggcccagccggctgcacgatgaacctgcgcaagacacacattctgcagaaggccccggcactgcagccagggaaaagctcagctgtggccgcatcaggccccttggggtcaaaggccggaagcaagatccccaccccgaagggcggactgagcaagagctccagcaggacgtacgccaagcgctgacgcggcgctcgggctccttggtctctgtgagggatggagcgggtctcctgattctacaccatctctccagaactctctggccttggtggccccatgctctggctgctgtccccagctccccgccgtgcacgcctcttacgcgtctgtgccgtcagctctcgtgcaaacgatatggatgcagctaaccaaagatcctgcgtgcagtgccaggacctggccgcactgtacattaagccttcagggctgtctcaggccttccttagaatcagagaaggaagcgtcctgtttggagagagccagagagcaccgccagggaggcgctcgcgcaaggccacggtcagcacaggcacggtcccgctttccttagtgcttggagcaatttccataaaacattcaccagaaaccttttgcacatcggtctctgccacacgcagtagaatttccgcagggctgtggctcggccagcagcggttccaggagagtggcggtgcgcacgggcctccagccgtgccttccccctgcaggccccgtctgctgggcctgctgcccagtgcactcagccccaggtagcagaactcacgttcccactatagcaagaaataaaggcaaaagagaacatcttttttttaatcgtagtttttttgagaattggtcccacctcagccgcaccttgctggatgcttctccagtagtgctgcccctgtgacaggcatcagctccctgctggaactgaggtagacacaggtgtgggcccttcccgtgcctttgctcagaggcgcttcactttctccacactttcgaattcctaaagacatgtggaggaagtcactgttaaatgaatttccacctgatcaccctgtgttcacagcaggcagaagcccactggtatgggcctcccgccccttccacatccatgttgtgattggatccataagtttactttcttcaaagagttgataggatgtttaaaacatcaacacattgcttaaaatgatgaaaccaaccctcaaaaaacagtctcctaaccagccatcccctcctgtgggagtgagctgggggttttgtccatagctttggttgggcctgtgtcacatccaggcagccatgtggagggagtcagggtctgtctggaagcatccaccctctcgctgccccagcctgtgctcccaggggcctaggctaccatggactgaagggcagtcccctcccacctggtgcccagggcttctgcttgcctcgctgatgttgcatgggcagacttcaaaaaggatagttagaaaggtttgggttgatggagtttgcattaatgcaattagtgtataaatatgttttaattgccaaccgtgtgaaacaacaaaatatctaaaaactaatcccgatttgaacaatgtactccctggcctggatacattaataaccataaatttgcatgaattaatctccacgtttggtaaactaatacctctggttgactgagaatactgagtaagatataagacctaccaggaacctttaagaatatgctctgctcggtgttgtttgtctgcttgtttgcgacagagcgagactccgtctcgaaaaaaaaaaaaaagtataaggagagaaataactttaaagtttattagacaaaacagagtatagatgccaagatgtctgtaaaatgattttttctggttttaaagagatgttggccattattttctaatccatttttaaaatacagacaaaacacttctttaaacagaacaagaatgagaaaagttaaccaaggaattattcttttctcaccaatcaacacttttaagaaatatatatatatatacacacacatatacacatgccttctatatattgtaacttaaagaaaatacttataaaaagacttcatttttagtgattgacaagcaaacgggttcatttaaaacaggttcctcttttgttagttacagggggtttttttgttgtttttttgtttttgtttttgttttgcgggggtggtggggtttgagacggagtcttgctctgttgcctaggctggagtgcagtggcgcgatcttggccccctgcaacctccgcctcccgggttcgagcaattctcctgcctcagcctcccgagtagctgggattacaggcgtgtgtcaccacgcctggctaatttttttgtatttttagtagagacggggtttcaccatattggccaggctggtctcaaactcctgaccttgtgatccacccacctccgcctcccaaagtgctggaattacaggcatgagccaccgcgcccggcccaatcatgtgtttttgttgaaatgatcctaccagtgattagtggctattgagagttttacagggttatacattgttaagggaccaagaatcaagtacaaaaaattaaaaaggaactgtaaaatcccttggtcattcataaataaatatctaaattaggaatactaattaattgaattttcactcatgagtatgttctgaatatttaatatttatttctattattttcatatgttaagatattccattaaatctaacttaaaagaattgtatgtataaattggcattaggatacaaatgtaaatgtttttaatgaaattttgcaactttttaatattttaacatagttttctatttgtctttatttcaagtaccagaattacaaaatatctaagtaatatatttttgttgtcgttttagggcttaagggttaattcacccagagtatattaatataataaaaagatcact

SEQ ID NO: 22333 - DNA, 5857 bp, Homo Sapiens
agggcgtggtcagcgcggccgaagggcgtggttggcgctcggtcctgccctgcgcgttttgggctgcggttggagggccgcagttgcagtcagggtccgccagctcggggccagcgcatggggctgctgagaccgctccggacgtgcgaagcgttcgcggtgcggtaggaagctgaagtcttcagcagaaccctgacctaggtagggagtctcaatggccctgggtgaagaaaaggcagaagcggaagcatctgaagacacaaaggcccagtcctatgggagagggagctgcagggagcgggagctggacatcccagggcccatgagtggggagcagcccccacgcctggaagctgagggagggctcatctcccctgtatggggggcagaagggatacctgcccctacttgctggattgggactgaccctggcggcccctctagagcccaccagccacaggccagtgatgccaacagagagcccgtagctgagaggtctgagcctgcactcagtggcctgcctcctgccaccatggggtctggagaccttctgctctccggggaaagccaggtggagaagaccaagctttcttcctccgaggagttccctcagactctgagccttcccagaacaacaactatttgctcaggacatgatgctgataccgaagatgatccatccctagcagatttgccccaggcactggacctcagccagcagcctcacagctcaggtctctcttgcctgtcacagtggaagtccgtgctgagcccaggttccgcagctcagccttccagctgcagcatctctgcttcctccacaggcagcagtctccagggtcaccaggagagggcggagcctcgtggtggttctctggccaaggtctcctcctccctggagccggtcgtcccccaggaaccttcctctgtggtggggctaggacctcggccccagtggtcaccacagcctgtgttctctgggggtgatgcttctgggctaggcaggagacgcctctccttccaggctgagtactgggcctgtgtgctgccagattccctgcctccatcacccgaccgccactcccctctctggaacccaaataaagagtatgaagatctgcttgactatacttacccactgaggcccgggcctcagctcccaaagcaccttgatagccgtgtgccagctgaccctgtcctgcaggactccggggtagacctggatagcttctctgtctctccagcaagcaccctcaaatcacctactaatgtctcccccaactgcccaccagcagaggccactgccctgccattttctgggcccagagagccaagccttaagcagtggccctccagagtaccccagaaacagggtggcatgggcttggcatcttggagccaacttgcatctacccccagagccccaggcagtagggatgctcgttgggagcgcagagagccagccctgaggggtgcgaaggaccggctgactataggcaagcaccttgatatgggctctccccagctaaggacacgggacagagggtggccctcgcccaggccagagagggagaagaggaccagccagagtgcccggcgccctacctgcacagagtctaggtggaaatcagaagaggaagtggaaagtgatgacgagtatcttgccctccccgctcggctgacacaggtttctagcctggtttcgtatctaggatccatttctaccttggttaccctgcccactggggatatcaaagggcagagccccttggaagtgtcagacagtgatgggccagcttccttcccttcaagctccagccaaagccagcttccccctggagctgccctccaaggatctggggatcctgagggccagaatccctgtttcctgcgctccttcgtccgtgcccacgactccgcaggggaaggcagtctggggagcagccaggccctcggggtctcctctggactgctgaaaacacgcccctccttgccagctaggttggaccggtggccattctcagacccagatgttgaagggcagcttcccaggaaaggaggagaacagggaaaagaatcactggtgcaatgtgtgaagacattttgctgtcagctggaagagctgatctgctggctgtataatgttgcagatgttactgaccacgggactgcagccaggtccaatcttacaagtctcaagtcttctctgcagctttaccggcaatttaagaaagatatagatgaacatcagtctctgacggagagtgtcttacagaagggggagattcttcttcagtgcctgttggagaacaccccagttttagaggatgtccttgggaggatcgcaaagcagtctggtgagctggagagccacgcagatcgcctgtatgactctatcttggcctctctggacatgctggctggctgcacccttatccctgacaaaaagcccatggcggcaatggagcacccatgtgaaggggtttaacctggcatcttctcaggcagaggtgcaacctgtcggccaaacactggctagtgagaaaaaatccttcaagaagtccttgcaagagccattcaacactgaagtcaagggggaaaccttcaatatactagctttaaaatgcctttctcctccctgaatggagggctgagttactatttttatttacaatgaatccttccaaactaaggttttccttttggtgcttctccacaaagagcgtgtagctttgcaatttttgataaaataagacgtgttgccttcccctctatcccattaaaaaagagcagataaagctcaaactattccacctggtagggtcatttaccaagggctggtaggagattccgaatactcaatattctcaggcatgcaagaggacctaagagactgaaaaaagtgaattgttggccagaaaccttgggtcttttcataaaggaaatttgggcttgtcaatccctctttaaagatataggtagaaagaagagatttttaaccctttgtctgcaaaagaaaaagggttaaatgaagcatctatacagatgactttgggagattatgacaccttttgccatcttcagggcttacgtctttactttcttggctaaccagtttcttagaagaaaatgtgtcagggacttggggatctacagtcatgctttagcatggctatggagctaattatcaagcttaaagggtaactttgggaggactcctcccttcactcctagtctcccttggaagagcagtccaggctcagggaagggaatggataggatgacacagtaagtacagaaactgaagctgtcaatagtgaaggaaaaaggggaattcttcgttgctttggcattgacacataagtactttgattaaaaaaaaaaaaaactatggatcaaccattcaaagcatcaattctatagctttttgcagcaagatgatcagttattgctggtaactgcagattctacagaaaagcacttttaaagttctgttgggccatgaatgaacctggaaggaggaaagcacagtaacaatggaaactaaagtcctattattaatgtgacttttctgcttcagaatttctgagactttatagtcactggaaaatagccattaaattctttaaagattagctcttcaacagtagctacacataaaatgcagtatttcaagtgcctgatgctgctgtggtatgctttatcataatgcttaagggcatgatcaaaattaaaatggcttatgagtttgccatattaatcatcttagttccatacacactgagactttaaaagggaaaaaccactctagcaaataattgtcaattataaacctgtatgtaaaacattcttgaaaacctagagttggttaaaaaggtagagatgtctgacggcctcttcttaaattgatatattttaccttctcttagatgtatatttataagtaggaacatgtccttccactgagtatgttactgaatagcccttaggaaattaaacccatttatttactaatatttgacaggcatagaagtgtattaattagcataaaagttggagatgaaaaccctatagaaacaaattggccaatattatactaattgaatgcagaatgtggcattctattcccattcaactaataatcagcttcaactgacaggaatttgcacagaatgttacacaataccctgtttcccaagaaagtactaccttacctagagatgatctaagatatttttgttcatcctctgaataaggtgagactaaagggtgctaactccctggacctggctgtgaatgctactgaagagtatcaacacaactgttaattataccgccgtgctttaagtttaagacttaccttaaaactcaagctgaaggctgggcacggtggctcatgcctgtaatcccagcactttgggaggccgaggcgggtggatcacaaggtcaggagatcgagaccatcctggctaacacggtgaaaccccatctctactaaaaatacaaaaagaaattagccaggcgtggtgatgggcgcctgtagtcccagctacttgggaggctgaggcatgagaatggcatgaacccgggaggcggagcttgcagtgagctgagatggcaccactgcactccagcctgggcaacagagtgagactcttgtctcaaaaaaaaaaaatcaagctgaaattgtttcagcctagtaagatgctgccagcagcatttctatgagcaaacatggccaaattagagtcaagtagctgagcttgctaactgcactgtgatgccacactggaataacttagtagtcccttaaaattaatggaagttaaatccacagggaagtgatgatactcaaagctggatcagcagtttcaagatctgggttcttggagatccataggtaagctcagcaaatggaagacgacgtcaacacagggctattttgaagcttaggtgggaatggaacacaaagaaggtttgaggtaagatatgctggaaaggcaagatgtaggctaagggaaattcaatccaaggtcgaagaataggaaattactgctcagaccacaatgactatcattctgaaaggatttcacagagtgtgcagctgcttagatttaagaacactcttcttcactatgtaaactaatttatggcagcaccttatatttagaacaagtggtaattccctttactaagtgaacagattattaaaacctgtagtagctttgaaccgtttgtacttgaaaatgggggtataaaggggtatatattttttccagaaccacatttattggcgtatacatagaagcaaatcttaaggcatgctgaaatttgttgtaaatcccaatctttactgccatggggaaaagaacgctggaattttccaaacttaagtctgtaaatatgctcatcttaagttcatgtaatgtttccgctaactcaccaagaataagctgacaatttaaacaacttttactgtgtaaaaatgaagtgcacggcatggcatcacagtatcttgacatttgttttgtgtcatttagctactttagaaaatagtttctgaactctttccccctttatactgtattaaggcaaaaacaaaacttctgaagcattaaagatcttcaccaaaataactattggtaacttcaggaatttgtcagttgccttatgtgaggatgaatagatccaccaagcacgcctataatacaaagtaaactatgatttttattgtgaaattttcatagatggaaaattgaatattctgtccatttcattttacaattatcttaccacttatttttgtaccatgtatttcaattgcctgtttagtgaaaaataaaaattaaaaaaacct

SEQ ID NO: 22334 - DNA, 2580 bp, Homo Sapiens
gctgagagacgacctggaagttctgaggcagcctttgtctggctggaacacgcattggcagcgggagctgtcggtaggacctgggacaccgcggaagtcgggaaatggcctcagtggctttagaggatgtggctgtgaacttcacccgagaagagtgggctttgctgggtccttgtcagaagaatctctacaaagatgtgatgcaggaaaccatcaggaacctggattgtgtagtaatgaaatggaaagaccagaacattgaagatcaatatagatatcccaggaaaaatctaagatgtcgtatgttagagagatttattgaaagtaaagatggaactcaatgtggagaaacatctagccagattcaagatagtattgtgaccaagaacactcttcctggagtaggtccttgtgaaagcagtatgagaggagaaaaagtcatgggtcattcatcccttaattgttacatcagagttggtgctgggcacaaaccacatgagtatcatgaatgtggagagaagccagatacgcataaacaacgtgggaaagccttcagttaccacaactcatttcaaacacatgagaggcttcacactggaaagaaaccatatgattgtaaagaatgtgggaagtccttcagttctttgggaaaccttcaaagacacatggcagtgcagcgtggagatggaccttataaatgtaagttgtgtgggaaagcgtttttttggcccagtttattacatatgcatgaaagaacgcacactggagagaaaccatatgaatgtaagcagtgttctaaagccttttctttttacagttcctatctaagacatgaaagaacacatactggggagaaaccgtatgaatgtaaacagtgttctaaagcctttcctttttacagttcctatctaagacatgaaagaacacatactggggagaaaccatataaatgtaagcagtgttctaaagccttccctgattccagttcttgtctaatacatgaaagaactcacactggagagaaaccctatacatgtaaacaatgtgggaaagccttcagtgtttccggttcccttcaaagacatgaaaccactcacagtgcagagaaaccctatgcatgtcagcaatgtgggaaagcgtttcatcatctgggaagctttcaaagacacatgataaggcacactggaaatggacctcataaatgtaagatatgtgggaaaggctttgattgtcctagttcactgcaaagtcatgaaagaactcacactggagagaaaccctatgaatgcaagcagtgtgggaaagcattatctcatcgctcaagctttcgaagtcatatgataatgcacactggagatggacctcataaatgcaaggtatgtgggaaagcctttgtttatcccagtgtatttcaaagacatgaaaggactcacactgcagagaaaccctataaatgtaaacaatgtggcaaagcctaccgtatttccagttcccttcgaaggcatgaaacaactcatactggagagaaaccctataaatgcacacttgggaaagcctttattgatttctgttcctttcaaaatcacaaaacaactcacactggagagaagccatatgagtgtaaggaatgtgggaaagcattcagtcgtttcagatacctttctcgacataaaaggactcacacaggagagaaaccttatgagtgtaaaacatgtaggaaagccttcggtcattatgataacttaaaggtacatgaaagaattcactctggagagaagccgtatgaatgtaaggaatgtgggaaagcattctcttggctcacttgctttctacgacatgaaagaattcacatgagagagaaatcctatgaatgtccacaatgtggtaaagccttcactcattcccgttttcttcaaggacatgaaaaaactcatactggagagaacccgtatgaatgtaaggaatgtgggaaagcatttgcttctctcagttccttgcatagacataaaaagactcactggaaaaaaactcacactggagagaacccatatgaatgtaaggaatgtgggaaagcatttgcttctctcagttccttgcatagacataaaaagactcactagcattctctctaaatgtatggaatgtgggaaagcatttattaattttatttcatttcagatacttgtacgaaacacattggagatagaccctgtgaatgtaagcacttggtaaagccttaagtagtttcagtttctttccagtacagtcatcccttgatacctgctgggtattggttccagcactccgtgagccatgtccagtcccttttataaaatgacatgtttgtatgtaacttacccacatcctcttgtatagtctcaattatgtctagattacttaaaatacctcatgcattataaaagctatgcaaatagttgttctattgtattgtttagggaatcatgataaggaaaagagtctatgtattttcagtatagatgcagtaattgtcagcctatcaacatagtgtagtcagccagaacattaaagtttctttgtttcaactcccaaaaaaaaaaa

SEQ ID NO: 22335 - DNA, 5355 bp, Homo Sapiens
cagcggggagggcgggagccggctctcgggcggcggcgctgaagtttccttcccgccgcgctctcaccccgggctggcgccccgtgccatgcgggagcgctggggcggcggggcaacatgaagggcggcgacagggcttacacccgaggtccctctttggggtggctctttgctaagtgctgctgttgcttcccgtgtagagatgcatactctcattcctcaagcgagaatggaggcaagtccgagtccgtagccaacctgcaggcccagccctccctgaactccatccacagttccccgggtcccaagcgctccaccaacactcttaagaagtggctgacgagtcctgtgcgtcggctcaacagcgggaaggcagatggaaacatcaaaaagcagaagaaagttcgcgatggtcggaagagctttgacctgggatctcccaagcctggggatgaaacaacccctcagggagacagcgctgatgagaagagcaagaaaggttggggtgaagatgagccggatgaagagtcacacacacccctcccaccacctatgaagatttttgacaacgaccctacacaggatgaaatgtcctcctctttgctagcagcccggcaggcttccactgaagtacctactgctgcagaccttgtcaatgcaatagaaaagttggtcaaaaacaagctgagtctagaaggaagctcataccgggggagcttgaaagaccctgcaggctgcctgaatgaggggatggccccacccacacctcctaaaaatccagaagaagaacagaaagccaaggccctgagaggcaggatgtttgtcctgaatgagctggtacagacagagaaagactatgtcaaggatctgggcattgtggtggagggcttcatgaagagaatagaagaaaagggtgtccctgaggatatgcgaggaaaggacaaaatcgtgtttggaaatattcatcagatttatgactggcataaggattttttcctggcggaactggaaaagtgtatccaggagcaagacagattggcacagctctttattaagcacgagcggaagctgcacatctacgtgtggtattgtcagaataagccgcgctcagagtacatcgttgctgagtatgacgcctactttgaggaggtaaaacaggagataaatcagaggctgacactgagtgacttcctcatcaagcccattcagagaataacaaaataccagttgctcctcaaggacttcctgagatacagtgagaaggctggtttggagtgttcagatatcgagaaagcagtggagttaatgtgccttgttcccaaacgctgcaatgacatgatgaatctaggacgtctgcagggctttgagggcactctgactgctcaggggaagctgctgcagcaggacacattctatgtgatcgagctggatgcaggcatgcagtcccggaccaaagagaggcgcgtgttcctcttcgagcagattgtcatcttcagtgaactgctcaggaagggatccctcacccctggctacatgttcaaaaggagcatcaagatgaattacttggtcctggaggagaatgtggacaatgatccctgcaagtttgcactcatgaacagagagacttctgagagggttgttctgcaagccgccaacgctgacatccagcaggcctgggtgcaggacatcaatcaagtcttagaaacacagcgagactttttgaatgcactgcaatcgcccattgagtatcaacggaaagaaaggagcacagctgtgatgaggtctcaacctgccaggcttccccaagccagccccaggccctactcctctgttcctgcgggctcagagaagcccccaaagggctccagctataacccacctctgcctcccctgaagatatctacctccaatggcagtccagggtttgaataccaccagcctggggacaagttcgaagccagcaagcagaacgacctgggaggctgcaatgggacctcgtccatggccgtgatcaaagattactatgcactgaaggagaatgaaatctgtgtgagccaaggtgaggtggtccaggtcctcgccgtcaaccagcagaacatgtgtctggtgtaccagcctgccagcgaccattcccccgccgccgagggctgggtcccaggcagcatcctggcgcccctcaccaaagccacagcagcagaaagtagtgacgggagcatcaagaagtcatgttcatggcatactctacgcatgagaaagcgggcggaagtggagaacacgggtaaaaatgaagccacagggcctcgtaaacccaaggatattctgggcaacaaagtctctgttaaagagacgaacagttccgaggaatcagagtgtgatgatcttgaccctaatactagcatggggatcttaaatccaaatttcatccaagaagtggccccagaattccttgtgcccttggtggatgtgacctgcttgcttggggacacagtgatactgcagtgcaaagtctgtgggcggccaaagcccaccatcacttggaagggtccagaccagaacatccttgacactgataacagctcagccacatacacggtctcctcttgtgattctggagaaatcaccctgaagatctgtaatctgatgccccaagacagtgggatttatacctgcatagcaacaaatgaccacgggaccacatcaacgtctgcaacagtcaaagtgcaaggtgttccagcagcccctaaccgccccattgcccaggagagaagctgcacctccgtgattctccgctggctgcccccctccagcacaggaaactgcactatttctggttacactgtggagtacagagaggaaggttctcagatctggcagcagtcagtggcttcgaccttggacacttacctcgtcatcgaagaccttagtcccgggtgtccttatcagttcagagtcagtgccagtaacccctggggaatcagccttcccagtgagccctcggagtttgtgcgacttccagaatatgatgctgctgctgatggtgccaccatttcttggaaggaaaattttgactcagcttacactgagctgaatgaaattggaagaggccgtttctctatagtaaagaaatgcattcacaaagctacccgcaaagatgtggctgtgaaatttgttagcaaaaaaatgaagaagaaagaacaggctgcccacgaggctgccctgcttcagcacctacagcacccccagtacatcactctccatgacacctatgagtcccccacatcctacatcctgatcttggaactgatggatgatggccggctcttagactaccttatgaatcatgatgaactgatggaggaaaaagtagctttctatatccgagacatcatggaggctctgcagtaccttcacaactgcagggttgcacatttggacataaagcctgaaaacctgctcattgacctacggattccagtgcctcgagtgaagctcattgacttggaggatgctgtccagatctcgggtcacttccacattcaccacctgctggggaaccctgagtttgctgccccagaagtcattcaaggcatccccgtctccctggggacagacatctggagcatcggggttctgacatatgtcatgctgagtggggtctcccccttcttggatgagagcaaagaggagacatgtatcaacgtatgcagggtggatttcagcttcccccatgaatacttctgtggtgtgagcaatgctgccagagatttcatcaatgtgatcttacaggaagattttcggaggcggcccacagcagccacatgcttgcagcatccatggctgcagccccataatggcagctactctaagatccccctggacacctcccgcctagcatgcttcatagaacgtcgcaagcaccagaatgatgtgcggcctattcccaatgtcaagagctacattgtcaaccgggtgaaccaagggacgtagccatctcccagcccctatggtttcacatagacgtgcagtgtgaaccaaagcaagactgaatgtgactgtaaataattctgttcatcatttcactccgtgcagttctctgaattgagagatgtacctcttaaacctcgtcagtggttattcagggtctgagcagcagtaaaagtcaccctaaatcaaggggcttttcagaaggtcattctgaagaaataaagaggcaaagggtcacagaagtgttcagaagaagggcaaagataagaacaatattagctgttacgaaattttaactgtatcttccaaaatgagtggttaactgggcaaaccttaagctcacaagagtataaaagatctctggctttgctgaaattttaagcaagaagttctatttaatggagatgtcatgtatatcaactattctggtttagataacttagatatagtttcttgataggatagatacccacatacagtataatatatcccattcaggtttcagagtttttctaatatagagatatatatattaaatcaatcacaagtaattttgagtgctccagttaagacagtaatttatttaccgaatcattacattgttttgactaagcacaattagatgacaagtttttttagagcattttatagatcttgtatagaaatcttttaccagaacctgtgcattaagagaaagcaatgttgcccttttgaatgagaaaattttttctgtcaatcgcaggttatttgattaagataggttctttctgtatatgaaacgctccccgcaaattcactggcagctcagaattattctggaaagaaagcctgccaggaaataaattcaaatacagtatgagctgcggggatatttttgtgtctacaccaggtttgaaataagtaaacaaatacaagaggttcatataaaagggcaaatgaaaacctttcctacagttcctatgaacaacgtaccaacactttctgatttcttctacagctgtagaataccatctttcagaaagttggctggctttatttctaactccttattgaagctaaggggtgcttactaaaaggaggcagccatataggccttttaaaggcctggttctaagtcctttttaaagccatggaacaaaacctgatacatcaccctaacagagcattaagttgtaactgagattgcaatacctgtcaccatgcagccgctgatagttctctgaactaaaaggactaattgtactttgaggccaatgctgctttctggtgtatattctccatacaagattattattaactgctctttttccctctggtggaaaaaaaattaaacctgggcatttcatgggaaaaaaaaaaaaaaaaaaaaaa

SEQ ID NO: 22336 - DNA, 6846 bp, Homo Sapiens
ctgtgcaacggggtcaacgactgtggtgacaacagcgacgaaagcccacagcagaattgccggccccggacgggtgaggagaactgcaatgttaacaacggtggctgtgcccagaagtgccagatggtgcggggggcagtgcagtgtacctgccacacaggctaccggctcacagaggatgggcacacgtgccaagatgtgaatgaatgtgccgaggaggggtattgcagccagggctgcaccaacagcgaaggggctttccaatgctggtgtgaaacaggctatgaactacggcccgaccggcgcagctgcaaggctctggggccagagcctgtgctgctgttcgccaatcgcatcgacatccggcaggtgctgccacaccgctctgagtacacactgctgcttaacaacctggagaatgccattgcccttgatttccaccaccgccgcgagcttgtcttctggtcagatgtcaccctggaccggatcctccgtgccaacctcaacggcagcaacgtggaggaggttgtgtctactgggctggagagcccagggggcctggctgtggattgggtccatgacaaactctactggaccgactcaggcacctcgaggattgaggtggccaatctggacggggcccaccggaaggtgttgctgtggcagaacctggagaagccccgggccattgccttgcatcccatggagggtaccatttactggacagactggggcaacaccccccgtattgaggcctccagcatggatggctctggacgccgcatcattgccgatacccatctcttctggcccaatggcctcaccatcgactatgccgggcgccgtatgtactgggtggatgctaagcaccatgtcatcgagagggccaatctggatgggagtcaccgtaaggctgtcattagccagggcctcccgcatcccttcgccatcacagtgtttgaagacagcctgtactggacagactggcacaccaagagcatcaatagcgctaacaaatttacggggaagaaccaggaaatcattcgcaacaaactccacttccctatggacatccacaccttgcacccccagcgccaacctgcagggaaaaaccgctgtggggacaacaacggaggctgcacgcacctgtgtctgcccagtggccagaactacacctgtgcctgccccactggcttccgcaagatcagcagccacgcctgtgcccagagtcttgacaagttcctgctttttgcccgaaggatggacatccgtcgaatcagctttgacacagaggacctgtctgatgatgtcatcccactggctgacgtgcgcagtgctgtggcccttgactgggactcccgggatgaccacgtgtactggacagatgtcagcactgataccatcagcagggccaagtgggatggaacaggacaggaggtggtagtggataccagtttggagagcccagctggcctggccattgattgggtcaccaacaaactgtactggacagatgcaggtacagaccggattgaagtagccaacacagatggcagcatgagaacagtactcatctgggagaaccttgatcgtcctcgggacatcgtggtggaacccatgggcgggtacatgtattggactgactggggtgcgagccccaagattgaacgagctggcatggatgcctcaggccgccaagtcattatctcttctaatctgacctggcctaatgggttagctattgattatgggtcccagcgtctatactgggctgacgccggcatgaagacaattgaatttgctggactggatggcagtaagaggaaggtgctgattggaagccagctcccccacccatttgggctgaccctctatggagagcgcatctattggactgactggcagaccaagagcatacagagcgctgaccggctgacagggctggaccgggagactctgcaggagaacctggaaaacctaatggacatccatgtcttccaccgccgccggcccccagtgtctacaccatgtgctatggagaatggcggctgtagccacctgtgtcttaggtccccaaatccaagcggattcagctgtacctgccccacaggcatcaacctgctgtctgatggcaagacctgctcaccaggcatgaacagtttcctcatcttcgccaggaggatagacattcgcatggtctccctggacatcccttattttgctgatgtggtggtaccaatcaacattaccatgaagaacaccattgccgttggagtagacccccaggaaggaaaggtgtactggtctgacagcacactgcacaggatcagtcgtgccaatctggatggctcacagcatgaggacatcatcaccacagggctacagaccacagatgggctcgcggttgatgccattggccggaaagtatactggacagacacgggaacaaaccggattgaagtgggcaacctggacgggtccatgcggaaagtgttggtgtggcagaaccttgacagtccccgggccatcgtactgtaccatgagatggggtttatgtactggacagactggggggagaatgccaagttagagcggtccggaatggatggctcagaccgcgcggtgctcatcaacaacaacctaggatggcccaatggactgactgtggacaaggccagctcccaactgctatgggccgatgcccacaccgagcgaattgaggctgctgacctgaatggtgccaatcggcatacattggtgtcaccggtgcagcacccatatggcctcaccctgctcgactcctatatctactggactgactggcagactcggagcatccaccgtgctgacaagggtactggcagcaatgtcatcctcgtgaggtccaacctgccaggcctcatggacatgcaggctgtggaccgggcacagccactaggttttaacaagtgcggctcgagaaatggcggctgctcccacctctgcttgcctcggccttctggcttctcctgtgcctgccccactggcatccagctgaagggagatgggaagacctgtgatccctctcctgagacctacctgctcttctccagccgtggctccatccggcgtatctcactggacaccagtgaccacaccgatgtgcatgtccctgttcctgagctcaacaatgtcatctccctggactatgacagcgtggatggaaaggtctattacacagatgtgttcctggatgttatcaggcgagcagacctgaacggcagcaacatggagacagtgatcgggcgagggctgaagaccactgacgggctggcagtggactgggtggccaggaacctgtactggacagacacaggtcgaaataccattgaggcgtccaggctggatggttcctgccgcaaagtactgatcaacaatagcctggatgagccccgggccattgctgttttccccaggaaggggtacctcttctggacagactggggccacattgccaagatcgaacgggcaaacttggatggttctgagcggaaggtcctcatcaacacagacctgggttggcccaatggccttaccctggactatgatacccgcaggatctactgggtggatgcgcatctggaccggatcgagagtgctgacctcaatgggaaactgcggcaggtcttggtcggccatgtgtcccacccctttgccctcacacagcaagacaggtggatctactggacagactggcagaccaagtcaatccagcgtgttgacaaatactcaggccggaacaaggagacagtgctggcaaatgtggaaggactcatggatatcatcgtggtttcccctcagcggcagacagggaccaatgcctgtggtgtgaacaatggtggctgcacccacctctgctttgccagagcctcggacttcgtatgtgcctgtcctgacgaacctgatagccagccctgctcccttgtgcctggcctggtaccaccagctcctagggctactggcatgagtgaaaagagcccagtgctacccaacacaccacctaccaccttgtattcttcaaccacccggacccgcacgtctctggaggaggtggaaggaagatgctctgaaagggatgccaggctgggcctctgtgcacgttccaatgacgctgttcctgctgctccaggggaaggacttcatatcagctacgccattggtggactcctcagtattctgctgattttggtggtgattgcagctttgatgctgtacagacacaaaaaatccaagttcactgatcctggaatggggaacctcacctacagcaacccctcctaccgaacatccacacaggaagtgaagattgaagcaatccccaaaccagccatgtacaaccagctgtgctataagaaagagggagggcctgaccataactacaccaaggagaagatcaagatcgtagagggaatctgcctcctgtctggggatgatgctgagtgggatgacctcaagcaactgcgaagctcacgggggggcctcctccgggatcatgtatgcatgaagacagacacggtgtccatccaggccagctctggctccctggatgacacagagatggagcagctgttacaggaagagcagtctgagtgtagcagcgtccatactgcagccactccagaaagacgaggctctctgccagacacgggctggaaacatgaacgcaagctctcctcagagagccaggtctaaatgcccacattctcttccctgcctgcctgttccttctcctttatggacgtctagtccttgtgctcgcttacaccgcaggccccgcttctgtgtgcttgtcctcctcctcctcccaccccataactgttcctaagccttcaccggagctgtttaccacgtgagtccataactacctgtgcacaagaaatgatggcacatcacgagaatttagacctggattttaccatgaacctcacatcttgtactccatcctgggccccctgaaactgcttattcgtgattcctcaccagcgtagagctccacctcccctttccccagtaccctcagtgcctgcttctcagtgctgatgcagctgatgacccaggactgcgctctgccccatcacagccagcatgactgcttctctgagagaacttgcccatcaggggctgggacatgggggtgtgggtaaagacagggatgaaggatagaggctgagagaagaaggaagaatcagcccagcaggtatgggcatctgggaaacctccagcctcaagtgtgttggtaacatgaaaaagctctggggggtagttggatctgggtgtctggtccattgctggcagtggacattattcttgccctaagagacactgccttttcagcagcagatactggtgagatgggggtggctcaggctgttcttcctcctcctagaatgtctggagctgtttctacattcagataactgggtcccctatcacaaggctactggctaataggaattccctcctggtgccaccactggccagtacctttcctaagtctttgctcaaattaaccaggttgtgagccagtggcttgagtgaatgttaggccttgggggctgagtctctgaaaagtctaagaagctctgcctagaccaaatatggtatacctcctgacccctctctccctcatgtcctgggattctggggaagagacctagaaacaagctttcaaagaaaaaccagaagttgtcataaatggtcagaaagaacgatcaggttggagacttgggaaacccagggcctaaagagaagtatccatgagggtcaaacttcctgttgaacttcctatgttctttctcaagtgctcagggatctaagttagtggacagcaagcctgtggctacggggtggtgatgttcctcttccagctgtcccctcagctaaggggcttagtttccatgtgggatgccatcacttggttcatgctcattcacacaaagggcacgtgtctcagcctggtatcagggaaattgagacttatttttgccctaaaacgtctccctagctgttcttcgtggggtttttttgtttgtttttttgcctaatttgctttttctgaccaagccttgtggcaccagcaatctccaaagtcctgtggtgggagggctgaataaataaaaatacaaagaggtgggtaaggagtaggaaggtagagagcaccactgatgaggccctcctagcccatggcagacccagacctcttctcccccaggaattagaagtggcaggagagaacaacaggggctgggaatggaggggagaatttctaggggaagtttcctgagttgaaacttctcctgtggttactggtattgagaaatcagctaccaaagtgaaaaaggacaagatcaattcttttctagtcagttctaagactgctagagagagataccaggcccttagccttgctctcagtagcgtcagccccagttctgagcctccccacattacacttaacaagcagtaaaggagtgagcactttgggtccttagactcatgtctggggaggaagagcaagtagaaaagtggcattttcttgattggaaagggggaaggatcttattgcacttgggctgttcagaatgtagaaaggacatatttgaggaagtatctatttgagcactgatttactctgtaaaaagcaaaatctctctgtcctaaactaatggaagcgattctcccatgctcatgtgtaatggttttaacgttactcactggagagattggactttctggagttatttaaccactatgttcagtattttaggactttatgataatttaatataaatttagcttttcttaatc

SEQ ID NO: 22337 - DNA, 890 bp, Homo Sapiens
gtaaattgagctgcgacccttgttcaacgccgttggcgaagccagctgctggaggtgccgagaatctgagtttcggcaagcagccagaatattttaaaaatgactacaccaaacaagacacctcctggtgctgaccccaagcagttggaaaggactggaacagtacgggaaattgggtcacaagctgtttggtcactctcatcttgcaaaccaggatttggagtggatcagttacgagatgacaatctagaaacttattggcaatcagatggttcccagcctcatttagtgaacatccaattcagaagaaaaacaacagtgaagacattatgtatttatgcagactacaaatctgatgaaagctatactccaagcaagatctcagtcagagtaggaaataattttcacaaccttcaagaaattcggcaacttgagttggtggaaccaagtggctggattcatgttcccttaactgacaatcataagaagccaactcgtacattcatgatacagattgctgttctagccaatcaccagaatggaagagacacccatatgagacaaattaaaatatacacaccagtagaagagagctccattggtaaatttcctagatgtacaactatagatttcatgatgtatcgttcaataaggtgactttaaaatgagacgaaaatcattaaacgtatctttgttttatcctgtatttaaataatatatcatgtacctttattgaacaaggcatccgttatatctaattttgtatatgtttaaaaatattttattgtaactttgacaaataaatttggggtcatattatctttattttctttaacatgtaataaagctcacatattttacattactaaaaaaaaaaaaagaaaaaaaaa

SEQ ID NO: 22338 - DNA, 2316 bp, Homo Sapiens
caggcggcgaggcggccgtcgagggcgcgggcggcggggacgcggcgctgggcgagccggggctgagcttcacgaccaccgacctgagcctggtggagatgacggaggtggagtacacgcagctgcagcacatcctctgctcgcacatggaggcggcggctgacggcgagctcgagatgcgcctcaactcggcgctgctggcggcggcgggcccgggcgcaggcgcgggcggcttcgcggcgggcggtcaggggggcgcggcgcccgtgtaccccgtgctgtgcccgtccgcgctggcggccgacgcgccctgcctgggccacatcgacttccaggagctgcgcatgatgctgctaagcgaggcgggcgcggcggagaagacgtcgggcggcggggacggagcgagggcccgggccgacggcgccgccaaggagggcgcgggcgcggctgcggctgcggctggacccgacggcgcgcccgaggcccgggccaagccggccgtgcgcgtccgcctggaggaccgcttcaacagcatccccgccgagccgccgcccgcgccgcgcggccccgagccccccgagccgggcggggcgctcaacaatttggtaactctcattcgacatccatctgaactaatgaatgttcctcttcagcaacaaaacaaatgtacagcattagtgaaaaataaaactgcggctacaactactgctttgcaatttacatacccactgtttactacaaatgcttgctctactagtggaaattctaatctttcacagacacagagttctagtaactcatgttctgtacttgaagctgccaagcaccaggatattggattgcctagagcattttctttctgttatcagcaagaaattgaatccactaaacagacgttaggtagtagaaacaaagttttgcctgagcaagtttggattaaagtgggagaagcagcgctatgcaaacaagcactgaagaggaatcggagtagaatgcgtcagttggacacaaatgtagagcgaagagcccttggagagattcagaatgtgggcgaaggtgccaccgccacacaaggcgcttggcagtcctcggagtcctcacaggcaaacctgggggagcaggcccagagtgggccccagggaggaaggtctcaacgtagggagaggcataaccgaatggaaagagatagaaggcgcagaatccgcatttgctgtgatgagttgaatctcttagtgccgttctgcaatgccgagactgacaaggccacaactctgcagtggaccacagcattcctgaaatacatccaggaaagacatggagattctcttaaaaaggaatttgagagcgtattttgcggtaaaactggccgaaggctaaagctgaccagaccggactccttggtgacctgtcctgcacaggggagtttacagagcagcccctcgatggagatcaagtgatcggactgaacaggaatcctcggggggtgaacagccattccttcgtgacctgtgcacgccttctgcaaccctggagctctgctcggctagtctgactcgaaaagggcgtgactcaagctgacgggactccagtagggactttgagagcacattttgtaaaaatatttatctagacgcaaatgcttatccatgaatgtcctcttagaccatttggggatgaagccatcttaataattagtaataattaattagtaataattagtaagcattttctcaatgctctgattccatcatgttttcttaacatgataacttaaaaaattgacatcctttgtactttctttaatcttaaaaagtacacggctttttacttatttaccttttaaatatgcccctttagcaattggaacaagttaaattgttaactaaaaacagtttggaaattttatttcattcgttatatcacacccccttgtcatgactctgagtcacgtgctgctgtattgcaacgtgcaggaccattttaaacctgtgtgctaaaaattttccagatacttgctttaaagctacttttgtccacaaatgaaatactgtcacagtagacgcttaaatgccacgttttcataccaagagtcattcattacttcatgtgtcacaaactgtggtgtttggaattgggtttttcaatgagtggctttacttatcaatcacaacaggtaatagcaatagacgttagtgcaatacaaagtcaccctcaataaatactgttaattggagatgtgagtttgtacacaaaacatcagactagacctttgtatgggagagaatttactgtacattaaattctttattttttgtt

SEQ ID NO: 22339 - DNA, 4537 bp, Homo Sapiens
  misc_feature (3)..(3): n is a, c, g, or t
  misc_feature (24)..(24): n is a, c, g, or t
  misc_feature (33)..(33): n is a, c, g, or t
  misc_feature (46)..(46): n is a, c, g, or t
  misc_feature (52)..(52): n is a, c, g, or t
  misc_feature (63)..(63): n is a, c, g, or t
  misc_feature (69)..(69): n is a, c, g, or t
  misc_feature (74)..(74): n is a, c, g, or t
  misc_feature (87)..(87): n is a, c, g, or t
  misc_feature (99)..(99): n is a, c, g, or t
  misc_feature (102)..(102): n is a, c, g, or t
  misc_feature (107)..(107): n is a, c, g, or t
  misc_feature (120)..(120): n is a, c, g, or t
  misc_feature (150)..(150): n is a, c, g, or t
  misc_feature (4516)..(4516): n is a, c, g, or t
  misc_feature (4518)..(4518): n is a, c, g, or t
  misc_feature (4529)..(4530): n is a, c, g, or t
  misc_feature (4532)..(4532): n is a, c, g, or t
tanaaaaaaaaaaattaaataggnccccctttnggaaaaaagaagngagtanccccccccttnggattntatgntttttattaaaancagaagtttganggnccacnggatgtaattagnttaaccaccaggcagagtttttttttgtantcattgagttctctcattcctaggtcttattggtcctaagggagacatcggtgaaaccggagtacccggggctgaaggtccccgaggctttccgggaatccaaggcaggaaaggagaacctggagaaggtgcctatgtataccgctcagcattcagtgtgggattggagacttacgttactatccccaacatgcccattcgctttaccaagatcttctacaatcagcaaaaccactatgatggctccactggtaaattccactgcaacattcctgggctgtactactttgcctaccacatcacagtctatatgaaggatgtgaaggtcagcctcttcaagaaggacaaggctatgctcttcacctatgatcagtaccaggaaaataatgtggaccaggcctccggctctgtgctcctgcatctggaggtgggcgaccaagtctggctccaggtgtatggggaaggagagcgtaatggactctatgctgataatgacaatgactccaccttcacaggctttcttctctaccatgacaccaactgatcaccactaactcagagcctcctccaggccaaacagccccaaagtcaattaaaggctttcagtacggttaggaagttgattattatttagttggaggcctttagatattattcattcatttactcattcatttattcattcattcatcaagtaactttaaaaaaatcatatgctatgttcccagtcctggggagcttcacaaacatgaccagataactgactagaaagaagtagttgacagtgctattttgtgcccactgtctctcctgatgctcatatcaatcctataaggcacagggaacaagcattctcctgtttttacagattgtatcctgaggctgagagagttaagtgaatgtctaaggtcacacagtattaagtgacagtgctagaaatcaaacccagagctgtggactttgttcactagactgtgcccttttatagaggtacatgttctctttggagtgttggtaggtgtctgtttcccacctcacctgagagccattgaatttgccttcctcatgaattaaaacctcccccaagcagagcttcctcagagaaagtggttctatgatgaagtcctgtcttggaaggactactactcaatggcccctgcactactctacttcctcttacctatgtcccttctcatgcctttccctccaacggggaaagccaactccatctctaagtgctgaactcatccctgttcctcaaggccacctggccaggagcttctctgatgtgatatccacttttttttttttttgagatggagtctcactctgtcacccaggctggagtacagtgacacgacctcggctcactgcagcctccttctcctgggtccaagcaattattgtgcctcagcctcccgagtagctgagacttcaggtgcattccaccacacatggctaatttttgtatttttagtagaaatggggtttcgtcatgttggccaggctggtctcgaactcctggcctaggtgatccacccgcctcgacctcccaaagtgctgggattacaggcatgagccaccatgcccagtcgatatctcactttttattttgccatggatgagagtcctgggtgtgaggaacacctcccaccaggctagaggcaactgcccaggaaggactgtgcttccgtcacctctaaatcccttgcagatccttgataaatgcctcatgaagaccaatctcttgaatcccatatctacccagaattaactccattccagtctctgcatgtaatcagttttatccacagaaacattttcattttaggaaatccctggttttaagtatcaatccttgttcagctggacaatatgaatcttttccactgaagttagggatgactgtgattttcagaacacgtccagaatttttcatcaagaaggtagcttgagcctgaaatgcaaaacccatggaggaattctgaagccattgtctccttgagtaccaacagggtcagggaagactgggcctcctgaatttattattgttctttaagaattacaggttgaggtagttgatggtggtaaacattctctcaggagacaataactccagtgatgtttttcaaagattttagcaaaaacagagtaaatagcattctctatcaatatataaatttaaaaaactatctttttgcttacagttttaaattctgaacaatttctcttatatgtgtattgctaatcattaaggtattattttttccacatataaagctttgtctttttgttgttgttgttgtttttaagatggagtttccctctgttgccaggctagagtgcagtggcatgatctcggcttactgcaacctttgcctcccaggtttaagcgattcttctgcctcagcctcccgagtagctgggaccacaggtgcctaccaccatgccaggctaatttttgtatttttagtaaagacagggtttcaccatattggccaggctggtctcgaactcctgaccttgtgatctgcccgcctccatttttgttgttattttttgagaaagatagatatgaggtttagagagggatgaagaggtgagagtaagccttgtgttagtcagaactctgtgttgtgaatgtcattcacaacagaaaacccaaaatattatgcaaactactgtaagcaagaaaaataaaggaaaaatggaaacatttattcctttgcataatagaaattaccagagttgttctgtctttagataaggtttgaaccaaagctcaaaacaatcaagacccttttctgtatgtccttctgttctgccttccgcagtgtaggctttaccctcaggtgctacacagtatagttctagggtttccctcccgatatcaaaaagactgtggcctgcccagctctcgtatccccaagccacaccatctggctaaatggacatcatgttttctggtgatgcccaaagaggagagaggaagctctctttcccagatgccccagcaagtgtaaccttgcatctcattgctctggctgagttgtgtgcctgtttctgaccaatcactgagtcaggaggatgaaatattcatattgacttaattgcagcttaagttaggggtatgtagaggtattttccctaaagcaaaattgggacactgttatcagaaataggagagtggatgatagatgcaaaataatacctgtccacaacaaactcttaatgctgtgtttgagctttcatgagtttcccagagagacatagctggaaaattcctattgattttctctaaaatttcaacaagtagctaaagtctggctatgctcacagtctcacatctggtgggggtgggctccttacagaacacgctttcacagttaccctaaactctctggggcagggttattcctttgtggaaccagaggcacagagacagtcaactgaggcccaacagaggcctgagagaaactgaggtcaagatttcaggattaatggtcctgtgatgctttgaagtacaattgtggatttgtccaattctctttagttctgtcagcttttgcttcatatattttagcgctctattattagatatatacatgtttagtattatgtcttattggtgcatttactctcttatcattatgtaatgtccttctttatctgtgataattttctgtgttctgaagtctactttgtctaaaaataacatacgcactcaacttccttttctttcttccttcctttctttcttccttcctttctttctctctctctctttccttccttccttcctccttttctctctctctctctctctctctcttttcttgacagactctcgttctgtggccctggctggagttcagtggtgtgatcttggctcactgctacctctaccatgagcaattctcctgcctcagcctcccaagtagctggaactacaggctcatgccactgcgcccagctaatttttgtatttttcgtagagacggggtttcaccacattcgtcaggttggtttcaaactcctgactttgtgatccacccgcctcggcctcccaaagtgctgggattacaggcatgagccatcacacctggtcaactttcttttgattagtgtttttgtggtatatctttttccatcatgttactttaaatatatctatattattgtatttaaaatgtgtttcttacagactgcatgtagttgggtataatttttatccagtctaaaaatatctgtcttttaattggtgtttagacaatttatatttaataaaattgttgaatttaaagatggatgactgttttatttgtttgctgttcaccacttctgttttattctctttccagaattnantggccgtcgannanacata

SEQ ID NO: 22340 - DNA, 40850 bp, Homo Sapiens
  misc_feature (23)..(23): n is a, c, g, or t
  misc_feature (1458)..(1458): n is a, c, g, or t
  misc_feature (6229)..(6230): n is a, c, g, or t
  misc_feature (10636)..(10636): n is a, c, g, or t
  misc_feature (16389)..(16389): n is a, c, g, or t
  misc_feature (17153)..(17153): n is a, c, g, or t
  misc_feature (17176)..(17176): n is a, c, g, or t
  misc_feature (17190)..(17190): n is a, c, g, or t
  misc_feature (17358)..(17358): n is a, c, g, or t
  misc_feature (17368)..(17368): n is a, c, g, or t
  misc_feature (17383)..(17383): n is a, c, g, or t
tcctctgtcgctcgatagggtcncatctggagaagggcagagggttcccctcaagcctccgctgagcactgaccagcacaggagcagtaagaaggaggaggccaggaaagaaccaccggggaggagcccgggagaaagtctgcagagctcacacaggcctgggaattgtgagtgctcccgccggggcagaaatacctcgtgatacacaaggccttgggtagagtgagaagttagccctggagtaaaggctgctggtgccatgcggcagaacttaaatgcaagcctcgagggttcaagttgtttccaagtaactgctggcatcccataataaagccgaagaaaaattactgggattggagggtcaaaacatggcgcacccagttaggagtaattagcaaagtctgacatcaaaaattaccagacatgattcaaggaagtaggaaaatatgacctctgatgagaaaactcaggcaacggaaatagagcgagaaataacacaaatgatagaattagtaaagaaggtgaaaacagttgttataaatctgtgtgttcaaggaagtagaggaaaatgtaaacacgttgagtggagatatgaaaaattataaaaagacccaaataaaacatctggagatgaaaaaaatgccatagaggagacgcgaacgtactggttgggatgcaggagaaagacgggtgagcttgaggccgcagcaagagaaatgaccaacgtgaaaccagggagactccatagcgagtggacagagtgggctccggggacggctgggctgacgcaagccccacagtgcgaatgagcttgaggcccctggacggcacacttgaaatggtgaaaatgtcaattttgttatatgtatttttttaccacaattaaaaaggaagtgaacagagcatcatggcgccatgggaccatgatgtattggcttccaagaagccaaatacagcgggagttgcagtcccaaaaggtgacgggagtgggcgctcagagaacatttgaagaagtcggccggaggtggggcgcggtggctcacgcctgtaatcccagcactttgggaggccaaggcgggtggctcacgaggtcaagagatcgagaccatcctggccaaatggtgaaaccctgtctctaccaaaaatacaaaaattagctgggtatggtggtgcacacctgtaatcccgctgcttgggaggctgaggcaggagaatcgcttgaactcaagatgtggaggttgcagtgagctgagattgtgccactgcactccagcctggtgacagagtgagactccatctcaaacaaacaaacaaacaaacaaacaaacaaacagagaaacaccagagataaaatgaccagagtgaaaagacacgttgaagactcagggtcagacatgaaaatgaccttaggcttctccacagagcaatgcaaatcaaaagatacaggaccagcacctntaaagtacggaaagagaaacagtccatccagagttctgtgccagtgaaaatgtctttcaaatacaaagacatttccagacatgggaaagctgagagaattaatcgccagagacacaccacaaggagtgtacaacggattctgtcctgaaggacatgtgggcatatgcaaaagacgctttttcttattaaaaaaaaaaaactcttccaaatctagttaactgattaaagaaaaataacaatggattgtggagctcatgacacatgcagacataaaatgcacgtgagcaacagtgtgaaggctgggagtgggcgtgcaagtgtactttcgtatggtccttatttggtatgttaggcgatagaatccgattgcaggcagcctctaagttacatatggtaaaccctaaaacaaccaccaaagacaataacaagctagagatatatacaataagctaacaaaaaaagatacatggaattataaaaaatcctcaatcaaaaataaatgtcaggaaaaagggaaagaggatttaaaagatggaaaaaggaaagggatggaaaagatatatttacctgaatgctaacattaatcagaggaaagctgttctatatctcaataaagctattttaaaaacaaataaaggcggtcaatacaatggcaacccaaatcatagcaggatgttttgtagaaacgaaaaagctgatgataaaatttatatggaaaggtgaaggaactataatagccgaaacaacttgggaaaaggacagagttggaggactcacactacccgatttaaagacttaaaatcattaagacagcgtgatagaggcaaaccaacagacacatcatcaatggaacggagaagagttcagaaataaacccacacagatgcaggcagctgactttaatagttttactcttttaatggtgggggctgtcctcttaatttatagtattctgagatatctaccttccatgttgttaagagaatttttctggaagagcaggagaaacccattttctataaaatatctgtcccaacatcaaagtcatcaaaagaagcagcaagaaccgaccctgcctccccagcttccgctgcttcagagaagctccctcgaagacagatcatggtgaagttttcccctttctctctgcttcaaatgacgcacgagtttacatactgtgctaacctatttctgtttatacaattcatgtgcttttatatataaaatttataattgtagaaaaatatacctgacataaaagtttaccattttagccatttttaagtatacagttcaatgggacaaagtatgatctggtgcaaccatcaccactatccatcttcacagtgttttttgtcatccaatcctgaaactccaaacccattaaacactgaattgcctgtctcccctccctcagctgctggtagccactgttccattttctgtctgagaagtcttatctaaggcatctgtgcattttatcgaagtctggtagggaagggatgttctttgcaataagccattctggaaattacagatagtgctgggatttcttagcctttgcggtcgttcaggatctcagagcatgggtaaagttcaacgttatcaattttttctctagatgcttttaagagttttctctctgacttcagtgttccaaatcaaagtgaagctgcactgtttcactcggcagttgctgagttttttgtttgttttattttattttataatactgcttgggacttttaatctttgaattaatgtcattctttaagttgaacaattatcaggcaaaatctttttaaaagtactttctctccttctatctatatccttttaatgaaattcctattagatatagattagaccttttcattctaccatctgtgtctctaccattacccgcttttgagatgatcgccttccttgtatctctctgctgcattctgggtaattttcctgtgacaatcttttaattaattcacttattctctcttcatccatgggtaaacttccatttaacccatctgtttttcgtgcttgtaaattatttggctcatttttaaatcttcttacccttttaaaaatagtcttccattttccttatgttttgtgttccttattttgtatctttactgatttattttttattttttagtgacagactctcactctatcacccaggctggagtgcagtgctgcaatcatagctctctgcagccttgaactcttggcctcaagtgattgtcccacctcagcctcccgagtagctaggattacaggcatgactttattcatgtttaacattgttttcttaagtctctttcagaatgttctattgtgtctggttcttgtggcggctgctgtattacttgtatctttgttgccactgactgtagtgatttatttattttgtgttttataagtttttactgcgaacttatctttggtgaggagtttttttgattgtttgttgttgttgtttttttttttttttttggtaggagacttgtgtactcttggctgtgggtttgcaactatgatttttcctgcaagggcctggggtttcacaaaagttctgaatcagttttcaggtaacgtttgtggtttgtgatttctctgccctgtgggctccttgcatttggattctgtgctcacttgcggtgcaggtgtgaggctttgattgctcacaggagacctgactcctcatctagactctcaggcacgtggaatactttcttaccacttatctggacccccttttcagggactaggcctatctttgagtgccctggacttgcacagccatggcacctccatgtcctgcctcctgtctccagagggcagaaaaccctgccttgtaagccctgttgcttctgtctggattggttcctcagcctgggtgcttgcagtaccaactcaagccttctacccagcctttttccactcttcatttcttgcacctaggaagtttccttcttccttttttttttttttttgaggagtcttgttctgttgccgaggctggagtacagtggcacaatctcagctcactgcaagctccaccttctgggttcgagcgattctcctgcctcagcctcccaagtagctgagacttcaggcatgcaccatcacatccggctaatttttgtatttttagtagagacagggtttcaccatgttggcccagcaggtcttgaactcctgacctcaagtgatcggcccaccttggtctcccaaagtgctgagattacaggcgtgagccaccatgctggctaatatttgtatttctaatagagaccgggtttcaccatgttggccaggctggtcttgaactcctgaactcaagtaatccatccgcctcagcctcccaagggctaggattaaaggcgtgagccaccgtgcccagccagtttcctttctttcttcccttcaacgtcagcagcatattttaaaacatattttgtttctattttatctgcattacttacatgttggttaggggagagaaagggagttgtatcttagccaccatgtgtcgcgatctggtgcttcagagacagtgcactttgcagaatgtgttttactactcaaggattgcaataatattagaatctgtatagtctcatgcatttttattatttactgaaaaacattttatttgtatatctaaaaccaaataacttgatttttttcccctaaaataatcatatttaaaaatctcactatgaatactcaagaaaattttcatcagtttcacatgtaataaagtagcttcctgaagaaacttccatacacggtgctggtggttcaatggatttaatttgtaagagcaaagccagtcttcacgtgcaaaagctttttctcatgtctgtgcactaaaaacagtatagagaaaaatgatactttttatcagtgtagaaaagaagcaaatttatgagcactttggagtaatagccccatggcttagcttcatcatgtttgtttatgcaaacacttgtggaactttgcttcctcgtgacacacagtttttttttacaatccttcactgggctgacctttcttccactattgattttgtcctcttttgatgactcaattatgcaggggaataatcttagtaaaaacctctctctttttttttttttttttttttttttttactgtgcttcagagtaatctggtgttgggctaggtaaggagggaaatggggttggcctgactccttccaggagtttataccctagttgagaactaggcttgggatgggaggcttgggagatctttacaatgataagtaatatcaacgttggcagaataaggtgaagcaatcaaaataggtgacataattggccaaggatggagaagaaaggaatgttcggggccgggcacggtggctcacacctgtaatctcagcaccttgggaggccaaggcgggtggatcatctgaggtcaggagttcaagaccagcctggctggctgggcacggtggctcacgcctgtaatcccagcactttgggaggtctaggtgggtggatcacctgaggtcaggagttcgagaccagcctggtcaacatggtgaaacctcatctctactaaaaatacaaaaattagctgggcgtggtggcacacgcctatagtcccagctactcgggaggctgaggcaggagaatcgcatgaacccgggaggcagaggttgcagtgagccgagaatgtgccactgcactccagtctggacgacagagtgagattctgtcttcaaaaaaacgannaagaaagaaaggaatgtttggaatggaacagggttaatgagggaagcacctctggggaagaggccttgagcctggactcagctctggaggtttaggtgggacaggcatcccaacaaaggacagagactcatcagagacgcggggacgctcactgatgaaggacctgggggtgtggctggggaatgtctccttcgtgatgaattcttctcagtttccctgtgtccctcggttggaggccgctgctccgacttctcatttcccgctcctgcttcatctcttggaatagtgtttggcacattatagtatctgcttctactatcgtcttcccaactggaacacgagccccgcggggctggggacaaggtcttaccttgcatcccaataaatgagcatttcatttaaattgtgtttaaaatcgtggcttgctggatgatggctgaaccgtgtcagctggtgtcggtggtagatacattgtggtaaaagctttttccttcctcccgaccccacctccaatccttgcagtttactgttacacaccctagacttgacttgggaagtaaacagcgccagcttaaggaagcacgtggcctattgataaaggattgggctgaatgtttagagccaaatgcacccttcggttaaagtgctgaaggattcaatgcgcaccttcgggtgcttagcacagagctgctgagaaggaataaagtagggtcggattaggaataaaaagtttaaagtatgatcctttccccacgcggcttacacacaggctgtgggtatcggtcatcaccgcaaagcagccagagtcccacagagtgtgcggccgagtactgagtgacagagaaattcctgtgggcaagagagtcacagagtggctagagcttgagctgggtggagtttagttacatacgtcacctacacgtagcccttggcagtctccaagtactttcaggccgttggtcgtcccaggaggacctgaagaggaagctgcggggggcaccaccgcccagtctagttaaacgatggcttttagtaagcgttggatttgggcagaaggtctcagtctttgggttacaccaggctgctgctcaggtcagtggagaagcacaggcaagggcactgtggtggggaaaccaccctcggggatcgtgtgaccttgttttggggaagaaggaagtggagcagcacagttcatgccgacacgtgtcttctcagagggccctgtctcaatatgaatacgctgagggtcgaagggaaacatcaaaattgtgctgttagaagtgaacagaaaaatggaagaatttgtgcaacttgctgtctatctatagagttaggggagactttaaatataaatctctgcaagaattcattctggggtaatattgtttagcattcaggatcaccgtgtttttataaacagtggagcatatggttcttatgaaatcagaacattgttggtttttataacagctttttatggaactaacgaatgtcaaaatattttatttccattctaaaaaaaattccaacactttcagcccttaacttattttaaaaataaatttgtatgagggggaaagttcaattttactattcagaaaaaatattaataggtccagggtaagaagaaggttattttctaagtgaaataaaaatattatttaaaaaaggcaaaccaaaagtaatgccactgatccaaaatgcaaggagaaaaagaataagtcatgttcattgttttgagaagaattcatttatcaggaagctgaaggactgctggctgtattcttgtagaacaggaatttacaatgtgatattcctaactgacacatttgtgtgaaatttctatagtcgttcaagttcaagcatttttctgagcacctattatgtgccaggcaccctgttagacacaagggatgtaggtgagaggaaggcagcatttttgccaccaagacctagagctgtagggaccgttcccaggaggctgcgctgagctcagaagccaccaacacagcagtggggcaggaggcagagatgggggaggccctcgacctggggcttgacagctcagctaaccaggagttaaccaggcatagaaaaagggaaaggtggccgggggtggtggctcacgcctgtaatcctagcactttgggaggcagaggcgggcagattgcctgaactcaggagttcgagaccaccctgggcaacatggtgaaatcccgtctccactaaaatacaaaaaattagctggacgtggtggcacacacctgtagtcccagctacttgagaggctgaggcagggagaatcgattgaaccaaggagacagaggttgcagtgagctgagattgggccattgcactccagcctgggcgacagagcaagactctgtctccaaaaaaaaaaaaaaaaaaaaagagagagagagaaagaaaaagggaaaggagattccaggttggggggaaaatggtcaaagttatgaagaaaaagaatgagaatgacagggtccaagcacaggagccttgggtgtggctggacatgactgtgggaggtgggtgctgggggtgccaggtcccagggccagcttcccactggcaccgggaccgcccctcctccccggacagccgcgtgggcaaggccggcttccctccacatccccacggagcacgaggtcagatgcatgggttgttccggtccgtgggtgagaaacgggttctctgtgtcgcgtctcttcagagcgaagttgagtcttttcgtgtgcttctgacattcgcatctttttttctgtgcattcttcacttctctacaaggactgacctttcccttctctatctctaggagcacttgatagaacagaaatatttaagccgccgctactttctcagtctgtcgtttgcttctggtgtctttgagccacacgaacatgtttacatgatcgtaggtaaaaaggctgccaggttccagaagaacccccctgtggactctgctgggacacgcatggccgggtggttttcattaaactcgtggtctgttgggaatgtgtcctagtccattttataaagaattgaccccattttatctttttatatctattcatttactgcaacgccacttattttttaaaatattaattaaaaataatattttaaaatttatttatttaaaaaaaggatatagagatggagttttgcccgttgcccaggctggtctcaaactcttgggctcaaatgatctgtccaccttggcctcccaaagtgctaggattacaggcgtgagccatcgtgcccggcctgtaacaccacttattaaaacacctctctccccactgacctgagatgcccctttatctgacagcccgttgccacatggagttgtatctgtcttccttcggcctacttactaattcacgcagcaagaccaagctgtcatagatagagtctcagagaaggttccagtgtctgagcccgtcccatcccagttcctctattttccagggcttctttctattctcgttcttttattttgccaaaaaaaattgtaacaaaactttggagctccaggaaaaacctgacagcatatatagtattttgggggggattgaggtaagtttataaaccaactttggaaaaactggcatcttcatgagttgactcttctattcaggaacatgccgtgacttttcacttgtttgagtttaatcatgtattttcaggagcctttttatcattttcttcatgaaggattagaacatttcttattaagtttatttccaggcatatttttgttgctatcactgatagagtctcatctcccagcatgtcttctaactctgtttgtatatatagaggctatggatgtttttacattaattttatgacctgctgttttgttaaattattttactgatttagtaattttctttgtcttttcattttggatttctcagatgtatggccatattagctccaagtagagattgttttgccttttctgattcttatgtcactaattgatttcttttgttcaactgcataagccaatcatagctcgttgcaatattaaatagtattgcaggtaaagagtattgcaggtagttggcatcttggacttttccctcctattatgggaaaaactccagtattctttaaaggtaagatgtacacaaaacctaaaatatttacgatctagttttttcagaaatagtttgccaacccttgccatagattaggaaacttagaaggcagcaaccctgtgcaatgtagatgccatgatgaattattatttctaaaacaccagctggaaaaagtaacttaactagacaattaaggaaatgcgaacactgacttttggatggtgttaaagaataactaacattcatgttaaggcatggtcgtggtaatactgttacgtnttcaagtcatgatcctttacagatatactggccttcccagctgacatggacctcaggtcagcttcagcgtgagaagcaggccaggcctgggtctggagccgtcctggccttcccagatgacatggacctcaggtcagcttcagcgtgagaagcaggccaggcctgggtctggagccgtcctggccttcccagatgacaaggacctcaggtcagcttcagcgtgagaagcaggccaggcctgggtctggagccgggtgatgtgcacatggggctcacttttctattctttctacttttgtatcttggtgtattttctgagtgaaaagttaaaaaagatctcagccctgagcatcttcccacacagtgctcaccacaccctctacatcatgcatgtggaacacctcataagggtcccctcccccatgtcaaattaatgccgctgctggaggcgaagtggatcaactgagcgtcaggacacacttgaaaatgaaggaaggaaaaaacttggttccagctaagtcaaaacctgtcgttcaggaaactgaggttcacattaaagcatacctgaccaagtgcaaccaaccaccagtgctgggcagctgccagggagcctgttctctcaccgtgctccaggcttctttcaaattgtgcaggaaacggcattttttggacgttgcttcctattttatttgtacctgtttatagacccagaaccacatgaggtttccttttcagagtggacatccagtcccatgatatcaattcaagttctgctgaactgacctggggcctaggaaaacaagatttttaagagcttgaacataaaaatcaaatgttatatatcaaatattgctcagagtgggatttttacattgtgattattgggccctctaaagtagagctaatttagttatgggataattatatcctccctctgtccctctctctctccctccctccccctcctcctccctcccctcccctctcatcttccctcccctctcctttcccctcccgctcttccctcccttccccttcccttccttccttccttcctttcttgcaagcatctgtcacttcatttatgcttattacattttcatagcagaaagtactatctttactctttattaacctctgttatcttgaaaaataacacagattaatcttttgttgaagaatcctgatggcgttggggggatgggaagtacacggggcgttgtgttcccaggtttctgagtctgcatgctagagccgctttctgctgcttctattaatacagcattttcactttgtctctcagggtttatggtccagcagagtctcagagcgcggtctttggagatgtgtgccccctactcacttctctcttggatgggtgagttaaaatatttttaaggccagtcatcatagttacatttgaatataaagaagcttcactgtgctgtggagtgagaatgtagcattagagtctgagcattctacagcactgcagagcatgcccatgggtcacccagcatggactccacttgcatccgtggagactatttccgcaccctgggaaaaggagtgagaatgatttggagaatgcttgttaaatgagcatatccacctgggattccaaactccactttagttacagtgcatgtgggcttaagcctgtgagtgcagctgccattctctctgggattctaacatttcagaatttaaaaaaaatctgtaaggaatgttaatgtcagatttagggacttttccctttgggaatcagccttctattcttgcagtatacaactactgatgtcaaaggcagtgggctgtaatttaggaatgaagaatttttttttacttaatggagacaccttaagccaatactttccactctggggcattttgaagaatctcagttttgtggcagaagtccacataaagttcctgacgaagacttacttgcattgtccagcaaaggcttctgcacagccaacctcaaggaacctcaaggacctagaaactgtaattacacagtgtgctgcgcgtcccaaaggcacatgatccaacgagtagggtcaagtcaggaagctcctgcatctgaccacgcacgcacgcggggccgctccgccaatcatgatgcagttgctgcttcaactcttcctccagagggctgggatttttatacccatctgaagaaatggttttgaaaatgataggggagtctctttttaagtaggcatcttttaagtaagcagattccagaaataaaaaagacatcgtggtcacagtgatcactgccagaactgcctttccaggataatgcgaaacagatggagttagtttgagttctgagtcttgtcagcaaaaagagtcaaaccctgtaaaatattgggagagatttatcctgagccaaatatgagtgaccgtggcccatgacacagcccaggaggtcctgagagcacatgcccagggtggtcgggcgcagcttggttttgtacatttcagggagacatgagacttcaatccaattcattttaaaaatacattggctctggaatgtctgggttaaggtaaaggattatggagactaaagttctcatttgcagaggaagcctttaggtagcagcttcagagagaacagagtgtagatgtttcttatcagatgtaagatctgtgtcgatattaaggctgcagggtatcgtgaggcctgtccggcccccacttcccgtcatggcctgaaccagactctgaggttaaattttagagtgccctggccaaggaggaagtccattcagatggctggggggccttagaattgtgtttttggtttacagcttccttctccgggaagtttccttttaatgttcattcttaaatggttgaaagactcctgtaagaacccgtttatctgttgtagtcaaagatattctccacacaaagaaatgcatgtaaatgaattcagggaagctggaagagacatagcctatagtggggttttgttatgaatgccttgagactttttaatcctggaaggaaaactcacaggatggtaacgcagaggcctgatcagcttggcgggagcttgtggtttccaggctcttgtggctggaatgtaacagtcaaccctagtgactcaaaccgtcagccccaggactgggctctgctgcttttcctgtccttttctaggggagacttagatgtcaatcagaacactgtcttgcaatcattttgtcaaaacaacaagctttatttgttggacttgtggtgggtacaccacgttaaaccggtattgatacaccggagtcacagttgaccagttaagtcagaatttctgagtgcaggacttgctgaatctccccagatgactcggacggggggtcagggccggagatcctgctctgaggcatgaacccacttagcatcaggtcaggtggacccatacctttacaaccatgaacatcttaaacatcatgactaagaggatgattttctatcatacttattttaaatattcttccaaatatttctgatcctcccattaatattttgggctaaatagcacaattggaaggaaatgtagggatgttggtagttaacttctctgaaataagctgcagttagctaattgagagtcttggggccgagaggcagcaggtgctacgtcacagagaggacctcagcacatgtggattgactgtggacatgaacacctcaaagtcgcttccaattacaaaatacaaaatttttcttttgtatgaaacatacgcaaaaatggctcatgcttgtaatcccagcactttaggaggttaaagcaggaggatcccttgagtccaggagtttgagaccagcctggccaatatggcgaaactccatctctactaaaaatacaaaaattagctgggcgtgctgatgcatgcctgtgatcctagctacttgggaggcttaggcaggagaattgcttgaacccaggaggcagaggttgcaatgagccaaaattgtgccattgcactccagcctatgtgacagagcaagaatccgtctcaaaaaaaaaaaaaaaaatagatagttacagtgaaggtgtggggatttaggaaggccttgctaaggtcagaatccctatgtgaatgctgagctggtggatggggagatgaaaacacccaggagaaaccgggatggatgaacccacgctgtgtgtgtgtcagtgcaaataccgtttaatccaatgtcgtacaacaagatagcaacaaggatagattatgcaaaaaatagttgtagttaaatgaaaacctaatttataagaaatggagtaacaggagaataggaaatgaaatgtattgaagtttctcatacaagtgaaaatttttcctggaatcttcttggcacccacgtgtgttttgctggactgaatctgctctgaattttaggtacaatgtttgtgttatggcgtatggacagacgggcagcggaaagagctataccatgctgggacgccattcggacgacggccctgttctgccgcttgacccacagagtgacttaggaattatccctagagtggctgaggagctcttcaggtactgccgatggtgatgagtggggcagagaaatatggcagggaagccaggcggtcagcaccttggttatcacgtgggaaaaattattaccatttgaagaaggtgatcaaaccccataatctcatcagatacattcaacactatgaagtgctttcatacttctgggcattattgctaccaatcctgtgatgaaattatgttgcaattccatcattaagactaaactttatttttaaatttttttagagacaaggtcttgctttgtcgcccaggctggagtgcaatagtgtgatctcagctcactacaacctccacctcctgggttcaagcgattctccctcctcagcctcccgagtatctggtatcacaggagtgtgccaccacacccagctaatttttgtatttttagtagagacggagtttcgctgtgttggccaggctggtctcaaactcctgaccttaggtgatccactcgcctcggcctcccaaagtgctgggattataggcatgagtctccctgcctggctaagacaaaacttcttgaaagagatcccgagttacagggttccttaggcaggggtggaggtgggggatggtgagggatggaggttttctgtcctggaatgggaagcacagagggaaaactcccgtccttccgtcgcccttcctcctgccgccatcaggagtgtatgcattcgcttctcttcaggggtccagccaacatggcctgcgaagatgctcccgacccgttagcacattctcgaaagagacccactgcccgtgtcatgatttcaccaacatagttagttctagggaaaaataaaatagtaaaaagtcgtctcagtggccgggcgcggtggttcaaacacctgtaatcctagcactttgggaggtcgaggcgggcggatcacaaggtcaggagttcgagcttgcatggatggtgcatgtcattaaatattcaaccagtcatttttccttctgctaagcaaactctttaagttccagaaacaaaggctcaggcaagagccctggggaactgaggtagaaaaaacaaaggctcaggcaagagccctggggaactgaggtagaaagcgggagagaatggtgggagtttcaagaccccccgccgcgtctcttctcgtctgtgagagcggggacaccacggtggaagggggcgatgtggtgtggcancacgtcccggacgtcggcttcgcagtgttcccagtgtgagctgcgtgcgtgcttccgaggccgtttccccctcagctgggcttagagatgcacgatgcacagccagtgagagcaggcgtcgtacattccacggctgcgtttccgtttggctctggaatttgccgacggaagcatatccagggcggcaaagggatgccggggctggaacggcgcggcggaggaggcgggaacggcgctgcggggggggcgggaacggtgctgaggtggtggcgggaactgccctgcggaggaggcgggaactgagctgaggcagcactgggaagagctgttagctgcctaaaagtgttagggaagatccatcaggaagatggccaggcggctgcgcctctccagaaaccggataatcagcgttaccaatgggcccatcgcattactggcaagcgtttcagtcgcctcgtttctaaaatggtttttccgttttgctgttctgagtctcgggtgctgtgcgtctccctccagggcacagtgatttgcggcactggaatccctcagtcagagtctcagaatctctgctcttccaagtgagtggccccgggcaaggccgtactctccctacacctcaccttcgtcgtttgcagaaacgagaatcggagcagacacggaccgtgtcctccctcatcacatccacacacgacctggagaggggtgcactgggccagggctgggggtgagcttgggtgttcgtgactcaagttgcaaacggncctctgcccaaaatgatacaaanccacaatgacatcngtgctgatatcagagatagtttacaggaaccctttaccctgaaaaggactactcttagattgctgaagtcaccagataagccatttcctgtcgttttaaagtaaataaaatgctactgcctggattccttggctctgcacgcctctctcctttcttctaaacctggtngttgacaccncctccttcccgactnctctccgctgtcatccttatcaacaggagtgtgtgatgtttctccacctgctacacactgtcagaggcacaagggatccaaaagtgcatgtgatcagttttctgcttttaaaaagtctagagtggaaacgggtaattatgacccagtagaaaatgggcaggaacagatggcagagacaaagcctggccccgcccctccccgccccagagagtcaggggagctgcgtgcattggaatcacactgttcattgcaggacctggagtcctttgcgtgtgtgcctcgccttctcaacactttgcttcttaaaggctaagactgcagcctgtggttttcaccattgtccctagaatctagtcaacagcccaatgattacttgtgggaaatctctcaaattaactcctcggtattatgtaattgagaaatctctaacttaggttttgtgacactcaaagagacaaactgacacataaatgatgggcccaagtgtggaggttaagtttctggatatgtggtgcattttgcctaaggtgtggagaggaggagaatgtaaaaactctagtttaggctgggcatggtggctcacacctataatcccataactttgggaggcttaggcgggtggatcacctgaggccaggagtttgagaccagcctggccaacatggcaaaaccccatctctactaaaaatacaaaaattagcctggtgtggtggtgcatgcctgtaatgtcagctactcaggaggctgaggcaggagaatcacttgaacctgggtggcagaggttgcagtgagccgagaatgtgccactgcacttcagcctgggtgacagagcgagactttgtctcagataaataaataaataaatataaagtaaaataaaatctgtagcttagctaacttcatgtttcactgttgcacacactcagagtgttctcagcaaaccccagtgctgaacctgtcgaatccaaatcttgatgctttgccaataatgatttttacctgagagttttacttactttctctttcattttagtcttcatcattttcttgactgtttgtcattagaagacaaaactcctctagatctggatgaaaaactcagcctggcagcgcctgggtgggaaacattcctgctggattttcccttgagtacagatagcatcctgtcactgaggacttcccgcccggttctcagaatagccttaggaacaagaaaagcacaatgctcaccatcggattgacatcaccatgcaggtggtagagaggcggtcacctccagcagaaagaaagaggcctttgttatttggtgacgaggttggaaggggagttttgtcagagacaaaccagaaagccagagggaggagagagaaagggagggaatccagggttagcactcacccatttcttgttgtgggattaaggttttatttctctctctctctctctctctctctgtagtatctttatttaaaaacattcctacaagccagtgcatagttctttaaaacatggagcaaaataagatgtgcagctgctttttgttttgagatggagtcttgctctgtctcagctcactgaaacctgcacctcccaggttcaagcgattctcctgcctcagcctcccgagtagttgggactacaggcatgcaccaccacgcccagctaagttttgtatttttggtagagatggggtttcaccaggttggccatgatggtcttcatctcttgacctcatgatccacccacttcagcctcctgaagtgctggaattacaggtgtgagccaccgtgcctggctgtgcagctgctttttaatgagcccgagctggttttacgggtcttgcaggaaagttgcagttggaaggcgtaagtggaattggaataaactctggactgaagcttccctgaagtggaaaagttttaaaataaacaaaccccatcactggagaagtgctagagtcctgaacatccttgcagcttgccttgggtgtctgcagtgattggtcaatggggcatggtaatttctagaccacagccatgggatagtcaggcttcttcgccctgtgtgtttagaatcctcagtgtactggttgcaaaagtgttggtttaaatataactctgataaaataactgctcccaagacacgtattcaccctacaacctaaatggcacaccctatttccctgagtgatcttcgggtatgtaacatgcagccctctgctcggaccccagcagtcttactgagcatcctgtagggcgtctggggctatgattggcttacactgaaaatcactctgtgagactttctgtaagtttctcttgtgtgttttcccgcaggctcattttggaaaatacctcaagaagcccaaaggttgaagtctccatagtggaagtttacaataatgacatttttgaccttctggccaaagacagcattgcagcagtgtcgggggtcaagcgtgaggtggtgacagccaaggatggacggacagaggttgcgctgctggcctctgagtgagtactgcacctgccccgtgctgctggcctctgagtgagaatggcacctgcccctcccacctggtcaggaggctgcacgtctctaaacgagctccccacgcccaaggatcccaaggagaatcggccgtggtggcccgatcagtgctccttgtcactgagtggttccttgtgtgttttcatgcttcgtatgtgttgcacaactctcaatttgctgtaagaatgatctttctttaaaggtggctatgtcaggatgatatatttgttaattagctggaatgggtgatcatttcacaatgtattcgcatatcaaaatatcaaggtgtataccttaaacatacacaattttcatgtcattaatatcttaaagctgttagagataaaagtaaaaaaaaccacaaaaaatattttttacaatcaaaattaaaataaataaatgtatctttaaaaaaaccttcataagagcccctcagatgggcgtcatcccatctgacagatgaggaagcagacttgtggaggtgaaagaacttgcccaccccactcaggctaggagagatgaactcatccacatttgtaaatatcagtatttcacagaatatgataatgaatcctcttgtaaaagtgaggatcccccatattaagtattttcctcaaagttccctattgtcaaatccacatggatgtgctgggtttgccccagtgggggtgcagctgggaggtgacagaaggaaccctccccatgagtgagggcccagtcaggctgcccatcctgggccccggaggcagcaagggaagggcccaccagccatgctgaatgtttcacagagctgaaggaaatcatccatgcaaccctgatacggtcacacaaagtcgcccaaaatttgagcctttgactgacagactgtgatggaaatgttatctcctgctgattaagagctctgattagcagtcatatctcatccactaacacggagaaatgggttaaacctttattttacaaatcagatttgatacacaaaatatttttaaaacatggttcctggaggctctaataaataaaggaataggtgatgttgaaaaggttagcaacctctgattttgttctgaaacagtccattatttcagggtcagcaattagagatgctataggttggttaggtctcaaaaggaaaaagtttgctttaccatgatttattgtgcctgagactggcttcagtaccccactggcacgcgtggctcatgtgagaggcttccctgagccgaggagtcttggaagtcgccttaggtaaggggggccgccctcactgtgttccccactgcttgccttgtctgtagggctgtcggcagcgcctcgaaactgatggagctcgttcatggaggtctgcagctcagggcgaagcaccccaccctggtgcacgcggattcctccaggtctcacctgataattacggtgactctaaccacagcctcctgctctgacagcactggtaagtcaccatttgtgcttggtcagtggcaagtaatagaaaaacccacttaagaagaaaaaaatcaggccaggcacagtggctcacgcctgtaatcccagcactttgggagactgaggcgggtggatcacctgaggtcaagagtttgagaccagcctggccaacatggtgaaaccctgtctctactaaaaatacaaaaattagctgagtatggtggtgcaagcctgtaatcccagctactcgggaggctgaggcaggagaattgcttgaacccaggaggcagaggttgcgatgagccgagattgtgccattgcattccaacctgtgcgacagagcaaaaactctgttaaaaaaaaaaagaagaagaagaagaagaaaaatcagcatgcctgcagcatccaaggcctctcatgggacccagcatgggaacagcagccacaccttttcagtatctgcatcccaaacccaaaagtccactgggatcccaggctgagaagaaaaagtgagagtgggagggaggaaaacactctgctaaataaaatataatgcagaaagaaaagcagggcataatacaccttggagtacatgcatttgtcatggaagaaacaatgagtgtaatttcagtttaaaaccaaaatttcaaactatgtagtatataaaatgattccagttatgtaacagaaagaacacaggcctgtgaagcctgggctgcaactctcaaacttgagctgcgtccaattccctgcagcaggtggtgggaactaatagcagacaccacccatgctcaggttcagcagggctgggactggacccagagtgtgcgtttctgcaaggatgcggctccggggaccacacctggagagccacgggtctggggccggaacatgagactgtagtcccatcaaaacctggtctcagtgggttgacactggaaaggccatttctcactcatattgaaggccagtgtggctgaacattccccatccttcttgccaccgtggcacttgaaacatttggcctccaaggttgctcaggcaagggaaggagaggtgacggggaggtgctgacaatagcccctggccagcccagagtgggccacagctgggcacacggccttgtaccgcaggggctggaaaggcacaggcgtgtgatgtttagggaacaccaacaatctctaccaaaaacgctcccgatacaggggcggtgtggctgccagtggtggtgggaataagaccggatttcatgtcctttaaaaaaaattgtgtatactttctatgttttgcacagtgaataaatgttattttgcttttttaaaaaacctaagaagtttgtttaggaataacacactacaaagacatttgcattaaaattaagagcccttttgttaggatttgtgtggaagattatcgaacagattgtagaatttatttctaaaagggctcatagattttctgagtgggattttaattaacatgattaccaagtcttcctaagaagcattatttgatttcctctgggccaattaggcattagttcaaccttccacagtgaagaaagctgctttctaacttgtgttttcccccagagaagccactatcccctggacctctgcggaaatcccacttcttactgggtgggaggtgtgggcaggagggtgcagttcagaagcttctcggctctgactgaggcaaagcacagcctcatggcttcatgcaactgttttcctcctcgtcgctccttggtcccttgcagcagaccaagcctgcagtgccaccctccccagggagcaaacagaggcaggaagggcaggaaggagccgcagagcttctcaaggggccttggctccacagctggttcctgggaaccccgcagggcatgcggagcaggtgcaggctcgactacagctcgtggactcggccggcagcgagtgcgttggtgagcaggggcaggcatttccctggggggtgggtgctgcagaagcctatgatctgatggagctggatgtgcaaccaggcagcccgggaagctctgggcgagccaggcatttccccctccacaggtgagttccaaatcccgttacattctcagggattggttctcttaccccggcaacccgagagtcgtgttcctcacacgggccctctgggaacagaaaacctgagttcccagcaggagctcgctttgagctgtgagcagagccatgaaagacactcactctcatgcctgtcccgtccatggcctcccctctacctgcctgagagccgctcctcccaaggagccggttttgcttttcctgcctcctttcttggtgcaaacggtgatggtgcgtggcggtcctgtccaggtgtgtctggagtgaccgggttggccctgagggagatggcgtgcatcagccgcagccttgcggccctggcaggcgtcctgggggctttgttggagcaccgtggccatgccccgtaccggaacagcaggctcacccacctccttcaggactgcctcggtaaccgttttccccaaaatgccccaggatgggggaccacgtaccccaggacatgtgcacacacttctggcctgcacgtcctcgagggccacccatgcaccccctgcacctcctgtgtcctcgctgtggctagctggcactcccacggcacggtggtcattctcctgcgccgtctcaccttggcctgattgtgtgcttgttcggtctgtgtgtgacttgcctcctggttggggctcagtttctcaagggtggcagccctggcctttctcttcaccaggggtccgccagagcagctgagggctctctaggctgctgctgcatgtgtggcctgggtccctccggctgtgtagacctgcttaggccccaagttccttgggtcttttgggggcaggtgccagaagcctggacgcaacagattaagcaccagtgccaggtggggcacaggcggcccctgtgtggagtcatccagctgtggctggatctgggctttgcggtttttggggagctcagttagtgccccctcccccgactcagactccagactggttgaaagggaggacccgaggaagcattgcggctcttcctgactcagggtgcaggcagagtcccccagaggtggccctgggccctgtaggccgtgtcctgagaaacggccactgcaggacggcaggggcacatggccaccacagtcggggggctcctccttcctgggagggccaccctgggaggtggtggaggggccgctggtgctcgggactcggggaggctggaatgttccagacactctccctgtctctcattgtggggtatttccccctctcatggcaaattggcttcctccacacggtgaataacagggctgttcacaggagcatatttttggattctgcctttaagagagagaccacctggtactcttggattccaaagttcgcagccccaacagagagacagggcgacctgggtcaggggcacagcccacccgtgatctcaggggcggcaccgtggggcacacagtacctgagagccagcaggtccctcatggagccctggccttggcctctggggtctgcacttttcctcccccttagctctcccttccttctccactgtttttggttttcatctgtaattcttaaccctcgttacgggtcctgaaaaacaggaagagacagcattcctcaggaggagaagtcctgggcacacggcccctgccccaggggggcctgagggagccacagggccatgggccgtgagcagcaggtgtgggcatgagggagatctagaaagaacagccccagggggctgagcgtccctcagggtcatgtgcagactcaacctagggctgacttcatacctcccaattcccgggacacaggagtgtgagtagaaggcctgcagcttccccaggtgaggggcgctagtgaccggctgctgaccctcccggacccaggtgaggggtgctagtgaccggctgctgacccttccagagggtgaggggtgctagtgaccggctgctgaccctcccggacgggtgaggggtgctagtgaccggctgctgaccctcccggacccagggtgagggatgctagtgaccggctgctgaccctcccggagggtgaggggtgctagtgaccggctgctgaccctcccggacccgggtgaggggcgctagtgaccggctgctgaccctcctggacccccgtcccaggaacctgccagacgtggccactttcccgctggggcgccgggcggccctctctgcagccgcccatctcgggccctggttgctggcatgttggcactttcagatgctgctcttctttccagcttgcatgttgtttttctattttaaaggaggcgatgcgaagttactggtgattctctgcatttctcccagccagaggcacctggcacagacgttgcagggcctgggtttcgggatccgagctcggcaagtccagcgaggccctgcccgaaagaagccgcccagctcccaaacggaggggaagaggaggccggattgaatgcattaacaagtttttctcctaaaactgtgtttcttgtccttgctttataatgcatatgtgcttagaaataaacaggtttcacgtggactcaataaacctggctttattccaaagcaccctcatgaatgtggatgggacctccaactcctgccagaccatcaggcagggcaggcttcacagaggagctccttgcagtgcggcggccaccaggtgtcacagcaggcactcgctgtcctcatcagactctccccagaggccaccctgggccctgaaggccctgccccgggaaactcgggagccggcagaagtagctgtgggcaggagggcagggggcgtgagtgccccacagtgggagctggtcagcctgggcccagtgcagatcccacccgtgagctggggaggtgctgctgggcacgtacggccccagagccaccaggcctcacacagagctgccacctccgcctcctcgagttcgtgcttttcctttccccccaggctccctctttcttcaccactgtttttggttgtccaccacactccgcatgaggagctgtgccaggcagggagggggcgtctggggccagcctcacgaacctgtcgtctcatttgacacaaacgcggcccccaggattcctcaccacaggctccaggaccagatggactctggtttccatggtggctctgccacctcccagctctgcatccctggacggtttgcttggcctctaaagcctggcttcctcctcggcaaagccaggtgaaaccagagggttgggagccttaaaggagacaaggagcagctctggagactggcctgtgacttcccctgccgtggggctgaactggcacgtttaagccccaccccaccacagggctcctctccgcctcacaaggggatgcatggtgacagctgcccaccgcgtcctctgctggaagggtgccccctggggctgcccccatttccaccgggcccgcagtgacagatgtaccctctcggacccagcagatccaagagcagggtcccaggaggaacgcatgtgcggaggaatggggggtcacaagcacagaccaagaataccccatttcttaccagcaaccattttggctctgagaattggctgggaagcaggttttggagaggagtcacagctggtagctttcagatgatttcaatgccaggaaaatgtttttttttttttactctatcctgtttatgcaagagggaggtaaaatgtcttttctagtagttagcacaaaccaagtaaacctgtgcccacatgcggctcaggtgaggagcgtgagctgtggtggtcctgactcatggcgggcagaagggtaggaaccccctcccttcctgggagcccagagcaaggggtggagacaggcagggggtgttcagagcccagtgtgctaacggccttttcctgtactccttttcccagggcggagcattctgcctcactgcgagtggggacctggcccaggctgctggggtccagcttttagtcagggtggccaggagggcaggtgcacggggcatcatgcgctgaagacagagatgctgggcttctccctgccaggaaaggactcagccagtggggctgaaagcagagacatctgcttcaactcatggtttttaatataattgggtagagatgatagacagtagataggtgagatgatggtgagatggtagatgatcagtcagtgaacagatggcagatctgtagatccatggatgataaactcatcagcagatagatcagatttaatctcatatataaaaaatatgatcgtttcaatgtgtaatcaatatgaaatcaatatagagatattaatgagatattcaagattctttgtccacactaagtcttcagaattggtgtgtttcccactgactgacagcgcccctcagcacaggctggctgcgagcttagggggccacaggtgggcagcccacctagccctgtgctgaaccccacagacaaatgcctccattttgtaacaccacctatttttaaggatcccttgattatcctaaagtgaaattatacatagattatataatcctaacagagcatgccttttttaaaaaaaaaaaaagaatcaatataatgatgtaactataatataatggagaaataggccagatgcggtggctcacacctgtaatttcagcactgtgggaggccgaggcgggcggatcacttgaggtcaggagtttgagaccagcctggcccacatggtgaaaccccgtctcttctaaaaacacaaaaattagctgagcatggtggcagctgtaatcccagctactcaggtggctgaggcacgagaatcacttgaacctgggagactgaggttgcagtgagccgagatcgcatcactgcactccagcctgggcgacagagcgagactcagtctcaaataaataaataataaaaataaaaatataatggagaaataaaaagtttttttctgtgtatatacacataagtatatttcaattcgtaaaactttcaaaacaactacatctgaacacacagcgaagtaaatgagtttcggtataagaaggaagacaatattcaatttatgtatattcgacaatttaaaaataagggccaagtgactgtatctgtgtgtgtgtgtgcacgtacatgcatgtaaaatctccaggaatgtggccgctacaaaaagcagacagacacacagacatggaattgtcacaagtgtcccatttgtgactcacatgtcaccagcagtatagcaatgtgatataattttgtacatggtgaaaacctcttggtaatgttacaaagtttcagcttctcttggtttacacaactgttgcattcctgacacataatgtacattaaaactgcagaaataatccttcctgattttatggagagcagtgtgaggtttcaggcctggatcaccaaatgcaggatttccacctgtgaatgtctgacgggggctaaagccacgtggcccccgggacagtatttgctgggtgggagtgtcctgtgccttatggggacctggcgtccttggtgcctgtctgctcaatgtcacttgtgtcccctcatcattgtgatgacttgaatgaccccacaggttctgagatgctccctcagtgcccaaaataaaatcaaacttctctttagggttggcccttaggcaggcagatgcccctggctcaggaagcccctcaccggcttgctgaggtgcgaagttcctttagtaggacagagacaccaacgcacaaatgatggactcaggaggtggcagctctggtgagatggaagcttctctgtggagcccgcactgaacagcagtgccaagcaacaactgccgccaggccctgccgtcctccttctgaccttgaagggcccgagctgctgccatagcgtgaccgaagggacagcctggctgagccgcgtgacactcgacaagccttctttgtgtgtttgatgaagttcctctctgagcaaggccggcgttgtgataaccaagctgcctttgtagaggatgcgtggacgcctcgccccacagctgcgtggggcccacagtggtgccccgagacgggcaccgtgtgaaaatggcagagcttccctctggggaagtgttggaccggctctggccagcctctacgcgggatggcagaggcgcgagtgactcaggaacctgccagtcacagcctagagcaagggcgtctacagagactgggagttggggcagtgggcgtggggggcgcttgggccccaggcaccggaccccactgcctgccaccctcgacgcccccacgctgcagactggaaccctctgccccatcacagggcgtgcagctgagtcctcgcttcccaggttttcgtctgcctctcactcccaactcctcatttcctagaaggaagcctgggcccagtcttcaccctggtccacttggccacacccagagtgccagggtttcagagcaaaccagcccagtctccagggtgtggggctgcaggcactcaccccaccgctggccaccaccagtgatttcaatggcccatcaccgtggtgctgacacgctgcccctaagaagggagagggagggacggacccaggaaacatacagaaaaaaaacccaaaactagtcagtgactaaaactcaaagacgtcccatcaattaacagctctgctctggggttactatcttcatgttcattagcttcttcctcttggctcagggcctctgaaggtgtttaggatcaacccatttgaaaagcaaggacgctgaggctgtggaagtccacgtacttactgactcgcatcgcctgtgagtgggcgggaaggagcgtctgcccctcagtcgtggtccggctccttctctcacagacgttgacctttggagggcaatcccagcgccacggagaaatgcacctccagaaacactcgtggcttcctcaaactgagcacaaccagacctccccagcgctggcctacggcacaattgttcatgcacgagagccgccttatggggtgagtgcgtgactctggtgcgaggtttatgttcccagggctgacatgtctgggagcttcacagctggacgaggcatatttggaggggcgccttgaacctggacagcaccccctccttgcctccctcaggccgtttggccacagaacctgtgacatgggcaggctcaggagaggagaggaggaagggaaggagcccaggccccgaggagggaagattgccgggggccagggtgggggtggggtggggtgggggcccagggcccagggctggggcagctctgggtgccaaatgcggtttcgtccagaggacactgcaaggctggaatgaaacaccctgtcctcttcagcttgtagcgggtcagaggccgctggttttgaagagatttgccagtgatctgtgggaggaaacactcagcagaggtttaggtggcacgtggagactgtgcggggaatacagcccaaatggggaggacagaagacaccacagccacccagggtgtgagagctgcgacaggcgcctgttagagcggaaccacaggggcccggccccatctcggggtccggggtggcttccctgcgggggcggcctctgtgcagaggcctgaagggtccacagtggcaaagggggaatgacaaagtgtctgcctgtgccggaccgagtgatctgtactataattaccctgtgaggggcgcacgctgccgtcctagagcgtcacagacaccagcccccgggcctgttggtactcgccggaggtccctgcgtgcccagagtcccgccctggccatcgtttagtgtgaggcaggagggggccagatatgggggggacgcctggctcccccagatctctcttgcctgctctttcctccgcaggctgcctgtgcccctcccccgtagccaggaacaggccctggggagtggtgggaggccgtgcagtgaggcttgcggccctggatgctccctcaggactgtctgggaccaggctcgtctcacaatccgaattaactgcagacctcacttcgagaacagcctggcccagccctgatactcggggaaagagcagcggtcggaggaggcaggaggagcgcacggagggcaagccgggggcccatgtgtggctggggcagccgtggcctcctcagcacagtgtgagcccagcagccttgccgtggccaaggccctgggcctgggaacttgtaatccagtcgctgactttgcttagttagcagaaatggaagacacctcatttgtggagaccgaggtggtggaatgttgaccctgggggtgttgctgtgggaggccggtgagctgttagcccagtgggcaggacctgggtgaccgacgccctgggggtctcataactccctggaccttctcctttcttggtggagcttggccaaaacccacggatattttacatctgtttccctgaagtgctagggacgttctgtagtttcagccatgctcctcgggcaagccccgggatggggtgggggggccagaacaatgtggggtgggcgtggccggacgccagctgcccctcagcaggggcttcagctccatcacagccatgtggactctggctcagcctgggtggacaaggaggtgtatacagttagcacagccagagcaagccagccctgcccactgaggtgcacagagcaccaatccgctggccctccctccctctttcacctgttctgtgcccatttattggctgactcctgtaccggggtcttgctttggcaccgaggaaactgcagtcaaggccggaggctcctgccttgaagatcccaagaccgggatggagactgatgagccggatgtgtcccagcgtgtaatgcagggtgggctgagtgcgccccccgacgtctgtgtgggaatcctcaccagcaaggccatggtgttaggagggggtgcctgtgggagccggtgaggttgtgaggatggaggctcacgggtgggattagtgcctttgtaaggggggccctgggagctcgcaagccccttccgccctgagaagacgtagcggccagggagggggcctggaccaggaatggaactggccggcacctcgatcctggacttccagcctccagaatcatgaggagtgggcagagtgaggccacacggcctatgaagatctgttgtagtgaccagagggaagacacagtgcagtggacacgccggggctggtgtgtgtcctgcagcctctctgggagcccagggcacctgctcccaggaatcacatgtgagaagcaaaacacaaggacaggctgcggggaggcggccccggacccccactggatgcctcacttcacacacctgccaccgagggggacagtgccggcctcccagacctgcaccccagcccacaggtgggcactccacccatgcactgtcagggctgccaaagcctcatgccctcccaccaccttctgctgggcagccccttcctcagagaacaaagagcattttggttttttttggagacagggtcttgctgcatcgcccaggctgcagtgcagtggcatgatctcagctcactgcagccttgacctcctgggctcaagtgattctcccacctcagcctcccgagtagctgggaccacaggcgccaccatgcccggctaattttatttctatattttttgtagagatggggttttgccaggttgcccaggctggtctcaaactcctggtctcaagtgatccgctcaccttggcctcccaaagtgttgagattacaggtgtgaagcaccgtgcctggccataaagagcatcccggaggctcctgaggcgcgtcctcctcccagcccacctcctgcagaggcccccattggaggccggcctgttcccactgttacgtgttcccatgtccgctcaggagggagcatggcccgcaccccacagggcacactcctgcatctggctctgaggacatgcttcttcctcttctcccactgcgccaggccctgccgccgccccaacagcgtggatgtccagggctgtgggcggacaatggccctgatgtccaaggacagacaacagagggtgcggcgaacaggtccccacttggtgacggtgacgtccagttcctgctgcgtgcactggtttgtgacagcagcagtggctgaatggagagaaccacacccctgccagcgggaggcctggctggtcacctgagcacagatgccagggcagagccaggaggggactcaggatgaacactgccaccctggggcggctggagaaccaggcatgggccggcggcgagccgggagggagccccagcctgtgcccagtggcccgggggcctcatccgtagccaggggatgtgagcagggaatggcagccgctgtgtgacccaaggttctgagatcagaggagtcctcaccctgggccccgttttgaggcctgaaacttccatggttagatggtgatggggagccctccttcagggcaaaagataagattacaaattctaaagtatgaaaataaatctaaatacagaaacattaaaaaaccaccacatcacaaagtttaaaaagctgaaaaacacagtaacacaatatttggtgacggttttattggtgagctgcctgtgattaataaacaattaacccgcgccattttccccactgcgtgttcacctcttcacgcgcctttgtagaataccagctttctcccggcagggctgccccggatttgttttctaaccttggcacctggaaggcagcctccccatcacagctcgccgccgtgagaacggtcatgggcccggctgcaggaccggcattgcctaccacgtccagcctcccactgccagctctgtttctcttccagtccccacacctcccaggttgggagtacatgtccgcctcaccaggtgacctctggccctggccatcctgtcctgagactccctgctgctcctacaggtagagacgacatgactgggaaccccgaaacgtctcccagcagaccgagccaagtgtgtgtccagttcagcctcccctacgcgggccccacacacccacagggccctcagtgcccctcaaggcgaaaggagcgtgacggatgaaccctgagtggaaggggccgcctgtcccaaacacggacggctttttctgcaagttttacaaactgataaacctttgtgaatgcactcgcagggccgcagagctcagctttccccgtggctctggcacatttcccccgcctggggaacccagagtccatgggccacgacgggctgatgctcggcttgggaaccccctctcctgtgagatcccagacacacaggcagttgctggctgccccgggcctcccagatgggcacctgaggaccccggcctcctcctcctgcttggggttcagcccaagagcagagcttctcaggccgtcaattactgcagatggagcaggctttcctggaggaaggatgagctttgtctggaattctccatcttccgtgagggaggctgggctgatggctgagggcccagaggagtccatgcttcaacacaggcaagagggaaccggccacaccctgcccagggccaccctgtcaccactccagaccaactgcccccaggagcagggtctgccgcctcccacaccccacccagcagggagagctgcgccctcagacccagacccccgcagcagcaatgcaggttccggggcccagcgagacccacagaagcagacgcagtggggggctgagaaacccagcctgaacaagctctctgggtcgttcttgcgagtctggacctgccagcttgaccgctgacctggcccgggccacaggactgaccaccccagccgggctcatgcgaggctgtgatgctggaggtccttggcctgctccttgggggtccacagggactgggacaggtggttttcttttcctctccactgacagggtaagacagggattggggactttaccctgtgcccctcccccaccggcctgcctcatgccacctgaaggccacaagcccccctgtacacagcggcttctgctgtttgcaggccacccccagccctgccccccaccctccttcttaggaaacatccctgtccctaccagtcggtgtccatttttctggaaaatagccgtattgcctaaaagacctctgatctcaatctgtgcaaaaagaaaggttggcttccccgacttcccgcagccccgctctctgctgctttctgtctgggaaggagccccctcccaggatggccttctgcttccagctccgctcctgcccctccaggtgtgggtgacgtggaagggggctgtggggaggggcggtgagcaaagctgaggctcaagccttaggggagtctgccccggccccggctgggtgtgtctgagctggtagcccacatgggcttcatgtggcctgcctggccgtcccctcttgggcaagtctcagggcagcgggcctctaattgtcctctccacataccctgaacaccagagattagagtctttggagcagccctacccggtagttaacaggcatctggcataattctccatgtctgtccacaaggcccagaggaaggacagaaataggaatccccagtggggccagagaagcttctcgggtcagccaggggccatggctgcctcgcctctgccaggacacaaggcgccgggccagcttcactgatgcttccacaagttaggggtgggctggcccggcctttgctgcccctggggtctatggcgtgtggcgaaggtgactggcaggggaagcctggacatggggagtgtgcatgtatggatgtgtgcatgtgtgtgtgtgcatgcgtgtgcatctgtgtgcagatgtgtgcgtgtgtgcatgtatgtgtgtgcatgcatgtggatgtgtgcatgtgtgcatgtaggtcttggctcagaccctgcttcatggtggacaccacctgctgtgtctccccaacactggtgtgtaccttccctcatggtccatgggactgggctcttgcttccaagtttcttcaaaggaagaagatagtcattgccccggagcggggcaaatcaatcatcttgtactaatgggaatggctttgggaagtgcccacatgctcacatctgagccagcactaggcgcacctcccctgccgcacaggaattgtgggcagtcttgccctcggcagcactggggcttgtggccatctacagaacgcagccttctgtggccgatgcccctgagtgagttacagccggcatctcaccagccccccaggcaggctggtcctggttcaagcaggaggcatctgctcgggttctttattacacgtgcctggggcacacacacgattccctttcacagaaaggagagggtccccctggatggacccgtcaaagaggcggcctcaatgcacgcagccctgcaccaggccatggggctcaagctcatgcttgtctccagtgagctggagggtggtgtggcgtggtcttcaccacacacagacagtgaagggggcagtggtgttcagggcacagggctgaacgattgtggcctctcagtgctctgggatgggcctgagactagcagggatgcacgggccattcctctaaatgcagaggacagcaggtttgcacgtgtgcaggagtgttgtgcagggggaggagccctggggagaccctaccctggtggccttccagagcccacagaaccgaggtcgcactacccgtggagcccaccggatcagagcaggtgccatgcacagctagtcccccactctccgtctgtcaccaaagcttcgcccctccgccagctgggctgcaccagcccaaccccagccagggcaatggcttaaggaagccacctgtgagcagagtgggtcctgaggcctcatggctgagatgggagcagagtcggcttcagctccggggcagtggggtctttggaagccctggcttggaagggaaagcacagccattgactgtggatggtggaggagggtctctggctggatctcaggtgacagagctgggcttgcaccacaagaggggcctctgtctggcaggcccagcgcttgcaaacaggagttgcagagaggggttcaggtctgggaggaacctgggtcctgcacagtgatgactgtgaactccggcttgggagctctggcagcctgtgcccatcaggactgtctcttggggagctgacagtgtgggaaactgcagagctgtctctccagggtctgggcccagctgtgtcaccttctctcccagattaggatgggtgacaggctgcctcaggggccaacaccatggctctctggacacttgacagccagaccttgaactggctccctgagaccctgagggaaagagctcccgggtgtatggcagacaggcatgaggtgcgggacctgtttgttacctcccaggttgatgtcagagccagctccacacctcttacaggtgaacctgtggagcgtgctggctgcggaagtgcaggcagcatctggcgggcaggaagggacgagggccatgtggaagtggggtgggcaggggctgagcctggcggtgcggacggtactgctgggtgggtggtgcctacaccacaaactcctgtggtggagcctctccgaacaggtccagggcgagacagttgctggacctcttgctggggagagtggccctggtctcgcaggggcctgccagcctgcagtccagggcgcggtggaaggtatggctgagtgaggtgggcgctgggtgcagggccagctggtgcagctgcatgtcgtccaggccatggctgtgctgctcctcactgaccccggctgtcatttcctggatctgcggggagaggccatgggatgaggcctgctgccccctctcactcccaccaccgcacacggcagccacactgcttgtggccacagagccacactccctgccaatgcccaccctgcgccgcagtgcatggccggcctgcccctggacggtccccagcacacacctctgcgagagaggcttggcatcttcctttgatgcatttcaggaggcccccaccttgcccagcttctttcctggggctgctttctgccttttaactcagtggacctggactcttagcgtttggtgtaatttaggatcaggtctgagtgtgggccttgaacactagctctggaagcacctcagtggtcaagaacggcctcctattttatacgggaggaaactgtctgggttcagaggtgactgtccaaggtcccgtccaggtgggcggccagcgggcagcgtcatcgcccttaagtgaagcctccagcccgagcttctcggctgccgtggcccctcagatctgccttggaccactgtgctcccaggaggcagatgaggcccctggtggcaggtggcaggggcaggggcaggccacgccgaagattgcccagcgccagggtctgacttgcccttctacgcgtgtttccttgtttttaatcaatacgtctttcaagagtgacagtccctggcccagagctcaggcggcttcgggcagccgtctcctccactgagtgggctgacctgggtttgggattgcccccactgggatgggcccgcgcctgccaggacttgcagcctcccctccctcctcccgtgcccagccctgttctctctccatccagcctccggtgcccagccctgttctctctccatccagcctcccgtgcccagccctgttctctctctccatccgcctcccgtgcccagccctgttctctctccatccagcctcccgtgcccagccctgttctctctctccatgcagcctctcgtgcccagccctgttctctctctccatgcagcctctcgtgcccagccctgttctctctctccatctgcctcccgtgcccagccctcttctctctccatccagcctcccgtgcccagccctcttctctctccatccagcatcacgataactaatcagccacaaccgattttctgtgtctttccagggggattctgaacagggctgaccagagggggcctcaccctcctgtggtggagccgggggcgggggttggggggtggggagggcaactcggagcctggctgggaaccctgagcccacctgttccccacctgggcatccaggaaccactggctcgcttctcctctagctcctctgggggatcctaaggctcagtagctctacaggaagtgggggaagcctggagcagccctgcacacacagcactaggccccgggtggaggaggtggacgaaggggacggggcagccagtctgctgcatggcaggttgcagggcccaggtgtccgggtcctgcctacagtggcccggtgacactcagggcccggccaccccagccccaggcaggacccctccctccccacagtgagccgactcactcggccctgaggctgaggcctccacccacgtccacctgccccagtgcccgagagccttgctgctccctgacttgcccgctgcgtctctggggatgtcagtcgagggaccctctgataggcctaggaaggtccccagggcccctgacaggggacctaggagaagggggtggaggagcagggccagggcttctggcccgtgggggggactctacctggtgcacggcctcggcgctctggcctctggtcctgacctgggtgcagggctcctgacgagtggctgtgggaggaggcagccgtgagcacaggtgtctgggttctgcccgacatggctcctccccagggcagttccctgcacttctggggccctggtctcggaccggcatctcctgaggctcacaccgcccccttgctctcagtgcggtgactgcttttgctccattccccgacatctgataaaacggccccttgctgtgcagatgcgggattagcacggtgattcccgctgggttacaggccacagagcttgcatacatcctcagagatggaggccaaccatcccttcctggtggaccagacactccaagggcaatggcggacacagtggcttagtgacaggaatgcctggccctgggaggccctaggtgatgttttgtgaccctggatggccctgggtgactgtaggtgatgctgggcggtcctgggtgactgcgccctggggctggtcccacctgatctcatcacatccaccgtcagggccgtggggacactcagagaccagcagagctcacgtcccctttctggggcaatgaggaagctcttcagggcctcatacacagggactgggctggacgcatccctcaggacagggtgctgcatcctgggccaggtgcacacacagtcctacacacagggaatgggcagggtgcatccctcaggacaaggtgctgcgtcctgggccaggtggacacatggtcctagaacactctgaatggctctgtcttctcactcctactcaactgagtataagag

SEQ ID NO: 22341 - DNA, 3741 bp, Homo Sapiens
ctaggaatctatctccctctgaaataaagtttcctcatcttccaccttgcaagtagccttctggtttccaatgatcccctcgttgtctctgtaaaaagagtttaaggtcttgaacaatggaggagcagctgctctgttctgtttcagagatgactaccaaaagctagcggtttgtgagtgcctcccctgtgccaggctgttaagtacctaatgtgcatgatcacatttaatcttcaggaatctataggatagttgtatctatttgttacagatgaggacactgagactcaggataagtatttccgctaaggttacacagctgagggaactgggattggtggacaaacctgattactaagcccaggccctcagccactccactggttggaaatggcctgactacaaatcaagggcttggcattaggcaacaagtagaattcagtgcttactgctgaacatggcagtgaatcctggagctgttgggatgcagttcctgccaggaggtaggaaaatggacagcttagtgcttgcatgcaggctgcagaacttaattgggcatctgaggtttgtactcttcctgagacccattccaggtggaaactggaggttagcattgttaacccagattccctttcatttggtttaaatgatggaaatcagtagttggtactgactgctaccagtgggagttcaggggcaaggaagagggtatgcatgtggaagcagtgccctgggccaaaccacaggacaggaaattgggacaggattacataaatcaaggtcagaaatttcctgcccaacccatggggtggagttttttcccttcctatccatcctagcgaatataaaccccgaattgatgtcagtaaatggaaggagcagctgttagaatctgatttcacctctcagcatccaccatgcatctcaagatagtcctggcgttcctggcactgtccctcattaccatctttgccctggcctatgttttgctgaccagcccaggtggttccagccagcctccccactgcccctctgtatcccatagggcccagccctggccacaccctggccagagccagctgtttgcagacctgagccgagaggagttgacagctgtgatgcgctttctgacccagcggctggggccagggctggtggacgcagcccaggctcagccctcggacaactgcatcttctcagtggagctgcagctgccccccaaggctgcagccctggcccacctggacagggggagccccccacctgcccgggaggcactggccatcgtcctctttggtggacaaccccaacccaatgtgagtgagctggtggtggggccgctgcctcacccctcgtacatgcgggatgtgactgtggagcgtcacggcgggcccctgccctatcaccgtcgcccggtgctgagagctgagtttacacagatgtggaggcatctgaaagatgtggagctacccaaggcacccatcttcctgtcgtccaccttcaactacaatggctctaccctggcagctgtgcatgccacccctcggggcttgcgctcaagggaacgaactacctggatggccctctaccataacatctcaggggttggtcttttccttcaccccgtggggctggagctactactggaccacagggccctggaccctgcccactggactgtccagcaggtcttctaccttgggcactactatgcagacttgggccagttggaacgggagtttaagtctggccggttggaagtggttagagtccctctacctccaccaaatggagcttcatccctgaggtctcggaactctccaggtcctcttccccctcttcagttctcgccccagggttcccagtacagtgtgcaaggaaacctggtggtatcctccctctggtcatttacctttggccatggggtgttcagcggcctgaggatttttgatgttcggttccagggtgagcgaatagcctatgaagtcagtgtccaggagtgtgtatctatctatggtgccgattcacccaagacgatgctgactcgctatttggatagcagctttggactcggccgtaacagccgaggcttggtgcggggagtggactgcccctatcaagccacgatggtggacatccatatattagtgggcaaaggggcagtccagctgcttccaggggctgtgtgtgtatttgaggaagcccagggactgccccttcgaaggcaccacaattaccttcaaaatcatttctatggtggtttggccagctcagcccttgtggtcaggtctgtgtcatctgtgggcaactatgactacatttgggactttgtgttgtacccaaatggggcacttgaagggcgggtccatgccacgggttatatcaacacagctttcctgaaagggggagaggagggcctcctctttgggaaccgtgtgggggaaagagtgctgggaacggtgcacacacatgccttccacttcaagctggacctggatgtggcaggtgagtgctgaggggatgaggatggagacttgggggcggggtcaggtggggtggagggaagggaagggaatctcccaggtcaagctgaaataacaagtggcaagagcagggtgttccaacaccacagctctagtggcaacagggcagggactgtttgagcatattcagtgcaatgagtctggtactgggctactgggtatctggtaaaaggtgaaaagattcccccgcccagcccctctgacttgctatgattgtgaaactagtttaaatgtaatggctgggcatgattgccttagcctcaagtgacactgggtgggtgaactggcccaatggggctggagttggagcactttgcttcttcctaattctgaaggtcatagggtggggaaggcagggtcctgagccgaggtcggaaaaattctgtccaaagtcttcagggtgggggtcaacctggggcttaggaaggagagggtagcaaagctggggttgctccccaggatagggccactcctcatcgggagggccatcccattcctgtcatcacagttgactcatggcaggcacacagcttgctgcaagtatggaaagagatttctcaagcacaaagggctcaaagcacacagaggacttgctgttcctgacagactttgtcaaggacagaaaggaacttacagactcacacactgatccacaaagaaaattagaaactcaccagaccctctccattttaagggaaactaaggagggtggcgggagatgggacaggaaatgactgcccaagtataatgcaacataaactagtatttcttgtgaaatgttttcttatcctcaagtctaaagacatggcacgtgcgtgcctgcgtgtgtctctgtgcatgcacttgcacttgtgttcgcagtggtgtggaaggtaggaaagactaatagcatgattgaaatgatcatattaactagattactctttgacatacttggattttgacttgtcttctgattggaagtttttcttcagcatctttggcattaaagaagcttgttttgggaagtaacatttattggaccctaacgttgtgcaacatgggctgctgctgtgggccaaaaaagctgtgtcaggcaccactcacaggatgctgcagaagcaccaacttcattgcagtgcctcccgtgccaggtacctcatataggtctcttgaattacattccaaactcagaaatttttgaacaattctaattagg

SEQ ID NO: 22342 - DNA, 3515 bp, Homo Sapiens
gccagcggcggcaacggcggcagcggcggcagcggcggcggctactgtctgggctgagcagtagtgcctctcgggtggcgggtttctaggctgcaggggcttggtaggtggtggcaagggggcggcggcggatgccggaagagtgcccgccccgccgcttggcggcccctggatcgagatgagcgcctccgcgtcggtcgggggccccgtcccccagccacccccgggcccggccgctgctctgcctcccggttctgccgcgcgggccctgcatgtggagctgccgtctcagcagcggcgtcttcgacatcttcggaacattgctgcccggaacattgttaatagaaatggccatcagctccttgatacctactttacacttcacttgtgtagtactgaaaagatatataaagaattttatagaagtgaagtgattaagaattccttgaatcccacgtggcgaagtctcgattttggaattatgccagaccgtcttgatacatctgtgtcttgtttcgtggtgaagatatggggtggaaaggagaacatctaccagctgttgattgaatggaaagtctgtttggatgggctgaaatacttgggtcagcagattcatgcccgaaaccaaaatgaaataatttttgggctgaatgatggatactatggtgctccatttgaacataagggttattcaaatgctcagaagactattcttctgcaggtggatcagaactgtgttcgcaattcttacgatgtcttctctttgctacggcttcatagagcccagtgtgcaattaaacagactcaggtaactgttcagaaaattggaaaggaaattgaagaaaaactaagactcacatctacaagcaatgaactgaaaaaaaaaagtgaatgcctgcagttaaaaattttggtgcttcagaatgaactggaacggcagaagaaagctttgggacgggaggtggcattactgcataagcaacaaattgcattacaagacaaaggaagtgcattttcagctgagcacctcaaacttcaactccagaaggaatccctaaatgagctgaggaaggagtgcactgcaaaaagagaactcttcttgaagactaatgctcagttgacaattcgttgcaggcagttactctctgagctttcctacatttaccctattgatttgaatgaacataaggattactttgtatgcggtgtcaagttgcctaattctgaggacttccaagcaaaagatgatggaagcattgctgttgcccttggttatactgcacatctggtctccatgatttcctttttcctacaagtgcccctcagatatcctataattcataaggggtctagatcaacaatcaaagacaatatcaatgacaaactgacggaaaaggagagagagtttccactgtatccaaaaggaggggagaagttgcagtttgattatggtgtctatcttctgaacaaaaatatagcacagctaagatatcaacatggactagggactccagacttgcggcaaacccttcccaacctgaaaaacttcatggagcatggactaatggtcaggtgtgacagacatcacacctccagtgcaatccctgttcctaagagacaaagctccatatttgggggtgcagatgtaggcttctctggggggatcccttcaccagacaaaggacatcgaaaacgggccagctctgagaatgagagacttcagtacaaaacccctcctcccagttacaactcagcattagcccagcctgtgaccaccgtcccctccatgggagagaccgagagaaagataacatctctatcctcctccttggatacctccttggacttctccaaagaaaacaagaaaaaaggagaggatctagttggcagcttaaacggaggccacgcgaatgtgcaccctagccaagaacaaggagaagccctctccgggcaccgggccacagtcaatggcactctcctacccagcgagcaggccgggtccgccagtgtccagcttccaggcgagttccacccagtctcagaagctgagctctgctgtactgtggagcaagcagaagaaatcatcgggctggaagccacaggtttcgcctcaggtgatcagctagaagcatttaactgcatcccagtggacagtgctgtggcagtagagtgtgacgaacaagttctgggagaatttgaagagttctcccgaaggatctatgcactgaatgaaaacgtatccagcttccgccggccgcgcaggagttccgataagtgaagtgagcaggtcaacagtaggactggggcagaagctctgcctaaaatgaagtgaaagctgcacttaaccctttgtgataatgatgacacaaaatgaatattaatggaggatattcctcggaaaaacagactttgggaatgaaggagggactcaggatcattgttatcagtgggccaaagttagattttgctttcaagatttgcttttcgggcctgatgattttaaagcaaaaatcaccctctagttgaaagagcttacagctcgagtcaccttttagctatttgtctgctttttatttacccttgtatgttatcctcagagggaagatgataatatataaataatataatgaacacacccttagtttctcataagcatttgccctcaccatggtttataaaactttgggaaaacggaatattcagaaataggtttccgccatgtactgaaaggtctgtggccatctgtgaggtagatgaagaagcagcatagtggtctccttacatctaggcctaactgtccctcttcctgcccccgggtaccacagtccacctttagaccctactgtcgccccatcttctccgtggatgggccatgcgtcctgaaaacaggacatcagattcactggttctgtaacccagtagctgtgacgttccatctcttctaaccagccatggccttcccctcctctgccatacccttaatgcggccctcagattagatgaaaaacttgctcctggtggatcccaagggaccctcaaggacctcgaggttactgcagtcagatgccatctcatcccctgtgggggccaaagtttttatgtgggcagatgctgtggtcaggaactaggcatgctttctggcaatgcactcaccagacaaaaatcccttgatgtaaatcccatgttaatttattaaatttcagtcagaaggtcagcatttacatgacagaatgtatgtagagagttggggtgtctggtaggcaaactgcaaggcagttgagatagttggattaagaggctagacgagacatagaatactattggtatgtgtgcaatttcatgaatattaaattatgtttcgaagtccagttgtcattcccgcattcagatttcatttgctgttgctttatacgttacgtacccaaggacattgcctcagggttgcaaactctttaaaggaaaatttatccatatatccatgtattatatagaagaataaaaattgagtttacttc

SEQ ID NO: 22343 - DNA, 3873 bp, Homo Sapiens
gcgggctgaggcgtacgggtcgcacgcagcgccatgcgaggcccccctgcctggccgctgcggctgctcgagccaccgagccctgccgagccaggtcggctcctgccggtagcctgcgtgtgggccgcggccagccgcgttcccgggtccctatcgccgttcactggcctgaggccggcgcggctatggggcgcggggcccgcgctgctctggggcgttggagccgcgcgccgctggaggagcggctgccggggcgggggtccgggcgcctcgcggggcgtcctgggcctcgcgcggctcctggggctgtgggctcgcggccccggcagctgcaggtgcggggcttttgccgggccaggcgctcctcggctcccgcgcgcccggttcccgggcggtcccgcagccgctgcctgggcaggggacgaggcctggcggcgcgggccggcggcgcctcccggggacaaggggcggctgcgccccgcagcggccggactcccggaggcccggaagctcctggggctggcgtaccctgagcgccggaggctggcagctgcggttggatttctcacgatgtccagtgttatctccatgtctgcccctttcttcctggggaagatcattgatgtcatctataccaaccccactgtggactacagcgacaacctgacccgcctctgcctagggctcagtgccgtgtttctgtgtggtgctgccgccaatgccattcgtgtctacctcatgcaaacttcaggtcagcgcattgtgaataggctgagaacttcattattctcctccattctgaggcaggaggttgctttctttgacaagactcgcacaggagaattgattaaccgcctctcatcagacactgcactcctggggcgctcagtgactgaaaacctctcagatgggctcagggccggggcccaggcttccgtaggcatcagtatgatgttttttgtctcacctaatctggccacctttgttttgagcgtggtgcctccagtgtcaatcattgctgtaatttatgggcgatatctacggaaactgaccaaagtcactcaggattccctggcacaagccactcagctagctgaggaacgtattggaaatgtaagaactgttcgagcttttgggaaagaaatgactgaaatcgagaaatatgccagcaaagtggaccatgtaatgcagttagcaaggaaagaggcattcgcccgggctggtttctttggagcaactgggctctccggaaacctgatcgtgctttctgtcctgtacaaaggagggctgctgatgggcagtgcccacatgaccgtgggtgaactctcttccttcctaatgtatgctttctgggttggaataagcattggaggtctgagctctttctactcggagctgatgaaaggactgggtgcaggggggcgcctctgggagctcctggagagagagcccaagctgccttttaacgagggggtcatcttaaatgagaaaagcttccagggtgctttggagtttaagaacgtgcattttgcctatccagctcgcccagaggtgcccatatttcaggatttcagcctttccattccgtcaggatctgtcacggcactggttggcccaagtggttctggcaaatcaacagtgctttcactcctgctgaggttgtacgaccctgcttctggaactattagtcttgatggccatgacatccgtcagctaaacccagtgtggctgagatccaaaattgggacagtgagtcaggaacccattttgttttcttgctctattgctgagaacattgcttatggtgctgatgacccttcctctgtgaccgctgaggaaatccagagagggctgaagggccaagcagtggccttcatccggaatttcccccaagggttcaacactgtggttggagaaaagggtgttctcctctcaggtgggcagaaacagcggattgcgattgcccgtgctctgctaaagaatcccaaaattcttctcctagatgaagcaaccagtgcgctggatgccgaaaatgagtaccttgttcaagaagctctagatcgactgatggatggaagaacggtgttagttattgcccatcgtctgtccaccattaagaatgctaatatggttgctgttcttgaccaaggaaaaattactgaatatggaaaacatgaagagctgctttcaaaaccaaatgggatatacagaaaactaatgaacaaacaaagttttatttcagcataaggaagcaattactggtaaacaatatgagactttaatgcaaaacagtgttgcagaaaaaaaactcagagactatgaaatacataaaccatatatcaagttatttgaaaaatacctatttttttccaaagtgtgtaaaagattgttttgaaacgtacctgttctcaagatctttttattcagagttttaataattgtaactttttaaatgtctatagcactgaagttattttcaggttttgtattttcttttcttgtggaatattttaattaatatagcatggcaatattttaattaatatagcatggcacctcattttcttttgcctgctgttaaagattgaagctattgtcaaatgacaactttaaaaaggcaattataaataaaaagcctgattattttaggccagtttaccaatcactgtgtaattcttctggtagtattctacctacttttaagtctaattttacagatagaataatggaaattgaaaatttaaccctttattccgataatctcatgaagcaaacctaactatttaacatcagctggaaagaagggaacatttatattgcccatctcctgtgtcttcaaaggtgtgagagctgaggaatatgtgttcctatgggaactatgtttgaatatgtgcagttttcaacattttggcacatgaaagcctgacaagtttttaaaagggcagaagctttattttttgaacaggaaaacatgttttttaaattcacatgtttgtatgagtacttttgcgaagcaaggcatgaactgctaggtattattaagaatgaatgatttttgcatttaagttgtttgaaggcatgtattttgaaaaatatctgttacaaatttataatttcaagacaaattgaatcttattttataatacttttggaatttcattaataaggctaaaatttgaggaatataactaattttcagccttaagacatttaagtttggaagtccttgctattcaacagaataacaagaaaacttcagaatgtatcactctcctgaaaagaagatattaataagcccttttatttatggttatagttttatttatagtctcaaaattcctaaagcaatgctacaaccattgaatttgccatattttgtatcagtgctgttaatttgctgttgcctcaagaaaaagtgctttttctccatggatgaggctagaccctaagaagtaattaagtcaatgtaaatcaaatggaagttttcccatgaactaagcatttattagttccctgattagactggaagaagaaaccactatttcatgaaaagcatggaatattatattttattgttcataattaatgaataaaattgatatgaatgaatatagtgttctttgaattagtaaacagtacatctgtgacaatcatttttaacaagctctacttgtgttctttataaagtgtgattttcagaaagcaaacaacacaattacaaggttgaatctgaggaaaataatccttgtgccatagaagtatttacgaaattgcatttcattgttatgttttattttctgatacatgatgttcaattttatctttaggtaatattttatatcatagattaaaatttatagtgaactttaaaaa

SEQ ID NO: 22344 - DNA, 3876 bp, Homo Sapiens
atgtttgattacatggattgtgagctgaagctttctgaatcagttttccgacagctcaacacggccatcgccgtatcccagatgtcctcaggccagtgccgcctggcccccctcatccaggtcatccaggactgcagccacctctaccactacacggtcaagctcctgttcaagctacactcttgtctccctgcggacaccctgcaaggccacagggaccggttccacgagcagtttcacagcctcaggaacttcttccgcagagcctccgacatgctgtacttcaagcggctcatccagatcccccggctgcccgagggaccccctaacttcctgcgggcctcagccctggctgagcacatcaagccggtggtggtgatccccgaggaggccccggaagatgaggagccggagaatctcattgagatcagcacagggccccccgcgggggagccagtggtggtggctgacctcttcgatcagacgtttggaccccccaatgggtctgtgaaggacgacagggacctccagattgagagcttgaagagagaggtggaaatgctccgctctgaactggagaagatcaagctggaggcccagcggtacatcgcgcagctgaagagccaggtgaatgcactggagggtgagctggaggagcagcggaagcagaagcagaaggccctggtggataatgagcagctccgccacgagctggcccagctgagggctgcccagctggagggcgagcggagccagggcctgcgtgaggaggctgagaggaaggccagtgccacggaggcgcgctacaacaagctgaaggaaaagcacagtgagctcgtccatgtgcacgcggagctgctcagaaagaacgcggacacagccaagcagctgacggtgacgcagcaaagccaggaggaggtggcgcgggtgaaggagcagctggccttccaggtggagcaggtgaagcgggagtcggagttgaagctagaggagaagagcgaccagctggagaagctcaagagggagctggaggccaaggccggagagctggcccgcgcgcaggaggccctgagccacacagagcagagcaagtcggagctgagctcacggctggacacgctgagtgcggagaaggatgctctgagtggagctgtgcggcagcgggaggcagacctgctggcggcgcagagcctggtgcgcgagacagaggcggcgctgagccgggagcagcagcgcagctcccaggagcagggcgagttgcagggccggctggcagagagggagtctcaggagcaggggctgcggcagaggctgctggacgagcagttcgcagtgttgcggggcgctgctgccgaggccgcgggcatcctgcaggatgccgtgagcaagctggacgaccccctgcacctgcgctgtaccagctccccagactacctggtgagcagggcccaggaggccttggatgccgtgagcaccctggaggagggccacgcccagtacctgacctccttggcagacgcctccgccctggtggcagctctgacccgcttctcccacctggctgcggataccatcatcaatggcggtgccacctcgcacctggctcccaccgaccctgccgaccgcctcatagacacctgcagggagtgcggggcccgggctctggagctcatggggcagctgcaggaccagcaggctctgcggcacatgcaggccagcctggtgcggacacccctgcagggcatccttcagctgggccaggaactgaaacccaagagcctagatgtgcggcaggaggagctgggggccgtggtcgacaaggagatggcggccacatccgcagccattgaagatgctgtgcggaggattgaggacatgatgaaccaggcacgccacgccagctcgggggtgaagctggaggtgaacgagaggatcctcaactcctgcacagacctgatgaaggctatccggctcctggtgacgacatccactagcctgcagaaggagatcgtggagagcggcaggggggcagccacgcagcaggaattttacgccaagaactcgcgctggaccgaaggcctcatctcggcctccaaggctgtgggctggggagccacacagctggtggaggcagctgacaaggtggtgcttcacacgggcaagtatgaggagctcatcgtctgctcccacgagatcgcagccagcacggcccagctggtggcggcctccaaggtgaaggccaacaagcacagcccccacctgagccgcctgcaggaatgttctcgcacagtcaatgagagggctgccaatgtggtggcctccaccaagtcaggccaggagcagattgaggacagagacaccatggatttctccggcctgtccctcatcaagctgaagaagcaggagatggagacgcaggtgcgtgtcctggagctggagaagacgctggaggctgaacgcatgcggctgggggagttgcggaagcaacactacgtgctggctggggcatcaggcagccctggagaggaggtggccatccggcccagcactgccccccgaagtgtaaccaccaagaaaccacccctggcccagaagcccagcgtggcccccagacaggaccaccagcttgacaaaaaggatggcatctacccagctcaactcgtgaactactaggccccccaggggtccagcagggtggctggtgacaggcctgggcctctgcaactgccctgacaggaccgagaggccttgcccctccacctggtgcccaagcctcccgccccaccgtctggatcaatgtcctcaaggcccctggcccttactgagcctgcagggtcctgggccatgtgggtggtgcttctggatgtgagtctcttatttatctgcagaaggaactttggggtgcagccaggacccggtaggcctgagcctcaactcttcagaaaatagtgtttttaatattcctcttcagaaaatagtgtttttaatattccgagctagagctcttcttcctacgtttgtagtcagcacactgggaaaccgggccagcgtggggctccctgccttctggactcctgaaggtcgtggatggatggaaggcacacagcccgtgccggctgatgggacgagggtcaggcatcctgtctgtggccttctggggcaccgattctaccaggccctccagctgcgtggtctccgcagaccaggctctgtgtgggctagaggaatgtcgcccattactcctcaggcctggccctcgggcctccgtgatgggagccccccaggaggggtcagatgctggaaggggccgctttctggggagtgaggtgagacatagcggcccaggcgctgccttcactcctggagtttccatttccagctggaatctgcagccacccccatttcctgttttccattcccccgttctggccgcgccccactgcccacctgaaggggtggtttccagccctccggagagtgggcttggccctaggccctccagctcagccagaaaaagcccagaaacccaggtgctggaccagggccctcagggaggggaccctgcggctagagtgggctaggccctggctttgcccgtcagatttgaacgaatgtgtgtcccttgagcccaaggagagcggcaggaggggtgggaccaggctgggaggacagagccagcagctgccatgccctcctgctccccccaccccagccctagccctttagcctttcaccctgtgctctggaaaggctaccaaatactggccaaggtcaggaggagcaaaaatgagccagcaccagcgccttggctttgtgttagcatttcctcctgaagtgttctgttggcaataaaatgcactttgactgtttgttgtc

SEQ ID NO: 22345 - DNA, 3221 bp, Homo Sapiens
ggcacgagccgccgcggacttcgctttgggccatgaccagatataattggtgattacaactttcctctataaattaactcttgacactccttgggatttgaagaaaaaaatgcctggtgtcatacctagtgaaagtaatggactttcaagaggtagcccttcaaagaaaaacagactttccttaaagttttttcagaaaaaggaaactaagagagctttggatttcacagattctcaagaaaatgaagaaaaagcttctgaatatagagcatctgaaattgatcaagttgttcctgcagcacagtcttcacctataaactgtgagaagagagaaaacttgttaccatttgtgggactgaataatctcggcaatacttgctatcttaatagtatacttcaggtattatatttttgtcccggttttaaatctggagtaaagcacttatttaatattatttcaaggaagaaagaagctctaaaggatgaagccaatcaaaaagacaagggaaattgcaaagaagattctttggcaagttatgaattgatatgcagtttacagtccttaatcatttcggttgaacagctccaggctagttttctcttaaatccagagaaatatactgatgaacttgccactcagccaaggcgactgcttaacacactgagggaactcaaccctatgtatgaaggatatctacagcatgatgcacaggaagtattacaatgtattttgggaaacattcaagaaacatgccaactcctaaaaaaagaagaagtaaaaaatgtggcagaattacctactaaggtagaagaaatacctcatccgaaagaggaaatgaatggtattaacagcatagagatggacagtatgaggcattctgaagactttaaagagaaactcccaaaaggaaatgggaaaagaaaaagtgacactgaatttggtaacatgaagaaaaaagttaaattatccaaggaacaccagtcattggaagagaaccagagacaaactagatcaaaaagaaaagctacaagtgatacattagagagtcctcctaaaataattcccaagtatatttctgaaaatgagagtccaagaccctcacaaaagaaatcaagagttaaaataaattggttaaagtctgcaactaagcaacccagcattctttctaaattttgtagtctgggaaaaataacaacaaaccaaggagtcaaaggacaatctaaagaaaatgaatgtgatcctgaagaggacttggggaagtgtgaaagtgataacacaactaatggttgtggacttgaatctccaggaaatactgttacacctgtaaatgttaatgaagttaaacccataaacaaaggtgaagaacaaattggttttgagctagtggagaaattatttcaaggtcagctggtattaaggacgcgttgcttggaatgtgaaagtttaacagaaagaagagaagattttcaagacatcagtgtgccagtacaagaagatgagctttccaaagtagaggagagttctgaaatttctccagagccaaaaacagaaatgaagaccctgagatgggcaatttcacaatttgcttcagtagaaaggattgtaggagaagataaatatttctgtgaaaactgccatcattatactgaagctgaacgaagtcttttgtttgacaaaatgcctgaagttataactattcatttgaagtgctttgctgctagtggtttggagtttgattgttatggtggtggactttccaagatcaacactcctttattgacacctcttaaattgtcactagaagaatggagcacaaagccaactaacgacagctatggattatttgcggttgtgatgcatagtggcattacaattagtagtgggcattacactgcttctgttaaagtcactgaccttaacagtttagaactagataaaggaaattttgtggttgaccaaatgtgtgaaataggtaagccagaaccattgaatgaggaggaagcaaggggtgtggttgagaattataatgatgaagaagtgtcaattagagttggtggaaatacacagccaagtaaagttttgaacaaaaaaaatgtagaagctattggacttcttggaggacaaaagagcaaagcagattatgagctatacaacaaagcctctaatcctgataaggttgctagtacagcgtttgctgaaaatagaaattctgagactagtgatactactgggacccatgaatctgatagaaacaaggaatccagtgaccaaacaggcattaatattagtggatttgagaacaaaatttcatacgtagtgcaaagcttaaaggagtatgaggggaagtggttgctttttgatgattctgaagtcaaagttactgaagagaaggactttctgaattctctttccccttctacatctcctacttctactccttacttgctattttataagaaattatagagtgagtgtattttccttgtgtatatattaaacacacccatacaaacattggtaaagttgattacatcaaagaatctttagcttatcttttgaagctactggatattattggtctctctaggtttttatataaatagtgaaatttgaattactgaaaaccatgttaatttttagaactcattttcctcagtagagactagtgatgcattagcttctgggaacaaacttgtatcggttcttaattaaattatccaaaacggaggcatttaaacacttggatttacaccagtcttttgtgtttgctttttaaaataaagtgctcgtatttgtattctccatattttggagtaattatctacatgatgtttatagttcctgtggtttttcacccaagaagcagaatctcattcagtacatttagttttataagagtcatgaagctaaatccttgggctatgtcagaggcacaaagtctagaatgtgtgtattcacaatggtgtatgtacattttgtgccttgattcacttagaagtgtctcagaaaacctggacagttcgcttctacacaagaattttatatgtatttatgaagatgattctgtaccctagtatatctttttgggcatggactaatttgtatctgtttaactcatattctgcacgatctgtatatagtacatcaaacttagaggtgtgaccttaaatttaactttttttaaaaactgggaggtcaataaaatttaaactgcttaact

SEQ ID NO: 22346 - DNA, 4218 bp, Homo Sapiens
cggcggcaccagcaccaccatgtcgcgctcagtgctgcagcccagtcagcagaagctggcggagaagctcaccatcctcaacgaccggggcgtcggcatgctcacccgcctctacaacatcaagaaggcatgtggagaccccaaggcaaaaccatcctatcttatcgacaaaaacctggaatctgctgtgaaattcatagtcagaaaattccctgctgtagaaacccgcaacaacaatcaacagcttgcacaactacagaaagaaaaatcagagattctgaaaaatctggcattatattacttcacatttgtagatgttatggaatttaaggaccatgtttgtgaattgctgaatactattgacgtttgccaagtcttctttgatattactgtaaactttgatttaacaaagaactacttagatttaattataacctatacaacactaatgatactgctgtctcgaattgaagaaaggaaggcaatcattggattatacaactatgcccatgaaatgactcatggagcaagtgacagagaatacccacgccttggccagatgattgtggattatgaaaaccctttaaagaagatgatggaagaatttgtaccccatagcaagtctctttcagatgcactaatttctcttcaaatggtatatcctcgaaggaatctttcagctgaccagtggagaaatgcccagttattgagcctcatcagtgcacctagtacaatgcttaatccagcacagtccgacactatgccttgtgaatacctctctttggatgcaatggaaaagtggattatctttggctttattttgtgccatgggatcctaaatactgacgctacagcactgaacctttggaaactagctcttcaaagtagctcttgcctctctctctttcgggatgaagttttccacattcacaaagctgcagaagacttatttgtaaacatacgaggctataataaacgtattaatgacataagagaatgcaaggaggcagccgtgtcacatgctggttcaatgcacagagaaagacgcaagtttttaagatctgcactgaaggaattggctactgtcctctctgatcaacctggattgctaggtcccaaggcactttttgtttttatggcattatcctttgcccgtgatgaaatcatctggctacttcgtcatgcagataacatgccaaagaagagtgcagacgactttatagataagcacattgctgaattaatattttacatggaagaacttagagcacatgtgaggaaatacggacctgtaatgcagaggtattacgtgcagtacctttctggctttgatgctgttgtcctcaatgaactcgtgcagaatctttctgtttgccctgaagatgaatcaatcatcatgtcctcttttgttaacactatgacttccctaagtgtaaaacaagttgaagatggggaagtatttgatttcagaggaatgagattagattggtttaggttacaggcatatactagtgtctcaaaggcttcacttggccttgcagatcacagagaacttgggaagatgatgaatacaataatttttcatacaaaaatggtagattccttggtggaaatgttggtggaaacatcagatctctccatattttgtttttatagtcgtgcttttgagaagatgtttcaacagtgtttggagttaccctctcaatcaagatactcaattgcatttccactactttgcactcattttatgagttgcacgcatgaactatgtccagaagagcgacatcatattggagatcgcagtctttccttatgtaatatgttcctagatgaaatggccaaacaagctcgaaatctcatcactgatatttgcacagaacagtgtacccttagtgaccagttgctacccaagcattgtgccaaaactatcagtcaagcagtgaataagaaatcaaaaaagcagactggtaagaaaggggaacctgaaagggagaaaccaggtgttgagagcatgaggaaaaacaggctggttgtgaccaaccttgataaattgcacactgcactttctgagttatgcttctctataaattatgtaccaaacatggtggtatgggaacatacctttaccccacgagaatatttgacttctcatctggaaatacgctttaccaagtcaattgttgggatgactatgtataatcaagccacacaggaaattgcaaaaccttcagaacttctaacaagtgtaagagcatacatgaccgtactccagtcaatagaaaactatgtgcagattgatattacaagagtatttaataatgtgcttcttcaacaaacacaacatttagacagtcatggagagccaaccattacaagtctatacacaaattggtatttggaaactttgttacgacaagtcagcaatggccatatagcatattttcctgcaatgaaagcgtttgtgaacttacctacagaaaatgaattaacattcaatgcagaggaatattctgacatatcagaaatgaggtcattatcagaactactaggcccatatggtatgaagtttctaagtgaaagccttatgtggcatatttcatcacaagttgctgaacttaagaaacttgtggtggagaatgttgatgtgttaacacaaatgaggaccagctttgacaaaccagaccagatggctgcactgtttaaaagattatcatctgttgacagtgtcttgaagaggatgacaataattggtgtaattttatccttccgatcattggcacaagaagcacttagagatgtgttatcctaccacattccttttcttgtaagttcaattgaagattttaaggatcacattccaagggaaactgatatgaaggttgcaatgaatgtgtatgagttatcatcagctgccggattaccttgtgagattgatcctgcattggtcgtagctctttcttcacaaaaatcggaaaacattagtccagaagaagagtataaaattgcctgccttctcatggtgtttgtggcagtttctttgccaacactggccagtaatgtgatgtctcagtacagccctgctatagaagggcattgcaacaacatacattgcttggccaaagccatcaaccagattgctgcagctttgtttacaattcacaaaggaagcattgaagaccgtcttaaagaatttctggcgcttgcatcctccagtctactgaaaattggccaggagacagataaaactacaacaagaaatagagaatctgtttatttactgctagatatgattgtacaagaatctccattccttacaatggatcttttggaatcttgttttccttatgtcttgctgagaaatgcataccatgctgtctacaaacaaagtgttacatcttctgcataaaattacctacttaatcaagataagcacgcatttttgttgccttggttttacctgtagactgtggaactattttaccttaagacctgaaaaagttttgtggattataaatttctttcatacggttgtattttctgatcattggtttcttaatatggttgtactacagtatacttggttgatttaggttgcacattcactgaattcactgagattattcctataattttaaagtatcatttatttgaaaaacatacattatcaacatgtttttgatatttgataatgaaaaaaatctttgcttgtttatttctgaaaaagaactgtatttagtgattattttagatagtgatattatagcattcatctgtgtgtaaattatttcatatagggaagagttctgatctgtacctatggttcttattgaaaacaacattggatgtgcatttctgtgatgttatgaatacatttctactttattttgaaacatttgccaaactaaatactgtaacactgtataacatttaaaaatgttaaagaactgcttagtattagaagcagatcatttcccaaaattctaagagcagcagcatatgttgttgcttgtataaagcctagcgataatttttagactaacttccatggtgccctgttggcattagcactaccattgtaccctgctgtataataaacaatcttagacatttatcaactgttgatacaaatgttagtccctaaccactttttatatatgttttaaatttttgaaattcaagtgtaccttccataacataaaataaacactagactgtatc

SEQ ID NO: 22347 - DNA, 11211 bp, Homo Sapiens
cccacgcgtccgaacaaaatgaaagaactagaacttttatgttcaatgaaggaagtctcctttgatgggaatgatcttgaaaacatggtcctatcactgagggagaagttcctacaagaagtgaattctcttattcagaaaccctcacacccactggctaaaacaaagacgttagtgaagagtttaatgaaccgagccgagctgttgctgcatgtcaccatcgcagcccagtcgggcctcacgagaagcatctctgggacccctgctgaaacaccagcttgtaaatcagcttctgaaacaaaagtgatatctcacgctgtcaggcagcctgtttttcttcgcagcatgtcagctccttctgacctggaaatgattggtaatgaagatttggaatttactagagcaaatcagaggcgtcgccacgtgaccagccaccgcagcagctcctttacactcctgcagtcgctggccattgaggacagcagggacaagcccacctacagtgtcctgctagggcagctgtttgctttcatcggcaccaaccctgaccaagctgtgtccagcagcagtttccttttggctgcacagacaaggtggcggcggggaaacactcgcaagcaggcactggtgcacatgcgggaattgctgacagctgccgtacgagtcgggggagtgacgcatcttgtgggtccagtgacgatggtccttcagggaggacccagaattgaagaactcacatgtggtgggatggtcgagcaggtccaggaagcctttggcgagaccatgacctctgttgtgtctctgtgtgctcgttaccctatcgcttgcgcaaatagcattggactcttatgtaccataccttacaccaggagcgaagagaagtgcctggtacgcagtggccttgtgcagctcatggatcgactgtgtagcttgagcaatcagaccgagtccagctccagtgagaaacagaccaagaagcagaaggtggccaccatggcctgggctgccttccaggtgcttgccaaccgctgtgttgagtgggaaaaagaggaaggtggctccacagaggctgtgcactcaggtctggcccggcaggtgtccagccttctcactaaccatcttgcccgagccacagagtgctgtggcaaccaggctgctgggaatgacgcgctccaggatgtccttagtcttctcaatgatctctcaaggagccacataggtaaagccatcctgagccagccagcttgtgtgtccaaactcctctccctgctgcttgaccaacgcccgtctccaaagctagtccttattattctccagctgtgccgggcggcgctgcccctgatgagcgtagaagactgtggaaacgtggagctcccaccctggagctactctgtcccctccttaaacagtgagcaggaggatcccagcgacccagcttccaagatcgcctccctgctcttagcaaagctggcagattatgtggttccaggatgtcagacagttctttctccaaccgcttctgaacctgacaccacattgacaaaaaccagtcccaagaattccttgaaaggagataaagatcctggagaagagagtgaggctgtggatggcaagctctcgatatttatccacaagcgggaagaccagtcatcccatgaagtcctccagccattgctaagtagttcagaaggacggcccttccgacttggtactggcgccaacatggagaaagttgtgaagatggatcgagacatgaccaagggtggctgttgcgaagtgattacagaagaggctgcagccgccctgcggaaagccaccaagtgggcacagtcaggcctcatcgtcagcattgggccacctgtagagtctatcaacccagagactgtgagtggactatccacaggcgacaaaaagaaaactgcccaaacttccatttgccgagagaggaactcggagcttgcaaggactgatcctgtgcgtcccttcatcagtgggcatgtggcaaacagcatggctgcagaagtgatcgccttgctacatagcttgctcatggcacctgaatcaaatgctgctcaaatatggaccacaacagcagagaaggttctgtctagagcactgatgtacattccacaattggggaaatacgcagaaagcattctggaaaatggcagcagcagtggcaggaaacttgccaaacttcagagaattgcacgccaggccgttgccgcactgtgtgcacttggaggcttcaaagagacaatcaagataggatccgaggttcaggttttaggtagaggaatttcaggaagcattggagtagtggcttctatcaatgaacaggaaggtatagctacagtcagattcccacccatagactgtagaaagacttcgcaagcgtcagacacattgactattccattgtctagactttgtgttccaagatcagaggcattgcctcttcataaactgtccattactgagaaggtagtacaggcagtccagtccatgttgcttcctcaggagggaagtctctctattcacacctcacttcctgcaacaggagatgggtcagctcctgtgatggcagtcgttcggctccttgctgaaataaggacaagagcatgcctggtcatggcccagcttttagaagacagcttattttgtgaagaattcatacaacaatgtccagcagctgttgaagttcttaacctagtagcccaggaatgtagtgctggagagcgacttgcagttgtggaggtacagtgtgaacggctgaggatgctctaccgggactgtgctcggcccccaccacctcctttgcaggctgaccgaagacagcccaaagagattacttggagcccctcgcgagtgtttccgcctgttcgagcctgcatgttctcatctcaccttacctcagtcaccttcctggctgaccccagcgctgggggaggcctgccccggggcacttttatctatgccacttcaccactgccagttcaggccccgtctttttactgggaaattgaaatcgtttcctatggagacaccgatgatgacaccggacccatagtttcctttggcttcactacagaagcagagaagcgagatggggcttggactaatccagtgggcacttgtcttttccataacaacggccgagccgtgcactataatggctccagtttgttacagtggaagagcgttcgcttagacgtgactctctcccccggtgacgtggcaggaattggctgggagagaactgaggggactccacctcctccgggacagccagccaagggccgggtgtacttcacatactgcgggcagcgcctctcaccatatcttgaagacgtctctggtggcatgtggccagtggttcacattcagaaaaagaacaccaaaacccgagctaactttggctcccggccgtttgcctacgcggaagggcaggcccaccgcaatgctgctgacctgtgcactgacctagcagaagagatcagcgctaactttgaggccctgcctttcgccatggcatctgacagtgacaatgatgctggcaccagtattgcatcagacccaggcactcatgggccaccatgccggattgctgccgtggccaccgctcagcaacaatatgatagtgacacctcctgtcattataaagtcgagctcagctatgagaatttcatcacctctggcccagaccctcacccgcctcccattgcagatgatgaaagcgatgatgatgacgatgatgacatccctcaggaggaccactacgccctgctggtgaaagcatgggagaccaaggtttttcctaccatccgaagacgcttccgcaatgaagcagagcggaaatcgggcctggaccagataaagggggccttacaactaggtatggtggatattgcccgacagacggttgaatttctctacgaagagaatggtggcatcccaagagacctttatcttcccaccattgaagacattaaagacgaagcaaacaagttcacaattgataaagttcgaaaaggtctcacagtagtaacccgctctccagacagcaataatgtagccagcagtgctgttggaactgctctgccaaaatttgccatccgagggatgctgaaaacctttgggcttcatggagtcgtcttagatgttgattcagtgaatgaactggtgcaggtagaaacgtacctccgcagtgaaggtgtgctggtgcgatactggtatcctattgacatgttggaaaggcccccagcaggctaccgaaggactgccaccaatgggctggtcacactggacaataccaaccttcaaattcacagggagctgctgcgctgcgaggctgcgctggccaggctgtactgccgcatggccctgctcaatatcttcgccccgaagttgcctcacttgttcactcgcctcttccacatccctgccatccgggacattaccctggagcacctgcaactgctgtccaatcagctcctcgcacctcctctcccagacggcaccatcagctccagctcgatcctcctggcgcagtctttacagcattgcatccattcccagaactgctccgccacggacctcttttaccagggcaactcccagacagtgagagagtggctcaacgtggccatcacccggaccctgcaccagggcgaggagagccttttagagctgacgaaacagatctgctctttcctgcagacagcaccagagcagttcccctccgaagagttcccaatttccgaatccaaagtcaacatggacgtgaatttccccggggcagcttttgttgttgtgtcttgtaaagaaagtcaatctggattccgcaaagactcctctctgtacaaggcaccgtgggcacgggtgctcgtatatggcctcggccacaaagtgaagcgaaatggccagctgaacctcatcgaggccgcctgttacccgcgggacgcgtccccagccaacactgggcttgcacctccccccaccgctgaccagtacccctctgtggtcctctccacagacagggtccacatcaaactgggggtgtctccacctcctggagcagtcctggtgttacattccctgcccctggagttcccactggctatggccttcgcagagcagctgctgtcctggaaatcagaggacagtgaagggaagtccgaagatgagcctgacaccattccgacatccgtcctcctgcaggtggtggagctgctaggaaacttcttgtggaccacggacatggcagcctgcgtgaaggagcttgttttccatctcctggcagagctcctgcgcacggtgcacaccctggagcagaggcggcaccccgctggcctgtcctcctcaatcgccctccagctgaacccctgcctggccatgctgatggccttgcagtcggagctccacaagctgtacgacgaggagacgcagaactgggtctcaggcggcgcctgcgggggctccgggggggcggcggccggtgaccagggcaggttctctacgtattttcatgcactcatggaagggtgcctggctgtggccgaagtgaccctgcctactaacatgagtgtcacagccagtggggtgacctcagcgaccgccccaaatctcagtgactcgtcctcctcctcctcgtcctccccaggacagaccccacagagtcccagcctcctctccaagaggaaaaaagtcaagatgaagcgggaaaaggcctcctcgtcgggcaagcgccagtcttcccgcaccgtggactcggaccccaccgtgctcagcatcggaggcagcaagcccgaggacatgctgtggttccaccgcgcactcaccctgctcatcatcctccgccacctcaccaggaaggacccacaggggctgggcgtgacgagtgacgccatcgccgatgcctgccaggccctggtgggccccaccgcccacagccgcttgctggtgatctccgggatccccacccacctggacgagggcgtagtcagaggcgccatccgcaaggcctgcaacgcccacggcggggtcttcaaagacgagatctacatcccgctgcaggaagaagacaccaagaagccaaaagacaaggccgagggcggggacgggaaagttgagcccgagaagacactggccttccccggcacagacagcatggaggtcagcacgtccagcagcctgacccccgccatgagcatcagcgcctccgcctccaccagccaggcctccatctgcagctcgcagggcatctcccaaaccgtcagcgacctctctgtggatccgctgcctgccggcctcgagctgcccatccctccgggcctgttggagccccacgcggtgtccagccaggaaagcctggacatttccctgtgcagcaccggcagcctgggcagcctgggcagcctgggggagcccctggacaatgcagagacggcctcggtgtcggacatgggctccatgtacacagtcacttccctggacaaccagcccctcgccgcccgccccatcaaaggcttcgcagtcgtggagataagatcccgagccaaaattgagaaaattcgagcaagtttatttaacaataatgacttgattggtttgtcaagtttggatggtgaagatgaattgatggaaatgtcaacagaagagattctaaccgtgtctgtagtaaatcagagtctctttgatactcaagggagcccagggttagaagattatttcaatgataagtcaattaaaggggagaagctggtgcccggagccagagaggttctgacggagatatttaagagttgtgcccattcagagcagacgctgagcctgacaccagcgaagcccatcagagtctctgacatttatcttagcaaagagcagatcaactcccagaccccaggcaacctcctccacctcttcttcaccaatgtccggccgccaaaaaaggtgctggaggatcagctcacccagatcctgaggaagtatggcgtgccaaagcccaagtttgacaagagcaagtacagcaaggccgggaaggagcagcaccccgtgaaggtggtgagcaccaagcggcctatcaccaagccgcccgccaaggacaaggctgtgctcaacagcgtcagcaggactgccttaagtgagaagaagccaactgtgaagccaaaatcaccagaaaagagcaaaccagatgaaaaggacccagaaaagtcacctaccaaaaaacaagaagtccctgaggaaaaatacctgacgctggaaggatttcacaaatttgttattgaccgagccaggcaagatatccgtagcgtctggagggcgatcttgtcctgtggttacgatcttcactttgagaggtgcgcatgcatcgatgtccgacatgcacagaaggcctcaagaaagtggaccctggagatggacgtggcacttgtgcagtacatcaaccagctatgccgccacctcgccatcacacccgcacggctccatccccatgaggtgtacctggaccccgcggatgctgctgaccccagagtggcctgtctcctgaacgtgcccatcgagagcctgcgcctgcgcttcgccttgctgcagtccctcaacaccacactggagaccttcttcctgcccctggtggagctgcgccagacacccatgtatacccacagcatcgccgccctgctgaaggaggccaaagggctgatcttctatgacacgaaggtgaccgtgatgaatcgagtgctgaatgccactgtgcagaggacagcggaccacgcggcccctgagatcaccttggacccactggaaattgtgggaggggaaatcagagcttctgaaaactcctacttctgtcaggctgccaggcagctggcctcagtgccgtcgtctcagctctgcgtcaagctggccagtggcggtgaccccacatatgccttcaacatccgcttcactggcgaggaggtccatggcaccagcggctctttccgccacttcctgtggcaggtgtgtaaggagctgcagagttcctcgctgtcgctgctgctgctgtgccccagctcagctgtcaataagaacaagggcaagtatatcctgaccccgagccccatcacctacggggaggagcagctgctgcacttcctggggcagctgctggggattgcaattcgggcagacgtcccgctgcccctggacctcctgccctccttctggaagacgctggtgggcgagcccttggaccctgagcaagacctgcaggaagcggatatcctcacctacaattacgtcaagaagtttgagagcatcaatgatgagaccgagctggaggccctgtgcgctgagatcgcctcccagcacctggccacggagagccctgacagccccaacaagccctgctgcaggttcacctacctgaccatgacgggcgaggaggtggagctgtgcagccggggccggcacatccttgtggcgtgggagaacaaggacatctacgcggcagccatccggagcctgcggctgcgggagctgcagaatgtggagtgcgtgacggccgtgcgggccggcctgggctccatcatccccctgcagctgctgaccatgctcagcccactggagatggagctgcgcacctgcggcctcccctacatcaacctcgagttcctcaaggcccacaccatgtaccaagtggggctgatggagacggaccagcacatcgagttcttctggggggccctggagatgttcacccaggaggagctgtgcaagttcatcaagtttgcctgcaaccaggagcgcatcccgttcacctgcccctgcaaagatgggggtcccgacactgcccatgtgcccccgtaccccatgaagatcgcccccccagatggcacagcaggttccccagactctcgctacatccgcgtggagacctgcatgttcatgatcaagcttccccagtactcctctctggaaatcatgctggagaaacttcgttgtgccattcactaccgtgaagaccccctcagtggctgatgggagggagccccagaattaggctgtcactgaggcacccactctgctggcttgggaagccaccactgcggcccgtccctccagggccctgcgtgaggagttggcaacattttgcttttccaaactttcgtccacattccagggcctcctggaagacttaaccttttgtctttgtacgtttcgtgatgggttggttcttttgctgcctgtttgtggtctatttgtaggatagtttagttcccagacagtttgtgtctaatttgatcttcttggacattgtccctcatggccaccagattctaatgccataaggccccagctggttccccatcacagaaccacccagcaggaagccgggggtacaatgacctcggccacacagagcgctcgtgctttcagcagagcgcctccacagacaagcctgtggccagccctgccctccagcctcgagctggagttgctccagaggcagccccagcaggcctccctccacatagaggtggctgggccaattgcccaaacacgtgagacacacagggagctttatgtgttcatcttcctgctttagaacttgctcccggtcttggtttttctgaggaaaagcccacagtggttcccctgcccctcccatacctccctatctgccgtctgtctctttgggccctggtctgacagttttcatctgaggcctcctcgggagcaggagacttaagggttcatcccgaccttagttcacagagcctagctgggtgcatcccagccgcagggggtgagaagacacccagagatgggggacaatgctcaggtgggggcctcctccgagactctggttgagaggaaagcacatgattcaagcctaccccacaaaaaaggagcacaaaatgctcagaaatggcccttcctccctgcagtgacgtaggacaagggaaagggccacacccattttcaaaagagtggactgaggtgctctgctcaatttggggtctgctttagtgacccagacactcaagtccagatggagactccaggggggtccttctgcccctctggccagccccacccagcactccccatcaccccatgtaagtgtgtatgccagggctgagctgcctccaggctcacccactgcatctttgccccaaataggtctttgtccagtggtactttgttcatgagcagcacaggccatcttgttggacactgtcactttgggccttgccaggtctcacagaatcacatcgctgtatttattgtataatattgtgaatattggaagttttgagtgagtgctgtctagaaggttttggagtgtggatgctggtccaagaaagaagatgtgccctggcctgctggaaagattgtgaattctagagatagagccgttagcatccatctcctccctgtaactcttaggaaatgcatcaaggaccattatagaaaggatcccctgacctaaggatgaaatcgacctagggttaatcatgacagctgcatcagttgtattggatgcaagtcaactctggaggtgagtgcccgcaagcagttcccctgctttgaaagaagatggtcagcccgctgcctccccagcggccacagctcctttgagtgtggggggtcacagccaggatgtattcctgacaataaggatccttttattttcatttctgcataatgaaagagcctttcgatttattagaagtggtttttcctccctacatctttaaattcttggttctctttagtcctcatcccttgaatggacttgtcagctacctccccaggaggagttcagaagcttctgttggccatcacttgagtagatgacaagctgtaaggtatctgctgctaacgtggctgcttctccgagagcacattgaggtccagacagatccaaaccttggccctaaaaaatgtgtgctgtaaagttacttgatgtatatttattataattatttatggttgcatttaacaaacttttcattcaatctgatgctatttacaccatgctgtgtaaaggaagctcactaaaggaaaaaagtcacaccaataaataaccttcatctaattttgatttaccttaagagttgtgtgatcatctactcttgctgagcaagttcaaaggctggcatgcttggatggctctgatatttaagtgctgccaagtggctaggaattaaagtgtttctaatt

SEQ ID NO: 22348 - DNA, 10737 bp, Homo Sapiens
ccattgacttcctaaagcgctatgcttccaacactccgtccggtgaatttcaaacagccgacgaagacctctgctactgcttggagtgtgtggctgagtaccacaaagcaagagatgaattgccattcttgcatgaggttttatgggaattagaaaccttacgtctcataaatcactttgaaaaatccatgaaggcagaaattggagatgatgatgagttatatatagtagacaataatggagagatgccactgtttgacatcactgggcaagactttgaaaataagcttcgagttcctcttcttgaaatactgaaatatccttacttgcttctacatgaacgtgttaacgagttatgtgttgaagcactttgtcggatggaacaagccaattgctcctttcaggtgtttgataaacatccagggatctatttgtttttagtccatcccaatgaaatggttcggcgttgggctatcttgactgcaagaaacttggggaaagtggacagagatgattattatgacttacaagaagttttactttgcctttttaaagtcattgagttggggcttttagagagtccagacatttatacttcttctgtcctagagaagggtaaactgattcttctgccctcacacatgtatgatactaccaactacaaaagctattggttaggtatttgcatgttgctgaccattcttgaggaacaagccatggattccctgttgttgggctcagacaaacaaaatgattttatgcaatcgatacttcacactatggagagggaagcagatgatgatagtgtggatcctttctggccagcgttacactgttttatggtgattctggatcgccttggatctaaggtctggggtcaacttatggatcctattgtggcatttcaaaccattatcaacaacgcaagctacaatagagagatccgacatatacggaacagctctgtaaggaccaagttagaaccggagtcctatttggatgatatggtgacttgcagccagatcgtatacaattacaatcctgaaaagaccaaaaaggattctggatggagaacagccatttgcccagattattgtcctaacatgtatgaagaaatggaaacattagccagtgtacttcagtcagatattggtcaagacatgcgtgttcataacagcacatttctatggttcatcccttttgtccagtccctcatggatcttaaggatttgggtgtggcttacatagcacaggttgttaatcatctgtactctgaagtcaaagaagtcctcaaccaaacagatgctgtgtgtgacaaagtcactgaattttttcttctaattttggtatcagtgattgaactgcatagaaataaaaaatgtttgcatttgctgtgggtaagttcccagcaatgggtggaagccgtcgtcaaatgtgccaagcttcctaccactgcgtttacacggagttctgagaaatcatctggaaattgctccaaaggaacagcaatgatatcttcactgtcattgcattccatgccatctaactctgtacaacttgcttatgtgcagctgattagaagtctccttaaagaaggttatcagcttgggcagcagtctctttgcaagcgattctgggataagctcaacttattccttagaggaaatttatctctaggttggcagttgactagtcaggaaacccatgagctacaaagttgcttaaagcaaattattagaaacataaaattcaaagcacctccatgtaacacttttgtggatctgacttctgcatgtaaaatctctcctgcatcttataataaagaagaaagtgaacaaatggggaagacgtctagaaaagatatgcattgtttggaagcttccagcccaacattttctaaagaaccaatgaaagtgcaagacagtgtattgatcaaagcagataacactatagaaggtgacaataatgagcaaaattatataaaggatgtgaaactagaggaccatctcttagctgggtcatgcttaaagcagagtagtaaaaacatttttactgaaagagctgaagatcaaattaaaataagtacaaggaagcagaagtctgtaaaagagatctcttcatatacaccaaaggactgtacttcaagaaatggtccagaaaggggatgtgacagaggaataatagtatcaacacgtttgttgactgattctagcactgatgctttggaaaaagtgtccacatcgaatgaagatttctctttaaaggatgatgctcttgctaaaacctcaaaacgaaaaactaaggtacagaaagatgaaatctgtgcaaagttatcacatgtaataaagaagcaacacaggaagagtactttggtcgataatactatcaatttagatgaaaatttgactgtatctaacattgagagtttctattcaaggaaagatacaggagttcagaaaggagatggtttcatacacaatctttctttagaccctagtggtgttctggatgataagaatggagaacaaaaatctcaaaacaatgtattgccaaaagagaaacaattaaagaatgaagaattagttattttctctttccatgaaaacaattgtaaaatacaggaatttcatgttgatggtaaaggattgatcccttttacagaaatgaccaatgcttcagagaagaaatcatctccctttaaagatcttatgactgtacctgaatcaagagatgaggagatgagtaatagtaccagtgtgatttattctaacttgacaagagaacaggcccctgacatcagtcctaaatctgacaccttaacggattctcagatagacagagaccttcacaaattatctttactagctcaagccagtgttattacgttcccatccgattcacctcagaactcatcgcagctgcaaaggaaagtaaaagaagataaaagatgtttcacagctaaccaaaataatgttggagatacctcccgtggacaggttattattatttcagattctgatgatgatgatgatgaaagaatcctgagtcttgagaaactcactaaacaggacaaaatatgccttgagagggaacatccagagcagcatgtttcaacagttaatagtaaggaggaaaagaatccagtaaaggaagaaaagacagagactctttttcagtttgaggaatctgattctcagtgttttgagtttgaaagttcatctgaagtgttttcagtttggcaagatcatccagacgataataattcagttcaagatggtgagaaaaaatgtttggctcctatagccaatactacaaatggtcagggttgtacagattatgtatctgaagttgttaaaaaaggagcagagggcattgaagaacacacaagaccacggagtatttctgttgaagaattttgtgaaattgaagtaaaaaagcctaagagaaaacgatctgaaaaaccaatggctgaagatcctgtgaggccttcatcttctgtcagaaatgagggccagtctgatactaataagagagatcttgtgggaaatgattttaaaagtattgatagaaggacttcaactcccaattcacgtattcagagagccactacggtttcacaaaagaagtcttcaaagctttgtacttgtacagaacccatcaggaaagttccagtttctaagacccctaagaaaactcattcagatgccaaaaaaggacagaatagaagttcaaattacctaagttgtagaacaactcctgctatagtgccgccaaagaaatttcgtgagtgtcctgagccaacttcaacagctgagaaacttggcctgaaaaagggtcctcgtaaggcatatgagttgtcccagcggtctttggattatgtagctcaattacgtgatcatggcaaaactgttggagtagttgatacccgaaaaaagactaaattaatttctcctcagaacctgtctgtcagaaataataagaaacttctgactagtcaagaacttcagatgcaaaggcagatcagacccaaatcacaaaaaaatagacgaagactttctgattgtgaaagtacagatgttaaaagagcagggtcacatacagcacagaattctgacatatttgtaccagaatctgataggtcagattataattgtacaggaggaactgaggtacttgccaacagtaacagaaaacagttaataaaatgcatgccttctgaaccagaaaccataaaagcaaaacatgggtctccagcaactgatgatgcttgccctttgaaccagtgtgattctgtagtgttaaatggaacagtaccaacaaatgaagtaattgtctccacttcagaagaccctctgggtggaggtgatccaacagcacgtcatatagagatggcagctttgaaagaaggagagcctgactccagcagtgatgcagaggaagataacttatttttaacccaaaatgatcctgaagatatggatttatgttcacaaatggagaatgacaattataaactcattgaactaattcatggaaaagatacagttgaggttgaagaagattctgtaagtcggcctcagttggaatctttgagtggcacaaagtgtaagtacaaagattgtcttgaaaccacaaaaaaccagggtgaatactgcccaaaacactctgaagtgaaagcagcagatgaagatgtatttcgtaaacctggcttgcctcctcctgcatctaaacctttgagacctaccactaagatttttagctcaaagagtacttcacgaattgctggtctttctaaatctttggaaacttcttcagcactttcaccgtctctaaaaaataagtcaaaggggatacagtcgattttgaaagtaccacagccagttcccctcatagctcagaagccagttggtgaaatgaagaattcgtgcaatgttcttcatcctcagtctccgaataattccaacaggcaaggttgcaaagttccatttggtgaaagcaaatattttccatcttcctctccagtaaacattcttttgtcatcacagtctgtctctgacaccttcgttaaagaggtcttaaaatggaaatatgaaatgtttttgaactttggtcagtgtgggccccctgcaagtctttgtcagtccatctcaagacctgtgcctgtcagatttcacaattatggagattattttaatgtttttttccctttgatggtattgaatacttttgaaacagtggcacaagaatggctcaactctccaaatagagagaatttctatcagttgcaagtacgaaaatttcctgccgattatataaaatactgggagtttgcagtttatctggaagaatgtgaactggctaaacagctttatccaaaggaaaacgatttggtgtttttagctcctgagagaataaatgaagagaagaaagatacagagagaaatgacatacaagatctccacgaatatcattctggttatgttcataaatttcgccgcacgtcagtcatgcgtaatgggaaaactgagtgttacctttccatccagactcaagagaactttccggccaatttaaacgaacttgtgaattgtattgtaatcagttctctggtaactacacaaaggaagttgaaagccatgtctctgttgggtagtcggaaccaactggctagagctgttctgaatccaaaccctatggacttctgtacaaaagatttactgactacaacatctgagagaattattgcgtacttaagagatttcaatgaagatcaaaagaaagcaatagaaactgcatatgctatggtgaaacactcaccatcagttgccaaaatctgcttgattcatggaccacctggaacaggaaaatcaaaaactattgttggcctcctctatcgtctactgacagagaaccagaggaaggggcattcagacgaaaactccaatgccaaaatcaaacaaaaccgtgtcctcgtgtgtgcaccttccaatgcagctgttgatgaactcatgaaaaaaattatccttgaattcaaagaaaaatgtaaagacaagaagaatcctttaggaaactgtggagatataaatttagtacgactgggtccagaaaagtctattaatagtgaggttctaaagttcagtttggacagccaagtaaaccacagaatgaaaaaagagttaccttctcatgttcaggcgatgcataaaagaaaggaatttctagattatcagctggatgagctttcccggcagcgagctctatgccgaggtggacgggaaatacagaggcaagaattagatgaaaacatttccaaagtttctaaggaaaggcaggaacttgcttctaaaattaaagaggttcaaggacgcccacagaaaacacagagtatcatcatcttagagtcccatatcatctgctgcacgttgagcacaagtggtggtttactacttgagtctgctttccgtgggcaagggggtgtccccttcagctgtgtcattgttgatgaggctggacagtcttgtgaaattgagactcttactccactcatccatcgctgcaataagctcatcctagtaggagatcctaagcagctccctccgacagtcatctctatgaaagcacaggagtatggctacgaccagtcaatgatggctcgcttctgcagactgctggaagagaatgtagaacacaacatgatcagcaggctgcccattctacagctcactgttcagtacaggatgcatccagacatatgcctcttcccttctaattatgtttataacagaaacttaaaaacaaatagacagacagaagccattcgatgttcatcagattggccatttcagccataccttgtgtttgatgttggagatggttcagaaagacgggataatgactcatatataaatgttcaagaaataaaactggtgatggaaataattaagcttattaaagacaaaagaaaggatgttagttttcgaaacattggcataataactcattacaaggcccagaagacgatgattcagaaggatttggacaaagagttcgatagaaaaggaccagcagaagtagacactgtggatgcattccagggtcggcagaaggattgtgttattgttacgtgtgtcagagcaaatagcatccaaggttcaattggattcctggcaagtttgcagagattgaatgtcaccatcacacgagccaagtacagcctcttcatcctcggacatttgaggaccctgatggaaaaccagcattggaatcagctgattcaggatgctcagaagcgtggtgccattattaagacctgtgacaaaaactatagacatgatgcagtgaagattctgaaactcaagcctgtgctgcagagaagtctcactcaccctcctaccatagccccagaggggtccagaccccagggtggtttgcccagcagcaagctagacagtggatttgccaagacatctgttgctgcttctctataccacacaccctctgactccaaggaaattactcttactgttacttcaaaggaccctgaaagacctcctgttcatgaccaacttcaggacccacgactgctgaagaggatgggcattgaggtcaaaggaggaatattcctttgggatccacaaccctcgagcccccagcatcctggagcaacacctcctacgggcgagccgggcttccctgtcgttcaccaggacctgagccatatacagcagcccgctgctgtagtggctgctctgagcagccacaaacctcccgtgcggggcgaacctccagctgccagtcccgaggcttccacgtgtcagagcaaatgtgatgacccggaagaggagctctgtcacaggagagaggccagggctttcagtgaaggggagcaggagaagtgtggttccgagacccatcacaccaggaggaactctaggtgggacaagaggacactggagcaggaggacagcagttccaagaaaagaaagcttttataggaaagcccagtgacatgggccagcagccacagcatattgtaaactgaagatgaccagctcgtgggaccatctagataagcttgttttttgtaaggagtttgtgtgctgttggaaaacatggaaaatgcatccttaacacctgagcctctggtcatcttcagtattttctgtcatttgcaaaagctttcagagggcattgtgtatccgtaataatgtccttgaagtcagagactggaaatgttgatctcttagtcttctatagacaaggaggtcagactggagtgaatgttgtaaaagttgaaatgtatatttgtatagcaaataacaaaatccttttaaaatttaatctagtagaccgcttttctttccccctgtttaaaatgttaatcagttttcaacagaacaaactttatattaccaaaaaaaaaaagatgggaggagggcgggtcctttcaaccattgttagagcaagacagataattatttaacagcctagcttggaataagctgagttagtgctggtgggtcaggtgtctctggctctattaaaaaaagcaaaaacccccccaaaaacctggagtctcctaggggacactttgggcagcacggttatgttaggtaaagtcttgctgacatggtgcatttttagatagagtgcattggcccagggtattatatttctgtgatgagttcatttacctgtttcagtatgcacatagttccctagctaaaattcctaatcttcttgagagagaagaatatggagtgaaagaataattcttgagctatcattcaaatgctcccagcatattgtgagccttgtgtgactggtgaggtacagacatttggttgccaaatgctagattagcgctgggtcagctgtggaagaatcgcctcagcttacagattgtcagacagatctaactagttttccagaaagcctgggaagctgtgtgttcaacatttcccaagggattctgatcaccaggcagcttgggaaccactggggcaggccaaatagaatattttgggcgggaaagaagcacccgatttaaaatgaagcgtaaccagaggagttcagaactgggaagagagtggtagacttcctgtgatcttcagaaatcatctacctggtaaaaatacatgctgtttagaatatctgataggtgtttccagctactattagaggtgatagtgcttttgtgggggaaaaaattggtcatggtgaatggagatcgaggaagctcgggacaagggaggggtgggctgcctgattttgtccagttttccaaatatccacgcagtgaactggagtatcctaaacatgagaatgtacagttgacagttgtaaaaactagggatctgtagtgaatgctgtgcagccccatatctcatttgggggtaggaaaatagctgaagattcatgtgcattatttgacatttcctttgtcatctgctttttaagcaaaaaagggttttgtgttagaaattctacttgagcagattataaagagctttaaaaaacaactttcggttgccaaaagtttgagcatttgatttcattacctgtgtctccctcactggtgtccagacggtcaactgaatactcctgaaacccagggagcaggtgacttcctggagtgctttgtccccagagtcagccactgcttcctctgtgggggtggagagtttgtctttggccatgcagtgtgcgacagttcaggacgggtagggatgggtcccattctgtctgggtcaagggctctatcagcttcttccatgtgcctttgggaagaaatctcgttactttaagtttgctttcctgttatcttgatgaagtgcccattttagcagacacttgtagtgctgaccacttagggaatgtacaaactcctaagcttctaaagggaggcatggcaaaaacgttggggtcaggatgtctctcacgctgctcatgttaatactattaacacatgatttgagaaataagttttctctaaaatgcatattttgccgccacacactgaacaatattatttccagtgaagtttgatgcctgttcttacgttgtgttcacctgttggttcaccactcagcagatctgattctgcaagaattaatggtagaactagatcatcctttctaacagacgagcctgtgtcctgtgacggcctttcacagcggaatgcagttgtacctcacattacttttgaaacttcactcgttccagttggtacaagtatttgccaaagccatttcctatgttcaccgtggcccctcctgatgtggctgtcagcgcagcgttgttgaacagggctattctttttacaaggtgtgaagtgtggctcttcgcttcgtctttgccatggcattaaaagaaagttccctgtcttctttcaatattagttatttcaaatgaatatgtgctacttaaaagcttgttttgtttctttgtatataatttgccttggatttattgtgcacagtttgttgagttgtatgtttttgtgaattatcaggagtaaatttgacaagtacatgtgaataacctcctgtaaatgaattttataacaaaaatgtactgaactattttttaaagttgtgcagattagcaattttttgctatagctttgacttttctatgctgtgaattaatagctgcgatttggcaaacagccctgttgtctttgttaaaccctaaattttaagaggaaatggcagaattaaaagcagaaacaagaag

SEQ ID NO: 22349 - DNA, 4737 bp, Homo Sapiens
gtcccagcgtcgctccggacgctgccaacctgttctccaccgtcgctcgacttccacctctaagactcccacgaaactcaggttgaataattcatcaaattacacaactgaactcaagacatggctgcccagtgtgtcacaaaggtggcgctgaatgtttcctgtgccaatcttttggataaagatatagggtcaaagtcagaccctttatgtgtgttgtttttgaatacaagtggtcaacagtggtatgaggttgagcgcacagaaaggattaagaattgcttgaatccccaattttccaagacatttattattgattactactttgaagtggttcagaaattgaaatttggggtttatgacatcgacaacaaaactattgagctgagtgatgatgacttcttaggggaatgtgaatgtacccttggacaaattgtttccagcaagaagctaactcgaccactggtgatgaaaactggcagacctgcaggaaaagggagcattacgatttcagctgaagaaataaaagataatagagtggtcttgtttgaaatggaagccagaaaactggataataaggatctatttggaaagtcagacccatacctggaattccacaagcagacatctgatggaaactggctaatggttcatcggacagaggttgttaaaaacaacttgaatcctgtttggaggcctttcaagatctctcttaactcactgtgttacggagatatggacaaaaccattaaggtggagtgttatgattatgacaatgatgggtcacatgatctcattggaacatttcagaccaccatgacaaaactgaaagaagcctccagaagctcacctgttgaatttgaatgcataaatgagaaaaaaaggcaaaagaaaaaaagctacaagaattcaggtgttatcagtgtgaaacagtgtgagattacagtagaatgcacattccttgactatataatgggaggatgtcagctgaattttactgtgggagtggacttcactggctccaatggtgacccaaggtctccagactcccttcattacatcagccccaatggcgttaatgagtatttgactgctctctggtctgtgggactggtcattcaagattatgatgctgataagatgtttccagcttttggttttggcgctcagatacctcctcagtggcaggtatcacatgaatttccaatgaacttcaacccatccaatccctactgcaatggaatccaaggcattgtagaggcgtatcggtcttgtcttcctcagataaaactctatggaccaactaatttttctccaatcataaatcacgtggccaggtttgctgctgcagccacgcaacagcagacagcttctcaatattttgtgcttttgattattactgatggtgtgatcacagaccttgatgaaaccagacaagctatagttaatgcctccaggctgcctatgtccatcataattgttggagttggaggtgctgacttcagcgccatggagtttctggatggtgatggtggaagtctccgctccccattgggcgaagtggccatcagagatattgtccagtttgtgcctttcagacagttccagaatgctccaaaagaagcacttgctcagtgtgtcttggcagagattccccagcaggtggtgggctacttcaatacatacaaactccttcctcccaagaacccagccacgaaacaacagaagcagtgaccacttcaacagaattcttttgtgttatgtggagcaatgccatctctcaccccaaatcgtgtatctgtcattctacgtactttttacccccagcatttatgatgtaaatctctttctctatggattatatctgtttaaagcattctttctaggttattttggggggacagtgccaagtccatctttgcccagtcaattcagtgattgatagcaatttacattaattgcagtaaagctctttggattagaaattagtgtggggaaagcttattctgttgttgtttttgtttactttcatatgatgaaaatgctgtgtttaagtgtttgtcaataggaagaatggaaaactgttgggatgatgtggtttgcaggttgctgtgcctgattcacagtgtatgttgtataagccaatgtccatacctgattatgagagcttcttaaattatatgatatcaaatttgttcctgtaactctgtatacagtgcttttctgcaaggtaaaaataacctgtctatgcatctgatttttgctacagtttagacactgtggtttacaaaacagcatgcactcaacttgggactttatgaaaagtactgaatgagcaggaaaaggcgcatactcagttttttaaatgtacaatcaacaagtaaaaataacctcatgtaagtaagccatttttatttgcctttctagatattttattttattgtggaaaactgtaaacatggtcagatttggctttttttttcattaactgagcaagactttcaggatattgtagatgcacagatggtaggttgtcctgaattctacattattagattactttaattgagatttgttaaaacggttaggactgttttgtccaggaaagataagaggaccaaacatataaggtgaaattcagaattccgtttccttctaactaatgaaaaactgcttactaaaaaaaaattttatactttccttgctaaggtcccatatattgatttgtacagatccacttagtcattttctcctttttttaagaaccattttcatctgatttttaaactcacgataccagttatctgttaatcaaaattgcattttacaatttaataatgtgatatttcctatgtctacagcataccttattaggtataaaacctactgcaacttagaaaaaggaaagaaaaaagaagacttttccaactgctgcattaagatagggtggattttatgtgctttttttttttaagagttgaatttcttttcctgacttttaccttttacagcgtattacttagtgaacattacattttcagaatagatcctaatattttattgagggcctatgtgctaaaaactatgcatatctatatattggccaattatctttaataatttaccttttgaaattgcatgtttatcatatatccttaagtggacacatacagtgccatgttgatgtgcctctcagttttattgaaaagctgccccacagcccatgtctcttgttctctgcaatgcctcaagggagtgagctctcaaccacagatagctgtggcttctcagaagcagctcattgccaaggccaggctgagaggggacctgcttgctgtggtggttgcctagcccagatgagcatttacctaccaccttcccacttggctagctgtcctttggatatgtgctgttaactggggaaggcatctaactagtagcctgctactccatagtatggctcaatagatgacacatcattttgacattatcaataggagaaaagaaaactaacccttcttctgattgtttggagccatagttgtctcagatgttctaattctctttgtatgcttggaaacagcatagatatgttgctgtggttttcagaattttctcttttaatcacaagaagccttttaaaaaatgacttacacatattctcaatgtacagtaaaacagacagaagtgagcttatctgtttgatgctgtggcagggtcccagtcactgggcatatcctccttctccttaaccagcttctcagcagcccctgagtcacctgcacaaggtgcttgggaactgctggttatgagcattcctggttttcttcagccaaataacaggtaatcactgtcaattggatttggtcttcattattttatattctgattttatcagaattattctattttaaaattgttttaaaatttaaaaacatttaattcatgatcatgttcatcagtagatgctattattcataagaactgtgattccagcaaactagggtaattggtgcctttttacagttttgaataaaagcatttacaatttctaaattatcagttttcacagtttcagcactcaacctcatcatacgctgatttaatattgttttacattaaaatagtccttttccctgttgtgccaccattcatttaagtgctgtttgttcttaaaatgcatttaaagaaaaattacccatattgactttcacacctcatataatcagatctattacaaatatatatcggagtgacggtgcccaggatagatgtaatatttcttacagatgctggcacagaggaaataatataccagctaatctagtcacctaaccttgtggttagaattgcaattttaagaccagaaaaatttgaagtctgatcagagatttacaactgttcattatagtggtgccttaggcaatctttccaaagtaaattcagggccccattgctacttatgccatatttggacatactttttttttcttcaattttgtaaacttcctggaaagctgtcttcactaagtatcccctagtctctatatatgtggttagtagtcatggaaatgacacataaagtacgccagaagtttgatggaacgtgttagaaactgttttgtgcttttatggatgtcatacttgacaatacatgtgtaagttactaatatatgaattgatgctaaatatatcttacatttgaattccttttggataaagttatttcttgatgtg

SEQ ID NO: 22350 - DNA, 5937 bp, Homo Sapiens
ggctgaggactgactggggttctgagactccctgtcccggaccgcagattatagtgggaccagtctcattaggttgaatctacagcctatgttggtgttaacccaggtctcttagagcgttaaaaggatctgaacaaagtctgctcaaatctcctgctgtgaaccagcagaatttttgaacaggtttcttcacatataaaaatctattgtaaaaatacggaacagaatggcagcggaaacgcagacactgaactttgggcctgaatggctccgagctctgtccagtggtgggagtattacatcccctcctctttctccagcattgccgaagtataaattagcagattatcgttacggcagagaagaaatgttagcacttttccttaaagacaacaagataccttcagaccttctggataaagaatttctgcctatcctccaggaggaaccccttccaccattggctctggtaccctttacagaagaagaacagagaaacttttccatgtctgtaaatagtgctgctgtcctgcgattgacaggacgaggaggaggaggaacagtggtgggggctcctagaggtcgaagttcttcaagagggcgaggcagaggcagaggtgaatgtggtttctaccaaagaagttttgatgaagtagagggtgtttttggtcgaggaggtggcagagaaatgcatagatcgcagagctgggaggaaaggggtgacagacgttttgaaaaaccaggacgaaaagatgtaggaaagaagaatggatattattgcatgtactcaccagttcttttgctgggtcagcctttatgccaagggagaccaaattttgaggaaggtggaccaacatcagtagggagaaagcatgaatttatacgctcagaaagtgaaaattggcgcatctttagagaggaacaaaatggagaagatgaagatggaggttggcgactagctggatcaaggagggatggagagaggtggcgacctcacagtcctgatggccctcgttctgcaggctggcgggaacacatggaacgacgtcggaggtttgagtttgattttcgagatagagatgatgaacggggttaccgaagggttcgctctggcagtgggagcatagatgatgacagggatagcttgcccgaatggtgcttagaggatgctgaagaagaaatgggtacatttgactcatctggagcattcctttctctaaaaaaagtacagaaagagcctattccagaagagcaggagatggacttccggcctgtggacgaaggggaggagtgctctgactctgagggtagccataatgaagaggccaaagaacccgataagacaaataagaaagaaggagagaaaacagatagagtaggagttgctagtgaggaaactccccagacctcatcatcatctgctagaccaggtactccttcagaccatcagtctcaggaagcatcacagtttgagaggaaagatgaaccaaaaactgagcaaacggaaaaagctgaagaggagactcggatggaaaatagtctaccagccaaagtgcccagcagaggggatgaaatggttgctgatgtccagcagcccctgtcgcagattccttcagatacagcctctcctcttctcatacttccacctcctgttcccaatcctagtcctactctccggccagttgaaacaccagttgtaggtgctcctggtatgggcagtgtttccacagaacctgatgatgaagaaggtctcaaacatttggagcagcaagctgagaaaatggtggcttatctccaagacagtgcactagatgatgaaagattggcatcaaaactgcaagagcacagagctaaaggagtgtcgattccattgatgcatgaagcaatgcagaagtggtattacaaagatcctcagggagaaattcaaggtcccttcaataatcaggagatggcagaatggtttcaggcgggctattttactatgtctttattggtgaagagagcgtgtgatgaaagcttccaacctcttggcgatatcatgaaaatgtggggaagggttcccttttctccaggtccagctccccctcctcatatgggagagctggaccaggaacgactgaccaggcagcaagaactcacagccttataccagatgcagcacctgcagtaccagcagtttttaatacaacaacaatatgcacaggttttggcccaacagcagaaagcagcactgtcttcccagcagcagcagcagttggcacttcttcttcaacagtttcagaccttgaagatgagaatatctgatcagaacatcattccctcagtaactaggtctgtgtccgtgccagatactggctctatctgggagcttcagccaacagcttcacagcctacagtttgggaaggtggtagtgtatgggatcttcctctggacaccacgacaccaggccctgccctggaacagcttcagcagctagagaaggccaaagctgcaaagctagagcaagagagaagagaggcagaaatgagggcaaaacgggaagaggaagagcgaaagaggcaggaagaactccgaagacaacaggaggaaattcttcggcgacagcaggaagaagaaaggaaaaggcgagaggaagaagaacttgcccgaaggaaacaggaagaggctctgcgtcgccagcgggagcaagaaattgcattaaggcgacagcgagaagaggaagaaagacagcagcaagaagaagctcttagaagactggaagagaggagaagagaagaggaagaaaggcggaagcaggaagaattgttacgcaaacaggaagaggaggctgcaaaatgggcccgggaagaagaagaagcccagcgtcgattagaggagaaccggctgcggatggaagaggaggcagccagactccggcatgaggaagaagaacggaagagaaaggagctggaggtccagcggcagaaggagttaatgcgccagaggcagcagcagcaagaggctctccggaggttgcagcagcagcagcagcaacaacagctggcgcagatgaagcttccttcttcttcaacgtggggccagcagtccaatacaacagcatgtcagtcccaggccacgctgtcgttggctgaaatccaaaaactagaggaagaacgagaacggcagcttcgagaagagcaaaggcgccagcagagggagttgatgaaagctcttcagcagcagcagcaacagcaacagcagaaactctcaggttgggggaatgtcagcaaaccttcaggtaccacgaaatctcttctggagatccagcaggaagaggccaggcaaatgcaaaagcagcagcagcagcagcagcaacaccagcaaccaaacagagctcgtaacaatacgcattccaacctgcacaccagcattgggaattctgtttggggctctataaatactggtcctcctaaccagtgggcatctgacctagtcagtagtatttggagtaatgctgacactaaaaactccaacatgggattctgggatgatgcagtgaaagaggtgggacctaggaattcaacaaataaaaataaaaacaacgccagtctcagtaaatctgtaggtgtgtctaaccggcagaataagaaagtagaagaagaagaaaagttgctgaagctctttcagggagtaaataaagcccaagatggatttacgcagtggtgtgaacagatgcttcatgcccttaatacggcaaataacttggatgttcccacatttgtttctttcctgaaagaagtagaatctccttatgaggtccatgattatatcagggcctatttaggagatacttctgaggccaaggagtttgccaagcagttccttgagcgccgtgccaaacagaaagccaaccagcagcgtcagcagcagcagctgccacagcagcagcagcagcagccgccacagcagccgccacagcagccacaacagcaggactctgtgtgggggatgaaccacagtacactccattcagtatttcagaccaatcaaagcaacaaccaacaatccaattttgaggctgtgcagagtggcaagaagaagaaaaagcagaagatggtccgagcagatcccagtttattaggattttcagtcaatgcatcatcggagcgactcaacatgggtgaaatcgagacgttggatgactactgagcacctgccagtggactggccatccctctcctgtctgccgactatggagtctccacctttggacacaacacttactcaccatttactctttatcactctgcaacaaatcacagaaccgatcatctcaggctttttcttctggccctttgtgtccaagattctttaatccatttttgttggtgaacatctcagactatagataagtggactggaccctgtgtcttgggggtggcagttgggattactccccaacaaggctgattttaggcagcatgtgttcactgtgctgtgatttcatctactgtctcccagaaagtgtgttgggatcggccattagcagcttgctttctcttgtcactttttttcttctattttgttttttcttcttctttttccccccatcagggcaaatggtctaactggtgcaatcatgaagagagttaatggttaacagacattggccaataacaaaacaccccatggactgtgactcgagtatccaacaggcagtcagagctctcccggtctgaaagttgcattgccactgctaactttgggattgcatcagagaggccctgagtggggttgagatgaggttggtttggtttgatgttacacactcctcacctgttctttctgagtgtcctttctctgaaaggatttatgtttttcttcgttagatagtgacttctgagcaagctgatctcccctggcatgctccaacctgattggacaaaggaagctctatggcctgggagagagactattcttaatttttctttcttacaaaaactgatttttcccataaatatttttacttcagaggactaggaccattttgttttgggcccttctgctgaaaatttgtctcgtttaagaggcagctagaatctttaccatatgtatgaatttgtataatttcatttttggatagggataaacttttgcttctgataaaagcctggaatttcatctggtcctcagagcattgcgtgtgtgtcttgctgtagcccggaaaaggttttgtgtaaagattctgggatggcaagttgtttgccttttctgaaaagagaacatacagaacctgtccatctttaagaccttcatccatggaatctactatacaggaggatgcagtgggctggaggggatgggcgaaaatgggagcaggaagcctggcctggcttctggtcatggcctcctaaaaccttaaacttcaagtagaaatgtactcaagccctatttataaacaaatacttttcctgcctccaccaaacccctacagaacatcacctggaattgccactcacactgggttggagtcattgggcagctgtgcctgtgcgagaggtgctgtggtctgggcagcccctggaaaagcacctttgctgcctgtcattgttgcctgaagaaggctggagttgctctgagagcagtttgggtttggagtattatatttggcttctatttttattattttggatcaccattctccctatcccttcttgcctccctcccttctaaacatgtgtaataactatacagagactgctacaaaattgtatatagtttttggatcaaatagcatgaggggagaggaaaccattaaaagttggggctcctactctcctttgctttgtaaattcaaaagttgggggtgggtaagagggatagttaaaatgtttacaaaactttaggctccctcggaacttttgccagtgtggaggaaaataaaaaagaacttaaat

SEQ ID NO: 22351 - DNA, 4358 bp, Homo Sapiens
gcgcagttagagccgatctcccgcgccccgaggttgctcctctccgaggtctcccgcggcccaagttctccgcgccccgaggtctccgcgccccgaggtctccgcggcccgaggtctccgcccgcaccatgcggctgggcagtcctggactgctcttcctgctcttcagcagccttcgagctgatactcaggagaaggaagtcagagcgatggtaggcagcgacgtggagctcagctgcgcttgccctgaaggaagccgttttgatttaaatgatgtttacgtatattggcaaaccagtgagtcgaaaaccgtggtgacctaccacatcccacagaacagctccttggaaaacgtggacagccgctaccggaaccgagccctgatgtcaccggccggcatgctgcggggcgacttctccctgcgcttgttcaacgtcaccccccaggacgagcagaagtttcactgcctggtgttgagccaatccctgggattccaggaggttttgagcgttgaggttacactgcatgtggcagcaaacttcagcgtgcccgtcgtcagcgccccccacagcccctcccaggatgagctcaccttcacgtgtacatccataaacggctaccccaggcccaacgtgtactggatcaataagacggacaacagcctgctggaccaggctctgcagaatgacaccgtcttcttgaacatgcggggcttgtatgacgtggtcagcgtgctgaggatcgcacggacccccagcgtgaacattggctgctgcatagagaacgtgcttctgcagcagaacctgactgtcggcagccagacaggaaatgacatcggagagagagacaagatcacagagaatccagtcagtaccggcgagaaaaacgcggccacgtggagcatcctggctgtcctgtgcctgcttgtggtcgtggcggtggccataggctgggtgtgcagggaccgatgcctccaacacagctatgcaggtgcctgggctgtgagtccggagacagagctcactggtgagtttgccgtgggaagcagcaggttctggggggcccaggggaggcttggctgccagctgtctttcagagtttcaaaaaactttcagaaggcaaaagtcccttgccttgaacaactgttgttcctggagacgcagcgaagccctcgatggtgcgcacggcatttcctgcagcctccccttggcatgggatggcatcctggtgtgcactttgtcacactgcgatgggattttcccaacatgcacagaagcagagagacgagtgctagacccccgcgctccccagtgcccagccccgaccagggtgtccagggcgggtccaggcaccggcgcccagcccccatggggtgtccggagtgggtccaggcaccggcgcccagcccccgtggggtgtccagggcgggtccaggcaccggcgcccagcccccgtggggtgtccagggcgggtccaggcaccggcgcccagcccccatggggtgtccggagtgggtccaggcaccggcgcccagcccccgtggggtgtccagggcgggtccaggcaccggcgcccagcccctgtggggtgtctggagcgggtccgggcaccgccagcttctctctgtggcagccactcctgcagctctcgtttgcccctcagttccaggagcaacatagatgtggattcctgtccaatttgggaaaaatgtccacacacggtcacccacctggcaggtgcctctggctgcaaggggcgctgggcttcgcaggcaggccagccgggctccccgccatgggccaggatcccctccgagccctgtttgccgcccaggagaaggggttccccggggacagtgggctcagggtgtgcgcagccaccacgctgtggtgtcacctgtggacccaggcgagctgatggccgaccgcagaaacgcacttccaaggccaggtcggcccatccagatgatgcaggaacacagcttgctaaaaacacggccggcctgttcccgtcggagccagtcgaagttccctgaacaggccgctgtttccgaagctttaaaccctgtgtttccaccaagctgagtcctgagaaaaccggcgtctgcctgcagaagggaaaggggtgcttcatgttcctctctctccttcatctcccttccaaggccacgtttgaccggagctcaccgcccagagcgtggacagggcttccgtgagacgccaccgtgagaggccaggtggcagcttgagcatggactcccagactgcaggggagcacttggggcagcccccagaaggaccactgctggatcccagggagaacctgctggcgttggctgtgatcctggaatgaggccctttcaaaagcgtcatccacaccaaaggcaaatgtccccaagtgagtgggctccccgctgtcactgccagtcacccacaggaagggactggtgatgggctgtctctacccggagcgtgcgggattcagcaccaggctcttcccagtaccccagacccactgtgggtcttcccgtgggatgcgggatcctgagaccgaagggtgtttggtttaaaaagaagactgggcgtccgctcttccaggacggcgtctgtgctgctggggtcacgcgaggctgtttgcaggggacacggtcacaggagctcttctgccctgaacgctcccaacctgcctcccgcccggaagccacaggacccactcatgtgtgtgcccacaagtgtagttagccgtccacaccgaggagcccccggaagtccccactgggcttcagtgtcctctgccacattccctgggaggaacaatgtccctcggctgttccggtgaaaagttgagccacctttggaagacgcacgggtggagtttgccagaagaaaggctgtgccagggccgtgtttggctacaggggctgccggggctcttggctctgcagcgagaaagacacagcccagcagggctggagacgcccatgtccagcaggcgcaggcctggcaacacggtccccagagtcctgagcagcagttaggtgcatggagagggtatcacctggtggccacagtcccccttctcacctcagcaatgatccccaaagtgagaggtggctcccccggcccccaccaccctcagcagccccaccccactcaaccctgagggtccccagggtcctgatgaagacctccgaccccagcgccaggctcctcggagcccaacagtcccaagggggcagtgttgaggggtacagccctgggccctgaccagccccggcacctgccatgctggttcccggaatgaatcagctgctgactgtctccagaagggctggaaaggatgctgccaggtgacccgaggtgcactcgccccagggagatggagtagacagcctggcctggccctcgggacacattgtctgccccgggactatgggcaaatgcccctccttcttacttcccagaatcccctgacattcccagggtcagccaggacctgttacagccctggtcacttggaactgacagctgtgtgaggcctgcacttctcagacccagacttagaacaaaaggaggagtgaggactcaaggctacaatgaggttccagtacttgttacaagaaattggttttctgcaaaaaaagtccctacctgggcctttaggtgaatgtgggatccactcccgcttttaacatgaaagcattagaagatgtgtggtgtttataaaagaacagttgtcatcaccgggcattgattggcagggacaaggagctgcttgggtgtggaaagttggggcgttggaaagtgggctgtggtgcccatttgcagtgactgtgaagtgactccaggacggacctgcgggggcacccagaggtcctaagccccaggactgagggtcgtgcatcaccactcgggtgtcccgggaggtgccctgggcccggggacctcacaggcaggacggcgacactaatgcagggagagggagtctggccccagcttttcctatcagaggcgattttccttcaccaggggatgggcaggaaagaggcaggggccccagaagcttctgtccctcatgcctgagggcacgggggacacttggaggctgctgtcaccactgtgcgtccaaggccatgctctctgcgggtcagtgcctgagtctcgcctccctgctggtccctgaagccccctcagaagccctgcctgtcacgtcggcatttgtgagacctaccctgtaacgcctgcccctctcagcccaacatcagcttcctctttctcccttgctgtagacaggctggattccagtgttgggacagccatctccagaaacctgacttaagagagtaagatgcaaatcgt

SEQ ID NO: 22352 - DNA, 4716 bp, Homo Sapiens
gtgggatttggggggcgctggtgggcacccctggatctggcggctgcggcctcgcggggggaggctgatcggtgacaggggcagggggctattttgggggtagaaggcagtgagagcgtgagggggaggggggtccccaacgcccaagccggagccagagacgcggagcccgcgcgagcgtcggagacagggctccagggctccgaagcgacagagccgggccccggccgctgccaggggccccgcccggcccccccactccaccccacgtccctcctgcagcccagctccgcccgcagccgccgcggaccaggcaggcccgcaccgccgccatgatgtgcgaggtgatgcccaccatcagcgaggatggccggcggggctcggcgctgggcccggacgaggcgggcggggagctggagcgcctcatggtcacgatgctcacggagcgcgagcgcctgctggagacgctgcgcgaggcacaggacgggttggctacagcgcagctgcggctgcgcgagctcggccacgagaaggactcgctgcagcgccagctcagcatcgcgctgccccaggagtttgcagctctgacgaaggagctgaacttatgtcgggagcagctgctggagagggaggaagagattgcagagctgaaggcggaacggaacaacacgcggctgctcctggaacacctggagtgcctggtgtccaggcacgagaggtcactgcgcatgaccgtggtgaagcgccaggcccagtccccgggtggggtctcctcggaggtagaagtgctcaaagctctaaagtctctcttcgagcaccacaaggccctggatgagaaggtccgggagcggctgcggatggcgctggagcgcgtggcagtgctcgaggaggagctggaactgagcaatcaggagactctgaaccttcgagaacagctgtctaggcggcggtcagggctggaagagccgggcaaggatggggatgggcagactcttgccaatggcctgggtcctggcggggattccaaccggcgcacagcagagctggaggaggccctggagcggcagcgcgccgaggtgtgccagctgcgggagcgcctggcggtgctgtgccgtcagatgagccagctggaggaggagttgggcaccgcgcaccgtgagctgggcaaggcagaggaagccaactccaagctgcagcgcgacctcaaggaggcgctggcgcagcgggaagatatggaggagcggattacaacactggagaagcgctacctgagcgcccagcgggaggccacgtctctgcacgacgccaacgacaaactggagaacgagttagctagcaaggagtcgttgtatcggcagagtgaagagaagagccgtcagctggccgagtggttggacgacgccaagcagaagctgcagcagacgctgcagaaagcggagaccttgcccgagatagaggcgcagctggcgcagcgcgtggcggcgctcaacaaggccgaggaacgtcatgggaattttgaggagcggcttcggcagctggaggcccagctggaagagaagaatcaagagctgcagcgggcccggcagcgggagaagatgaacgatgaccacaataagcggctgtccgagacggtggacaagctgctgagcgagtccaacgagcgcttacagcttcacctcaaggagcgcatgggggcgctggaggagaagaactccctgagcgaggagatagccaacatgaagaagcttcaggatgagttgctgctaaacaaggagcagctcttggccgaaatggagcggatgcagatggagatcgaccagctgcgggggaggccaccatcctcctactccaggtctctccctggcagtgccctggagctccgttactctcaggcacccactttaccttctggtgcccacctggatccctatgtggctggcagtggtcgggcaggcaagaggggccgctggtcaggggtcaaggaggagccctccaaggattgggagcggtctgcccctgcgggctccataccacccccattccctggggaactggacggctccgatgaggaggaggcagaggggatgtttggggccgagctgctgtcccccagtgggcaggctgacgtgcagacgctggccatcatgcttcaggagcagctggaggccatcaacaaggagatcaagctgatccaagaggagaaggagacaacagaacagagggcagaggagctggagagtcgggtgtccagctctggcttggactcgttgggccgctaccgcagcagctgctccctgcccccctccctcaccacctctacccttgccagcccctcccctcccagctctggccactcaacaccccgcctggcaccccctagccctgcccgtgagggcaccgacaaggctaatcatgtccctaaggaggaagctggagctccacgaggggaggggccggccatcccaggagacaccccaccacccactccccgctctgcccgtcttgagagaatgacccaggccttggcactgcaggcggggtccctggaagatgggggacccccacggggaagtgagggcaccccagattctctgcacaaagcccccaagaagaagagcatcaagtcatccataggccgtctctttggcaagaaagagaagggacgaatgggacccccaggccgggacagctcttctctggctggaacaccctcagatgagacactggccactgaccctctggggctagccaagctgacaggcccaggagacaaggaccgaaggaacaagaggaagcatgaactcctggaggaggcctgccgccagggcctaccttttgctgcctgggacgggcccaccgtggtgtcctggctggagctgtgggtgggcatgcctgcctggtatgtggccgcctgccgggccaatgtcaagagcggtgccatcatggccaacctgtcagacacggagatccagcgcgagatcggcatcagcaacccgctgcaccgactcaagctacgcctcgccatccaggagatggtctcgctcacctcgccctcagcccccgcctcctcccgcacttccacaggaaacgtgtggatgacacacgaggagatggagtcccttacggccacgaccaagcccgagaccaaggagatcagctgggagcagatcctggcatatggcgacatgaaccacgagtgggtggggaacgactggctgcccagcctggggctgccccaataccgcagctacttcatggagtcgctggtggacgctcgaatgttagatcaccttaacaagaaggagctccggggccaactcaagatggtggacagctttcacagggtgagtctacattatgggattatgtgcctgaaacggctcaactatgaccggaaggacctggagcggaggcgggaagaaagtcagacccagatccgagacgtgatggtgtggtccaatgagcgggtcatgggttgggtgtccgggctgggcctgaaggaatttgccacgaacctcacggagagcggggtacacggggcactgctcgccctggacgagaccttcgactactccgacctggccttgctcctgcagatccccacgcagaatgcacaggcccggcagcttctggagaaggaattcagcaaccttatctccttaggcacagacaggcggctggacgaggacagcgccaagtctttcagccgctccccatcctggcggaagatgttccgggagaaggacctccgaggcgtaactcccgactcagctgagatgttgccccccaactttcgttcggctgcagcgggagccctgggctctccggggctccctctccgcaagctgcagccagaaggccagacttctgggagttcccgggcagacggcgtttcggtccggacctattcctgctagtgcaggcctccaggtgacctcactcggacggaagaatcttcccgaggctgggctgttccctctcctgcccggactgtggcctcgccggggagagcgggcgggggagctcgcgccgaggactggaccatctgtacagaccagcgggagtgcgcgcgcccgcctcgcacagggccggggcctggaccaaaccacatgaactggactgagagggggaagaagcggggaggaagaaatcccgccccaaacgtccgctttccttttctctactttgtaatttattgatcagtttctgttgggagacgggtgtcctttacccgcgggaagggggcggggcttccctcccgggccgcatgcggggagaggctgctccctcccctttttcctgcccagtcgcggggcccaagtcttccttcttcgtccgaaaggaggggaggggggactcgctgctacaagcctcgccccctgtgccactcagctccgccccgccgcgtccggtcgccggtcccccgggtcatctgcgggcggggtcccctctccctcccccgtgtctcgtgtccccggggcctcaccgccccccgtgctgtggccgtgtccgtgccccgggggtagggggcgcagaatggcgcttccccttctcctctggctccggggtttgcatgggagaatcctctttccacgatgccgctgggcgacgtggcgtgggggcagggggacggtgggggagccctcgcccccgactctcggtcggcctccccgccccaggcgtcactcagtgatcacgggtaaagagaactgtttc

SEQ ID NO: 22353 - DNA, 4550 bp, Homo Sapiens
cccagcatccctggcgcggccatttcagccccatcttggcccagcggagggagctgcagccgccgcttcagcagtttgaatttcagtttcttcggggtttaggaattgggcgcaccgaggaggagccggagaagccaccaccgctacctcacacagccggggcgcctccggtcccgtgccagcggtctgccgccgccgcccctctctgagagaagccgcgaggggaggccgagaccgccgtcgccgcccgcccgcaggggtggttccccctgtaaggggaggaccgagccggctttcccctcccccagagcgggtttccgcctgaggcagtcgacatgtccctggggctgagctccggctagagccggggagggagggccgcctgcccgcgccacagccccaccgcccgcccgcggaccttcagccagctccggcccgcggctcccggctgaattaggcatctccgactccggactcgccgctccttccctcagtcagagagcccagcgctgacgccggcaccggcctgaggagcccgagcggggcagcaccgcccctcacgccgccgccaccgcctcctcctcctcctcttcgccctcccactcccacccccagccaaggcctgctgaccgcgccgagcgccgagctggactgaccacggctgcccggagacgagagaggaagcagccggcccgcccctgggttcgcgctctcgccgcctctgagggaattgaattgaggcgccgcggctgcgagagctaaaaaggaaggaggagccgccgcgggactgagacgggggcagagccgaagagaccgacacagagaaggaaacgaggaggaggatgtctcaccgggcggccagcgcctggatcagcccgtgactcttaacagcggcgggcctcagaccccagcgcagactcggactttgtctttgggggcccgtgctctgccctccccggtttccgacaggacccagaggagccggcgtgcctctctgccctccagccttcttcaccatgtccaagatgccggccaagaagaagagctgcttccagatcaccagtgtcaccacggcccaggtggccactagcatcaccgaggacaccgagagcttggacgacccggacgagtcacgcacagaggacgtctcctccgagattttcgacgtctctcgggccacggattatggccctgaggaggtctgcgagcgcagctcttccgaagagacgcttaacaatgttggggatgcggagactcccgggaccgtctccccaaacctcctcctagatgggcagctggcagcggcggctgctgctcccgccaacggaggaggagtcgtttcggcccggagcgtgtctggggcgctcgccagtaccctggcggcggctgccacttcggcccccgcccccggagcacccggcggcccccagctcgcgggctcatccgccgggccagtgactgcagccccatctcagcctcccaccacatgtagttcccgttttcgcgtgatcaagctggaccacgggagcggagagccctatagacgcggccgatggacgtgtatggaatactatgagagggattcagacagcagcgtcctgactagatccggggattgcattagacacagcagtacttttgaccagactgcggagcgggacagcggcctgggcgccaccggagggtcggtggtggtagtagtggcctccatgcagggggcgcacgggcccgagtcgggaactgacagctccttgactgctgtgtcacagctacccccgtcggagaaaatgagccagcccactccggcccagccgcagagttttagcgttgggcagccacagccgccgccgccacccgtaggtggggctgtggctcaaagctcggctccgctgccgccgttcccgggagccgcgaccgggccgcagccaatgatggcagccgcgcagcccagccagccccagggagcggggcccgggggacagactctgccgccgacgaatgtaaccctggcgcagccggctatgtccctgcctccgcagccgggccctgcagtgggcgcccccgcggcgcagcagccccagcagttcgcgtatcctcagcctcagataccgcccggacatttgctgcccgtccagccctccggccagagtgagtacctgcagcagcacgtggccggcctgcagccgccaagccccgcgcagccctcgtccaccggcgccgcagcgagccccgccacggcggccacccttcccgtgggcaccggccagaatgcttcctcggtgggcgcgcagctcatgggcgcgtcttcccagcccagcgaagccatggccccccggacgggaccagcgcaaggcgggcaggtcgcgccttgtcagccgactggagtgcccccggctactgtgggaggcgtggtgcagccgtgcctcggtcctgccggggctgggcagccccagtccgtgcctccgccgcagatgggtggcagtggtccgctgtcagccgtacctggtggccctcacgccgtggtgcccggagttccaaacgtgcctgcagccgtgcccgctccaagcgtgcctagtgtgtctaccacttctgttactatgccaaatgtacccgcgcctctggcccagtcgcaacagctgagcagccatacgccagtcagcaggagcagcagcataatccagcatgttgggctgcccttagcgccaggcacacacagcgcaccaacaagtctaccacagtctgacctaagccagtttcaaactcagacccagcctttagtcgggcaagtcgacgatactagaagaaaatcagaacccctacctcaaccaccactttctctcattgctgaaaataagcctgttgtgaagccgcctgttgcagattccctggcaaacccccttcagttaacacctatgaacagtctggccacctctgtattcagcatagctattcctgttgatggtgatgaagacaggaatccttcaactgctttctaccaagcgttccatttgaacacgttaaaggaatcaaagagcctctgggatagtgcatctgggggaggtgttgtagccattgacaacaaaatagaacaagcaatggatctggtgaaaagccatttgatgtatgcagtaagagaagaagtggaagttttaaaggaacaaataaaagaattagttgaaagaaactctttacttgaacgagaaaatgcactgttaaaatctctttcaagcaatgatcaattatcccaactcccaacccaacaggccaatcctggtagcacttctcaacagcaagcagtgatagcacagcctccgcagccaacgcaacctccacagcagccgaatgtctcctcagcataaagctttcttaagcctcattaagaaaaaaactgaaagcaatctatccttgtgtgccactggtgttctttccactttatacgaaagcaagtagccatgctttggttgtgtgtttggccttttcagtattagacaatcattctacaagagcttttcctctctctgagatgtcatgcagcgctgttgatgtccagttctatgtcatcagtacacaaggagaataatagatggggtttattaaagcgagcaaagtctgcattttacctggtgcgcatgagtggggtctttaagagttttggtggctctcccatgtttcctattacccatggatttaccctgagccttcctatcacattataaataacagttcatctaaagagccacttttctttctgattcagtaacatttgcctacataagttttcatttatttgtgttttatttattacagggctgctattttcataatgtacatgaacaatgtcacagaacttttttaatttttttgaataattataagtatcagtaaaggaagtgaaagacaggattgcatttaatagataaaacgtttaggcaataattgaacaaaagaatcctggcatatttctaacactaatggcaatttacttatggtatttattttcagtagtaaagacccagcttgaatgtaaattttgtatagtgtaagtatgaagaacatagtgcaactgtacaggtagtcaccagttattgtgatatgataaataattgggctattttgatgaagaaaactttgttcatttgtttctactttctaagagaaattgccacgattcctctgcttttcaacatttcgtatgacttttttttcgggtgggaataaaaagctgtgaaattgttcaacctactttgtaaccaaagaagcaaagctgtgtaatggagtttggttttttttttgttgttttttttttttttgtcttttttttttttataatgcacattctttatgtatttttatttagtgttttctcagtcacaattttctttactgtctagcatgatctgcatgacctataatctttgaaccactttcgtacctcatgtttttatccagcactcttattgtaatatgtactagtctgtgaacaatgtcaaataaaagagaacgaacaggtagtttggtggagctgagctagtgtacaatacactagttgt

SEQ ID NO: 22354 - DNA, 4323 bp, Homo Sapiens
gcagaaggccattactgctccagtcagcctcttccaggactcccaggcagtcactcacaacaagaatggcttcaaactgggcatgaagttggaaggcattgaccctcaacacccgtccatgtacttcatcctcaccgtggctgaggtatgtggctatcgcctacgcctgcactttgatgggtattctgagtgccatgacttctgggtcaatgccaactcccctgacattcaccctgctggctggttcgagaagacgggccacaagctgcagcctcccaaaggttacaaggaggaggagttcagctggagccagtacctgcgcagcacaagagctcaggctgcccccaagcacctgtttgtgagccagagccacagtcccccacccctgggcttccaggtgggcatgaagctggaggctgttgaccgcatgaacccgtcccttgtctgcgtggccagtgtgaccgatgtggtggacagccgcttcctggtgcactttgacaactgggatgatacttatgactactggtgtgatcccagcagcccctacatccacccagtgggctggtgccagaagcaaggaaagcccctcacccctccacaagactacccagaccctgataacttctgttgggagaaatatctggaagaaactggggcctctgctgtccccacctgggccttcaaggtgcgaccccctcacagcttcctggtcaatatgaagctggaggctgtggaccgcaggaacccagccctgattcgcgtggccagcgtggaggatgtggaggaccatcggataaagatccactttgatggctggagtcatggctatgatttctggatcgacgctgaccacccagacatccaccctgccggctggtgctccaagacaggacatcccctgcagcctcctctcggacccagagagcccagctctgcctcccctgggggctgtccccctctcagctataggagcctgccccacactaggacctccaaatacagctttcaccaccggaagtgccccactcctggttgcgacggctctggccatgtcacaggcaagttcacagctcaccattgcctctcaggctgcccactggctgagaggaaccagagccggctgaaagcggagctgtctgactcggaggcctcagcccgcaagaagaacctctcaggcttctccccaaggaagaagcctcgccatcacggccgaattggacgccctccgaagtatcgaaagattccgcaggaagatttccagaccctcacgcccgatgtcgtgcaccagtccctcttcatgtcagccctgtcggcccaccctgaccgctcactctcagtgtgctgggagcagcactgcaagctcctgccaggagtagcgggcatctcagcctcgacagtcgccaagtggaccatcgatgaggtcttcggctttgttcagaccctgacaggttgtgaggaccaagcacgcctcttcaaagacgagatgattgacggcgaggccttccttttgctgacacaggcggacattgtgaagatcatgagcgtcaagctgggcccagccttgaagatctataacgccattctcatgttcaaaaacgctgatgacaccttaaagtgactggcccagggctgggccctcctgcagcccctgcttggcctccctctccagctgatgctttcttcctgacctgaattcctcataccccacacgtccccatgctccacctatatctgaccaggctggtccttcttagagggtgcatgggagctgaggagccctggggagggtaggcacccagccccaagtcctagagctcattcgtcaccaggcatgttggtgagggcatgactggcaggggcattactcatggagtcagttggactgtggcagccccacagccccagtggacttttattgtattaccaaagggtctttttcttggcagtggaggagagactagtagagcagcagtccttcaatctgaggcccctttcccttttttggtatctctgtgtacttttctctccttggctcctttcctcctgccaagaagtgaccccaccacaaatgtatttactcctggaggtacctcctctctttctgtctgctggttttgctgccctcattctgctgcttcgtttcctgggcagtgcccccagccagaccccactggctcttccccctgagatatgtgaacctcggaaacatgttttcctaagatcccttggaagtctctagctgcctttctctcttttgcccagaattgagagattttgagccaagatgccttcctgaacttacccagttctggaccagttggcattttagtgtcccacgccaagtccaagtttcagcagaatgagcaggtggtttgagcctgttttatagatggcagaggttgaggttccactgctgttttccatacacccttcatgtgttgagtctgggaaggagtaagcctagcctgccagtagcctaggttaggagaccagcataaggatttgttagacaatctcgggtctttggccagaggggcagctccagcaggcatagtggtgcctgaagttaggaatactgtactctctgtagctttggacctcagccaaggtattgcccatggggtgatggctccaggcctgccaggccttctgccatgagaatgtagcactctgtgtagcacacacccccatgacatcatttaacctgtcccttaaatgttgaccattagctcttgcagcgtcttacaaagacgacttgaagttgggagttaggaaggtgaacttttctatctgaattctccgggtccctgaagccctccttgccgctctccatctgtcttgcactgccagctgggtccctgctggggctctgggacttccacttctcagtccacataggaacccagcttccactgagtcactgccaaacctgcctcccagcctgggtgggaagggggagagccactggtaggagccagccccacatggaggtgaggagccactgccaacctcccgtgtccaggtgctgatgtgggcctgcggagtgtggggctggtgccttcacccagaccccttcaatcatgtgatgtgtgtgtgtgtgcatgtgtgtgtgtgtgtgtgtgtggcactctcagaagtgtttgacagggtgcagatgtgaggctcagtgttgggaaaatgccaagggctattatcattaaaatttgaagctttatttttcccttagaagtgggaaacccagagctctgttgatttcctaccacaacccagtaggggcctctctctcccatgggctggacagctttttgaggaagccattcagctcccacagttgagctcccacagggctttaggtgtccattccctctcaactgcttagaggcagctttgagcacagccttcctggaaggaagctaggcaagacctgccacacagcgaaggttgggtttacaagggtgacattggtacccccttggccaagagtaaagaagaacaagtctaagccttgcttttatcttagttgtctgggtggtagcagaactcatcagctccttatcctcagtctgttcctctataaaagatgagagatgttcactgactttgtgcagtgagaaggcagcaagtactcacggctggtgctgtgggacctcacagcttctaaggagaggggctgggagggcctttgccatcagatctgccaagcacctaatgcttgcctgtggtgaaggcaagatggaccaagggccttggagaaaagggctcccaggcttctgaactttgaggcctcagcactttctgcattatcgtcaaactctttggaaagaaaccaaatcattaaaaagtagaaagaaatctgcctcttgtctgccctactgcccctttacccccactctgtccccaaatgatattattgtaccttgacctgggagcgcagagaggggagggagttggcagagacttctggtgccctctgccctcctagcaacagatgccacttatattttggcccctggcagcctcgcccagcccctgatcagcccaggcctagggcagttaggacctttctgtttattttctgaagcagagagaatgatctcagagtttgcaaatgaagccttttttgcactttcattcacatgcactttggtggggttacatttttgtacttgcctcttgtgtgtgcacatgtgtgtatgtgttctttaagagaatcttctggcttaagctaaggtgactcttgaaggagaaaaagttacaaacaaaatgtggtgtgatctgtcagtgtatcaaaacaacataaataaacttgaacaactgatacgc

SEQ ID NO: 22355 - DNA, 4161 bp, Homo Sapiens
cctacccgggctccggcgtggaggcggggcgtggccggcctgctttgggaggggaggggcttcccttacagtgctgggctctgccaggacggctgtggggtcgccttacctcggggtatccactctgcagtcgaccagttcccgccaggagcaaagggtaggaaggagagcaggatctgctgtaggaacgcagctaccgcgccactatcacgaagaaacagcaggctcggggcacgagacgaactggagaccgcgctgcctagctgggtaacctgggaagcagagggtaataagtggcgccttaagacaaccctgtagcagcagcagtggcggccaaaggaggctgctcagggaacaagcggctgtagtagtctgtggggcgactggagtgaccgaagccaaggcagtttagtgcctctcgtgttcttattttttaacctctgactatgcaattctgaaacctcccccattcgggggaccagacagcctgatagacaccttccactctccttcctcccgccgtggtctcgagaacagaaggatctctccttaacgcctttcaccattaagaggaaagcgatggaggagctgagcgctgatgagattcgacggaggcgccttgcacgacttgctggtggacagacctctcagccaaccaccccactcacctctccccagagggagaaccctccggggcctcccatagcggcatcagccccaggaccctctcagagtcttggtctcaatgtccacaacatgaccccagctacctccccaataggtgcatcaggagtagcccatcgaagccagagcagtgaaggagtcagttctctcagcagctcgccctctaatagccttgaaacgcaatctcagtctctctcacgttcccagagcatggatatcgatggtgtctcatgtgagaaaagcatgtcccaggtggatgtggattcaggaattgaaaacatggaggttgatgaaaatgatcgaagagaaaagcggagcctcagtgataaggagccttcctcgggccctgaagtgtctgaagagcaggccttacagctggtctgtaagatcttccgtgtctcttggaaggaccgggacagagatgtcatctttctttcttctctttctgcacagtttaagcagaacccaaaagaagtattctccgattttaaggacttgattggccagattttaatggaagtgctaatgatgtccactcagaccagagatgaaaacccatttgccagtctgacagccacatcacagccaattgctgcagcagcacggtcaccagacagaaatctcttgctaaacactggctccaatccaggaacaagccccatgttctgcagcgtggcttcctttggtgccagctctttgtctagtttgggagcctctggtggagcaagtaattgggattcctacagtgaccatttcaccattgaaacctgcaaagagacagatatgctgaactacctcatcgagtgtttcgaccgagttggaatagaggaaaaaaaagcaccaaagatgtgcagccagccagcagtcagccagcttctgagcaacatccgctcacagtgcatatcccatactgctttagtactacaaggctccctaacacagcccaggtccttgcagcagccgtccttcctagtgccgtatatgctgtgtaggaatctcccatatggcttcattcaggaactggtgagaaccactcaccaggatgaagaagtgttcaagcagatatttatccccattttacaaggcctggctcttgctgccaaagagtgctccctcgacagtgactactttaaataccccctcatggcactaggtgagctctgtgaaaccaagtttgggaagacacaccctgtgtgcaatttggttgcttctttgcggttgtggttgccgaaatccttaagtcctggctgtgggcgggagctgcagagactctcttacttaggggctttctttagcttctcagtctttgcagaagatgatgttaaagtggttgaaaaatacttctcagggcctgccattaccctggaaaacactcgtgtggttagccaatcattgcagcattacttagagctcggaaggcaagagctttttaagattctgcatagtattttgttaaatggcgaaacccgtgaggctgctctcagttacatggcggctgtcgtcaatgccaatatgaagaaagcacagatgcagacagatgatagattggtgtctacagatggatttatgctgaatttcctttgggtactgcagcagctaagtacaaaaatcaagttagaaacagttgatcccacgtatatttttcacccaagatgtcggattactcttcccaatgatgagacgcgtgtgaatgcaacgatggaagatgtgaatgactggctgactgaactctatggcgatcagcctccattttctgagccgaaattccctacggagtgcttctttctcaccctgcatgctcaccacctctctattctgcctagttgccgtcgctatatccgcagactccgggctatccgggagctcaatagaactgtagaagatttgaaaaataatgaaagccaatggaaagattccccactggcaactagacaccgcgaaatgctgaagcgctgtaaaactcagcttaagaaactggtacggtgcaaggcctgtgctgatgctggcctacttgacgagagcttcctgagaagatgtctgaatttttatggccttctcattcagctgctgctccgcatcctggaccccgcatatcccgatataacactgcctttaaattcagatgtccccaaggtatttgcagcgttgcctgagttttatgtagaagatgttgcagaatttttattttttattgtacaatactctccccaggcgctttatgagccctgtactcaggatattgtgatgttccttgttgtgatgttgtgcaaccagaactacatccgaaacccatatttggtggccaaactggtagaagtcatgtttatgaccaaccctgctgttcagccacgaacccagaagttttttgaaatgattgagaaccatcctctctccaccaagttgttggtaccttccctgatgaagttttatacagatgttgagcataccggagccaccagtgagttttatgacaagttcacaattcgctatcatattagcaccatttttaaaagcctttggcaaaacatagctcaccatggcacctttatggaggagttcaactccgggaagcagtttgttcgctatataaacatgttgataaacgacacgacgtttttgctcgatgaaagtctggagtctctgaagcgaatccatgaagtgcaggaagagatgaagaacaaagaacagtgggaccagttgccccgggatcagcagcaggctcgtcagtctcagcttgctcaggatgagcgtgtgtcccgctcttacctcgccctggccaccgaaaccgtggacatgttccacatcctcacgaagcaggtccagaagcccttcctcagaccggagcttggaccccgattggctgcaatgctgaactttaatcttcagcaactttgtggccccaagtgccgtgacctgaaagttgaaaaccctgagaaatacggctttgaaccaaagaagctgttggaccaactgacggatatttacttacagctggactgtgctcggttcgcgaaagccattgctgacgaccagagatcctacagtaaggaattgtttgaagaagttatttcaaagatgcggaaggcagggatcaaatccacaatagcaatagaaaaatttaagctgctcgccgagaaagtggaggagatagtggccaagaacgcacgcgcagaaatcgactacagcgacgctcctgatgagttcagagaccctctgatggacaccctcatgacagaccccgtgcggctgccctctggcaccatcatggaccgctccatcatcctgcggcacctgctcaactcccccacggaccccttcaaccggcagacgctgacagagagcatgctggaaccagtgccagaactgaaagagcagattcaggcgtggatgagagagaaacagaacagcgatcactaaaccgttccgccgcccaccctctgctagacacagccaaggccaacgaggcaagcagaagca

SEQ ID NO: 22356 - DNA, 4493 bp, Homo Sapiens
cacgggctgagccccgcgccgccaccatgtccgtggccttcgcgtctgcccggccaagaggcaaaggggaggttacgcagcaaaccatccagaagatgctggacgagaaccaccacctgatccagtgcatcctggagtaccagagcaagggcaagacggccgagtgcacgcagtaccagcagatcctgcaccggaacctggtatacctggccacgatcgcagactccaaccagaacatgcagtccctgcttcctgccccgcccacgcagaacatgaacctgggccctggagccctgactcagagcggctccagccagggcctgcactctcagggcagcctgagtgacgccatcagcacgggcctgccaccctcctccctcctgcagggccagattggcaacgggccgagccacgtgtccatgcagcagacggcgcctaacacgctgcccaccacctccatgagcatctctgggcccggctacagccacgcgggacccgcctcgcagggcgtccccatgcaggggcaaggcaccatcggcaactacgtgtctcggaccaacatcaacatgcagtccaacccagtctccatgatgcagcagcaggcggccacgtcgcactacagctcggcgcagggcggcagccagcactaccagggccagtcgtccatcgccatgatggggcagggcagccaggggagcagcatgatggggcagcggcccatggcgccctaccggccctcccagcaaggctcttcccagcagtacctgggccaggaggagtactatggcgagcagtacagccacagccagggcgccgcggagcccatgggccagcagtactaccccgacggccatggcgattacgcctaccagcagtcatcctacacggagcagagctacgaccggtccttcgaggagtccacgcagcactactatgaggggggaaactcccagtacagccagcagcaggccgggtaccagcagggtgccgcgcagcagcagacgtactcccagcagcagtaccccagccagcagagctaccccgggcagcagcagggctacgggtctgcccagggagccccgtcacagtaccccggctaccagcaaggccaaggccagcagtacggaagctaccgagcaccgcagacagcgccgtctgcccagcagcagcggccctacggctatgaacagggccagtatggaaattaccagcagtaagggacacacattctggctggagcccttgtggtagcgtgttcatccaggggccggatgggctggcggcagctctggtgaattgtgacatgttggttacctgttcgcccagtgccacgtctgcatgtgaagcgtgctcatttcatgctgggtatgacgccgagcgcacaccactggcgtgagacagcgcttggtggtgtgatacttttggtgctgtgtatagtattgtatgtcggtacacggagaggtatcctttttttgtcccccgcccccttctcaatgtttctagctagctttgggggtcattttgtcatcagagcattctgtgcccagggacaggacagatctcgaggacaccacagtccacctgttcccgtcaacagacgttaggtctcattttcctcctcatgcagtgttgtagtgtgggttgtcaacttttctttaactggctacgccacagctggacacacatgcagcccctggagggcagcctcttcctgtgcctcgatggggtgggtgggagggcatcttctgtgcgttgggtcagtttctgttacgtaacgaaaaggataaacatctcccacgggagaggccacagatggccacttccagagcttgcccattgcctgtctctcgccaattccgtttatccaaaaaggtacatgtttttgtattaaaaagtaaacagggatcagtgactgtattccaaataaatatgaatccctaagggccgtggacaaattgcctaacccagggccagcggtattgctgaaggaaaggggcagctctctgggaagtgggccctcagagattactctggctttgacccttgtttagctgatggtcatttctgggattggaatatttaataagcccaattctaagttgataggtaattttaaatattcaaaccaaatcttcccaacagttggcaagttgtttattttatattatttcttccaggacctacttgctcagatctccaagcaagcatttcttttcttttagggatgtctgaaagtcacatccagttacattactgtgttctttctaatgaaaagtaaaggttttatatagagaaacttgagtaatttttacatttctaagacattaaatcccatttaaattctgtgtgaacattaaagacagcacacttgcaaaagtatggtcaaaggaaaaaaatcccacatttcaattaacaagtagcatggacatttgatcaacctttagttggaataataatattcatatttgctatgaatccttttaaaaaaatctttggataaatgctgacagatttccaagaactaccaagaaaatacaagagatatccaatgcttgatatatgaggcctagtaataacgatatttctctttaattgatgttttgttttaaaagttaaaagtaattcttggcgtggtggttcacgcctgtaatcccagcactttgggaggccgaagcgggcggatcacctgaggtcgggagttcgagaccagcctgaccaacatggagaaaccccgtccctactaaaaatacaaaattagccaggtatggtggtgcatacctgtaatcccagctactcgggaacctgaggcaggagaatggcttgaacccaggagacagaggttgtggtggggcaagatcgcaccattgcacccgagcctaggcaacaagagtgaaattccgtctcaaaaaaataaataaataaataaataaataagttaaaattaattctttatccagagtcgggtgctttagaatttataagtcacttatgtgttttgcttgaattaattctgacagcccctatgaggaaatctggaggcaggtaacagttcccattttagagatgaagaactgaggcacagattaaaggacttgcctgtgttgaataccagtcctgttctaggacattctcccctctcctaggagacggatgtcacgcacaaatggggagagaagtgtttattttgtaggcactaagggtttctaaaacccttaacactggtaagggctcaaaaataaacgtatgtgttcatattcgatcaccgaaatgagagttcttaattgctaattgacaaacgcgttagcaatttcagttagggagtcatctcccttgattgtgttcttttcctgtcaattttcatagacctaatttgcaaactcaatcggggactaaaatttcccactgaaaatgttaaacattttagataactgtgaagatagtttatttttattccttgccaatctgggaatatgccttttttgtgtgtttgtgtgtttttttaagtgctgtattaataatactttctgaaagaaaaggacacttaccccaaaacttcaatctgaaatgtcttacattaagaatatcttgaatgttgtgtatatattttaaaaagcactttgcaaaatagtttgtacatttatttcctaatttatacatgatttttggtgttaatatatttaatgattaataacagaatgtttatttaatgtgctgtccatttttatgtaatattatggggaaagtgatgccagcagttccttttcattattctatcttctgtcatatgaatgttgagcaaagcttaggccaacatgaattgtttgtgaagtgtggttgatggtgctttgtttttttctgactacttctatggaaggccagtgaagaagcaaaggaagacatgaaaattgacgctcattcttcttcctattgttccctgacatccagcaaattgtgaatttgaaaaatgatggccagttttcagaagtgctgacaaattcatattggtatgcaaaagctcatcacccattaaggtttgttgttgaatcaacagtactcagcatattaaaacagtacatcagaactcatgccaacagtctttatgatgggattaaggtggacaagatctcctaagatctgtgaatgggattaaggtggacaagatctcctaagatctgaaaagaaaccttaatacgctcatatggttggagtgttaagtgaacctctgattttgtcagggtttttctacgtgtaggcgtgaatagggggcaccccttcaaaactgtacaaagaagacgactgttttccatttccatttaaacatttttagccacttcatttctatttattgaacaggtcaaatttgtcttgttatttgtgagtacagtacatttaaaaaacatccttatcggttatttttttttcagtcggagtttgacgtataaattgtttatgcttttggtgtaatctcttaataaactggttcttcaaaaatc

SEQ ID NO: 22357 - DNA, 5020 bp, Homo Sapiens
catggcgcacgctggcggtggcagcggtggcagcggtgccggcggccccgcgggccgggggctgagcggcgcccgctggggtcgctcgggctccgcaggccacgagaagctgccggtgcacgtagaagacgccctcacctatctggaccaggtgaagatccgctttggcagcgaccctgccacctacaacggcttcctggagatcatgaaggagttcaaaagccagagcatcgatactcctggagtcatcagacgtgtctcgcagctcttccacgagcaccctgacctcattgttggattcaacgcttttcttcccctcggatatagaatagacattcccaagaatggcaagttaaacatacagtcgcctctgacaagccaggagaattcgcacaaccacggggacggtgcagaggacttcaagcagcaggtgccgtataaagaggacaaaccccaggtgcccctggagtccgattccgtggaattcaacaacgccatcagctatgtgaataagattaaaacccgcttcctagaccacccagaaatctacaggtcattcctggagatcctgcacacgtaccagaaggagcagctgaacacgaggggccggccattccgaggcatgtctgaagaggaggtgttcaccgaggtggccaacctcttccggggccaggaggacctgctctcagagtttggacagttcctgcccgaagccaagcggtctctgttcacaggaaacgggccgtgcgagatgcacagcgtgcagaagaacgagcacgacaagaccccggagcacagcaggaagcgctcccggccctcgctcctccgccccgtgtctgcacccgccaagaaaaaaatgaaacttcgtggtaccaaagacctgtccatcgctgcagtggggaagtacgggactctgcaggaattttctttctttgacaaggtccgccgggtgctgaagagccaggaggtgtatgaaaacttcctccgctgcatcgcactcttcaaccaggagctggtgtctggctctgagctcctgcagctcgtcagcccatttctggggaaatttccagaactctttgcacagttcaagtccttcctgggggtaaaagagctgtccttcgcgccacccatgagcgacagatccggggacgggataagccgggaaattgattatgcatcctgcaagcgcataggatccagctaccgggcactccccaaaacctaccagcagcccaagtgcagtgggaggacagccatctgcaaggaggtactgaacgacacctgggtctccttcccttcctggtctgaggactccacgttcgtcagctccaagaagacaccgtacgaggagcagcttcaccgctgtgaggacgagcgcttcgagttagacgttgtcctggagacgaacctggccacaatccgtgtgttggaaagtgtgcagaagaagctgtctcggatggcgccggaagaccaggagaagttccggctggacgactccctgggaggcacgtcggaggtgatccagcgccgtgccatttatcgcatctatggcgacaaggccccggagatcatcgagagcctcaagaagaaccctgtcaccgctgtccccgttgtcctgaaaagactgaaggccaaggaagaggagtggcgggaggcccagcagggcttcaacaagatctggcgggagcagtatgagaaggcgtacctcaagtcccttgaccaccaggctgtgaacttcaagcagaacgacaccaaggccctgcgctccaagagcttgctcaacgagatcgagagcgtctacgacgagcaccaggagcagcactcggagggccgcagtgccccctctagcgagccgcacctcatctttgtgtacgaggaccggcagatcctggaggacgcagcagcgctcatcagctactacgtgaagcggcagccggccatccagaaggaggaccagggcaccatccaccagctgctgcaccagttcgtgcccagcctcttcttctctcagcagctggacctgggcgcctccgaggagtcagctgatgaggaccgggacagcccccaggggcagaccacagaccccagtgagcggaagaagccggcgccaggaccccacagtagccccccagaggagaagggggccttcggggatgccccggccactgagcagccacccctgccgcccccagccccgcacaagcccctggacgatgtctacagcctattttttgccaacaacaactggtacttcttcctgcgcctgcaccagaccctgtgctccaggctgctgaagatctaccgccaggcgcagaagcagcttctggagtatcggaccgagaaggagcgggagaagctgctgtgtgagggccgcagggagaagggcagcgaccccgccatggagctgcggctgaagcagcccagtgaagtggagctggaggagtactacccggccttcctggacatggtgcggagcctgctggagggcagcatcgaccccacgcagtacgaggacaccctacgcgagatgttcaccatccatgcctacgtgggcttcaccatggacaagctggtgcagaacattgcgcggcagctgcaccacctcgtgagcgatgacgtctgcctgaaggtggtggagctctacctgaacgagaagaagcggggtgccgctggtgggaacctgtcctcccgctgcgtccgcgctgctagggagaccagctaccagtggaaggctgagcgctgcatggccgacgagaactgcttcaaggtgatgttcctgcagcgcaaagggcaggtgatcatgaccatcgagctcctggacaccgaggaggcccagacggaggaccctgtggaggtccagcacctggctcggtacgtggagcagtatgtggggaccgagggcgcgtccagctcgcccactgagggcttcctcctgaaacctgtgttcctgcagaggaacctcaagaagttccgccgccggtggcagagcgagcaggcgcgggccctgcgcggtgaggccaggagctcctggaagcggctggtgggcgtggagagcgcctgcgacgtggactgccgcttcaagctcagcactcacaagatggtgttcatcgtgaactccgaggactacatgtaccgtcgcgggaccctctgccgggccaagcaggtgcagcccctggtcctgctccgccaccaccagcactttgaggagtggcacagccgctggctggaggacaatgtgacggtggaggcggctagcctggtgcaggactggctgatgggtgaggaggacgaggacatggtaccctgcaagacgctgtgtgagacagtgcacgtgcacggcctgcccgtgacccgctaccgcgtgcagtacagccgccgcccggcctcgccctgacccgccctcatgggcaccgggcaggcgcctcacagagcacagacgtgccctcggccttggtcgtgtcggggccgttttcttgaacgacgtgagaggcatctcccagcccctctgctgccggacagcgcactccagggcaggacgccgcccccgtggctcctggtctcctgtgggcctgctgtgtgccaaacctgagctacctgcacccgagccctggggctcagccccaccacaggggcgggtggacgtgctggccgaggaacaagcaatcatgtttgcgtccccgtccgtcacatgtgccaaatccctggcaggcagatggctcctgccccatattcttgccgtgtcttggaaaagtcacaggtgacagccctcctgaggcccacactttggagggggtccatgtccaagagaccctgacaaggaaggagttgagccctgggtaggcttgcttgaaaagtgagtccttccagaatattctcagagctgccagaaacatcatctgagggtttgggcatcagctctgcctggctggtgttcaggccctcagtcactttggaagtgagaagaacccttcagccaaacctttgggatcccattttgaagtccagagctggagcaggcgggcagtgccctgggagaccccgctctggataagacacccaaccccaactccagcagctggactctgggcccacaaggggagggaccccagccagtattccctcagagccggcacgaccctgctgtggggcggcgggcccagtcgtgttcctgcagtgggcaccctaggcgtatgtgtatacacgcacagatatttattcctttcgcttttagtggttgttatttctgtagcagccaagtcctgcggctccctggggctgagatctccctttgtggaactccgagagccgccctgacagtcccagccgccacccaaggagccccatccgcccacccaccctgggacccacgcggccactccagggatcattgttgtccttttgtgaggggctgaggcgactgtcccatggaggcatccaaggctttctgtgccaagaatcccaagtgactggggctggggaccacttctccaggcctctctccccgaccatgagagcccctggccctggcccctgcacaccagtgggcccagaataaccgccacccttgccatcctgcaacagctggactcaagtttccaggaagtggagatgtgtttctagaagtttcctgtggaacctggaggctcctgacgcctttgactccaggctgggcgattccgatgctgacccgtcctcctgggctccccacccccgctccccaagtgtcacacaggcactttgtacacatcctggttttctaagaagggaacttgccatcaagattcctgtaccaggcccacggccgtctcgggcagagccacctgggccccgggtgcagccggagaccccgccgagcccctcctcccagtattcccatccccgcatgcttctagggagcgcctcttttccgttcttgaggaatttctgttctggggcttgtccttcctttgcagctgttttgaatgtagttttccttttctatttatttgcacattaaagttaataattgaatattgacatc

SEQ ID NO: 22358 - DNA, 4481 bp, Homo Sapiens
ggaatttcccgcggagctgacagcgcttgcgctccccctactcgttctaattccacgcgctccaaaatatccgccatggagaaatcttggccaggatgtccattctaggcccatcggtgctgtcttgctgaaggttgggtcaggcatctaaagggactgtggtaagggagggtgtgacacaggtgtaagctgccatcgtcatcatgaactttgagggtctggaccctggactggcagaatatgccccagccatgcattctgccctggaccctgtcttggatgcccacctgaacccaagtctgctacagaatgtggagctggacccagagggagtggccttggaggctcttcccgtccaggaatcagtgcacataatggaaggtgtctactctgaattgcacagcgtggtggctgaagtgggtgtacctgtttccgtctcccactttgacttgcacgaggagatgctgtgggtggggagccacgggggccatgccacttcattttttggcccagccttggagcgctactcatcctttcaagtcaatggcagtgatgatattcggcagatccagagcctggagaatggtatcctttttctcaccaagaacaacctcaagtatatggcccgtgggggcctcattatatttgattacctgctggatgagaatgaggatatgcacagtctcctactgactgacagcagcactctactcgttggtgggctgcagaatcacatactagagattgatcttaacactgtccaggagactcagaagtatgcagtagagacgcctggagtcaccatcatgagacagacaaatcgcttcttcttctgcggccacacgtctggcaaggtttccctgagagacctccgtacttttaaggtggaacatgagtttgatgccttctcaggaagtctgtcagactttgatgtgcatggcaacctgctagctgcctgtggcttctccagccgcctcactggcctggcctgcgaccgtttcctcaaggtgtatgatttgcgcatgatgcgtgccatcacaccacttcaagtacatgtggatcctgccttcttgcgcttcattcctacatatacttctcgtcttgctatcatctctcagtcagggcagtgccaattctgtgaacccacaggcctggccaacccagccgatatctttcatgtgaatcctgtggggcctctgctaatgacatttgatgtgtcagccagcaagcaggctctggcctttggggattctgagggctgtgtgcacctctggactgattccccggagccttccttcaacccctactcccgtgagactgagtttgctttgccgtgtctcgtggactcactgcctcctctggactggagccaggacctgctgcctctttccctcatccctgtcccactcaccactgacacacttctctctgattggcctgctgccaactctgctccagctcccaggcgagcaccacccgtggatgcagagattctgcgcaccatgaagaaggtgggcttcattggctatgcgcccaatccccgcaccaggctgcgcaatcagataccctacagactcaaggagtcagacagtgaatttgacagcttcagccaggtcactgagtcaccagtaggacgagaagaggaaccacatctccacatggtttctaagaaataccgcaaggtgaccatcaaatattccaagctagggctggaggactttgacttcaaacactacaataagaccttgtttgctggattagagccccacattcccaacgcctactgtaactgcatgatccaggtgctctatttcctggagcctgtacgctgtctaattcaaaaccacctttgccagaaggagttctgtctggcatgtgagctgggcttcctgtttcacatgttggacctctctcgtggtgacccttgccagggcaataattttcttcgggcattccgtactattcctgaggcctcagccctcggtctaatcctggctgactcagatgaggcctcaggcaagggcaatctggccaggctcattcagaggtggaatcgcttcattctcactcaactgcatcaagatatgcaggagctggaaataccacaggcttatcgaggtgctggaggcagcttttgctcatcgggggactctgttattgggcagctcttcagctgtgagatggagaactgcagcctctgccgctgtggcagtgagaccgtgcgagcctcatccactctgcttttcacactctcctaccctgatggtagcaaaagtgataaaactgggaagaactatgactttgctcaggtgctgaagcgaagcatctgcctggaccagaatacacaggcctggtgtgacacctgtgaaaagtaccagcccacgattcagacccgcaacatccgccatctgccagatattcttgtcatcaattgtgaggtgaacagctcaaaagaggctgatttctggagaatgcaggctgaggttgccttcaagatggcagtaaagaaacacggtggggaaatctccaagaacaaggaatttgctttggctgattggaaggaactagggagtccagagggtgtgctggtgtgtccctccattgaggagttgaagaacgtctggcttcctttctccattcgcatgaagatgaccaaaaacaaagggctggatgtttgcaattggactgatggggatgagatgcagtggggcccagccagggcagaggaggagcatggtgtctatgtgtatgacctgatggctactgtggtacacatcctggactcacgcacagggggcagcctggtggctcacatcaaagttggagagacctaccaccagcgcaaggagggcgttactcaccagcagtggtatctgttcaatgactttcttattgaacctattgataagcatgaagctgtgcagtttgacatgaattggaaagtacctgcaatcctttattatgtcaaacggaatctcaattccagatacaacctgaacatcaagaaccctattgaggcaagtgtcttgctggctgaagcctcgctggcacggaagcagcggaaaacacatactacctttattccactgatgctgaatgagatgccacagattggggacctggtgggtctggatgctgagtttgtcacccttaatgaggaggaagcagagttacgcagtgatggtaccaagtctaccattaaaccaagccagatgtcagtagccaggattacctgtgttcggggccagggacccaatgagggtatccccttcattgatgactacatctctacccaggagcaggtggtggattacttgactcaatactcgggtataaagcctggtgacctcgatgccaaaatttcctccaagcacctaacaactctcaagtctacctacttaaagcttcgttttctcattgacattggagtcaagtttgtgggtcatggcctgcagaaggacttccgggtcatcaacctgatggtgcccaaggaccaagtccttgacactgtctacctgttccatatgccccgaaaacgaatgatttccctgcgattccttgcttggtactttctggacctgaagattcaaggggaaacccatgacagtattgaggatgcccgcacagcccttcagctgtaccgaaagtatctggagctaagcaaaaatggcactgagcctgagtctttccacaaggtgctcaagggtctttatgagaagggcagaaagatggactggaaggtgcctgagcctgagggccaaacaagtcccaagaatgcagctgtcttctcctcagtgctggcgctctgactacccttcccaaagaaccacggccctctccctttactgttctatagccccagaactgggagatggcttcctaagttggctataccttgtccacttccagtactggacgtgctcagggtctagggtcacagatggtgctattaattgaactggaacacagcagaattgttgcaaaggttctaggagccagattcattccttcttcattctttgcaaaacagtggtacagacatggagtctagaattgacccagatggaaagtaattggtattcttaatatcctgggtgactaatatccaggcagagaagctcctggaaccataactgtaagttcctagctggctagggattgaagtcctggacagtgacagaggataccacagtagttcaagacttagcacaagtcaccaactgcttcagggatacctggaggggccagcaagtagagtgttggtggcccaagcaaaccagtgttgccaataccattgccaaaagggcctttggatcctggacaaagcttggctgccggcttcatttattcctgctgatggctgagaagcatctgtcttccatcccacttgcctgtcccaagttttgttccattttttaaaaatttgttgtaaactgcatgttttataaaataaaaataaaatatcgtttgttatttatctc

SEQ ID NO: 22359 - DNA, 2766 bp, Homo Sapiens
gggcgctcgggcggccctggccggggagacgagttgcatgtgttggttcagctggcgatagcggcgggagcggagccggcggggcctgtgcgaccgcctgggtttgtgaaatggctgctgacatttctgaatccagcggggctgactgcaaaggagacccaaggaacagtgccaagttagatgccgattacccacttcgagtcctttattgtggagtctgttcattaccaacagagtactgtgaatatatgcctgatgttgctaaatgtagacaatggttagagaagaattttccaaatgaatttgcaaaacttactgtagaaaattcacccaaacaagaagctggaattagtgagggtcaaggaacagcaggggaagaagaggagaagaaaaaacagaagagaggtggaaggggtcaaataaaacaaaaaaagaagaccgtaccacaaaaggttactatagccaaaattcccagagcaaagaagaaatatgtgacaagagtatgtggccttgcaacttttgaaattgatcttaaagaagcacaaagattttttgctcaaaaattctcctgtggtgcctcagtaacaggggaggatgaaattatcattcagggagattttacagatgacataattgatgtcattcaggaaaaatggccagaggtagatgatgacagcatcgaagatcttggagaagtaaagaagtgaatttgaaaatttgtctgtatttaatggcctgaactgagagttgatatggccaaagggagagaggccttttaaaatatatatatatatacacatatatatgtatatatacacatatatgtatgtatacacatatacacatgtatatatacatgtgtgtatgtatacatgtatatacatatacacatacacatatatgtatacatatatacacatatatgtatacatatatacacatatatgtatacatatatacacatatatgtatacatatatacacatatatgtatacatatatacacatatatgtatacatatatacacatatattctacagtaaaactgtagactgtcctcgtccttggcattttcactgttctgtacaaggctgcttgtttttttattgccaaagtcaaataaacgggagactgtcatgctcatgcatgaatagaatttagtcaaataaaaaattttggtcatttggtactgactttctctctctctctctctctctctttttttttttttgacagagtctcgcactgttgcctgggctggaatgcagtggtgtgatctcggctcactgcaacctccgcctcccgggttcaagtgattctcctgcctcagcctcccaagtaggtgggattacaggcgcccgccaccacgcccagctaatttttgtatttttagtagagatggggtttcactatgttggccaggctggtctcgaactcctgacctcgtgattggcccacctcagcctcccaaagtgctggtattacagatgtgagccaccgcacccagcctgagtttctctttctctctttttaactttattttttgaaaaacccggtagactttttgtggggagcatttttgttgataattttactgatctaaagctgagtgattttttaaaagaatttgaatttggcttcctcaccagtaatatgtctccttgcttctttgatgtgatagttttgagatgggtgagaatctaatagatctgtggttgaatttgctgtgttgttatgaagtccaccctgtgggcacaataacataactgttggtaggagttgtttgagctattctggagattatttggtaaagtatactaaaagccttaaaaccatgtatgtgcgctgtttgaaccagtaagccacttctttgacattagaagacattagaagaaataatcagccttgcataaaacttatggatgaaagtattcatcacaatattatttataataaaaaattgcaaatgttataaatgaacaattgggaaatggttaaagaagtgatggtgcattgtgtggtagaatattatgcatatgtttaaagaatcatattttctaagattatttggaagcatgtttggtaatgtcaagtggagtaccccagatacattttagacatttatcgtcatcatctgctctgagtggaaggccgttcagagaggctagaggttcttattctggctataaattatgtgagtaaaattgtgctaaccagttaaaagtactgtacacccatgctcaatatatagtcctggaaatagcaattgaaacatgtcttctcacaagagaaaatgacagttttaatgatgtatttgatgaatttaaactttaagtcaggtgctgcaaattggaaagaagacttgtggtgttttaagttgctgtggacacttttaagaaacttagaacccatggaacccttgtttatcgccatgcaaattacaatcttgaatgagtgttttttaaaaataaagtattagaaaaatgtgtagtaaagatgtaaaattaaaaaatggaattctccattaactgtggattttactaaatagaattactggtgaagcagatttatccatcgagactatctggtatgcgttatgtatgtagtctgttgctgctgaaagatgtctgtgtgcccgtatcaacatgtgacttcatgtaaagtttctttgtgttcacagttcttagcaaatgcagttacaatccatagatagccagcagtggatgttactccaggaaaatgcaggattaaaattgtccttgtgt

SEQ ID NO: 22360 - DNA, 2469 bp, Homo Sapiens
ggcaagtgtccttggatattgtcttctgcccatgatcctactttccagctttgcagtgatattttctttgcaaggaatggtaggaatcattctcactgctgggattattggatggtgtagtttttctgcttccaaaatatttatttctgcattagccatggaaggacagcaacttttagtagcatatccttgcgctttgttatatggagtctttgccctgatttccgtcttttgaaaatttatctgggatgtggacatcagtgggccagatgtacaaaaaggaccttgaactcttaaattggaccagcaaactgctgcagcgcaactctcatgcagatttacatttgactgttggagcaatgaaagtaaacgtgtatctcttgttcatttttatagaacttttgcatactatattggatttacctgcggtgtgactagctttaaatgtttgtgtttatacagataagaaatgctatttctttctggttcctgcagccattgaaaaacctttttccttgcaaattataatgtttttgatagatttttatcaactgtgggaaaccaaacacaaagctgataacctttcttaaaaacgacccagtcacagtaaagaagacacaagacggccgggcgtggtagctcacgcctgtaatcccagcactttgggaggccgaggcgggcggatcacaagggcaggagatcgagaccatcctggttaacacggtgaaaccccgactctactaaaactacaaaaaaattagctgggcgtggtggcgggcgcctgtagtcccagctactcaggaggctgaggcaggagaaaagtgtgaacccaggaggcggagcttgcagtgagccgagatcacaccactgcactccatccagcctgggtgacagggtgagactctgtctcaaaaaaaaaaaaaaaaaggagacacaagacttactgcaaaaatatttttccaaggatttaggaaagaaaaattgccttgtattctcaagtcaggtaactcaaagcaaaaaagtgatccaaatgtagagtatgagtttgcactccagaaatttgacattactgtaaattatctcatggaatttttgctaaaattcagagatacgggaagttcacaatctaccttattgtagacatgaaatgcgaacacttacttacatattaatgttaactcaaccttagggacctggaatggttgcattaatgctataatcgttggatcgccacatttcccaaaaataataaaaaaatcactaaccttttttaaggaaaatatttaaagttttacaaaattcaatattgcaattatcaatgtaaagtacatttgaatgcttattaaaactttcccaattaattttaactgtgttattgagtttacttttactaaactactgttctctttgtctcttttttaactaggctctgattttgacccctaatttaagctttaagaatagaaatcagctaatatagaatcagacaaaaaggggattaaatgagcagtttgagttacattattttattgtattaaatttatttgatttatattgtcatgttctcttgccagagagaatctgtaggaaaatactgtatcttgtatagtgatcattggctttttctagaaaaactgtctctgattctggacaaagctcagttatagttacgagaaagatatggtacagggagggaaatactgccttttttttttttttttaaagagattttcagactaaatagaaatgtcaaaatgatgtatcaatggttcttttttagaacaagttttcaaagcataaaaagaggttgagagaaataacatatttattgattcacataagtatgtttttcttcattaatcgtctggagaaacccacttgtcattaatttgttttgggctaggttttcaaacttaccaaattgctttaaaaaagcaatttggaaggtaatttgataggctttccaacttaaccaaattttttattgtaattcttggatagtatttttgtctttttcaattcatttgtctttttcagtatagtttttgttaaggcaaatgtcttcccttaatatccaaatattgctaataaacggtagaagatgctttggaaattaaaattatctcgctgttggttagacttaacactgttaatcttcagccaaatatcacatatggatcaaattattttcttttttgttgtttaccctatcctcaacaacatttttagtttaaattattgtagagattttttttgtggtggttattttttattttgctccaaaataataaggtgcaaagctattttatgcttaactgttgctctgtcaaaacagctatgcagtggagttgcatttgatgttctagagtttgattacatgcagagttgtatatagccaaaacttctcttatcaaactctgttatgtaggcatatttatatatacattaaagactgttgtactgtgtctc

SEQ ID NO: 22361 - DNA, 3159 bp, Homo Sapiens
atggaaggatccgagcctgtggccgcccatcagggggaagaggcgtcctgttcttcctgggggactggcagcacaaataaaaatttgcccattatgtcaacagcatctgtggaaatcgatgatgcattgtatagtcgacagaggtacgttcttggagacacagcaatgcagaagatggccaagtcccatgttttcttaagtgggatgggtggtcttggtttggaaattgcaaagaatcttgttcttgcagggattaaggcagttacaattcatgatacagaaaaatgccaagcatgggatctaggaaccaacttctttctcagtgaagatgatgttgttaataagagaaacagggctgaagctgtacttaaacatattgcagaactaaatccatacgttcatgtcacatcatcttctgttcctttcaatgagaccacagatctctcctttttagataaataccagtgtgtagtattgactgagatgaaacttccattgcagaagaagatcaatgacttttgccgttctcagtgccctccaattaagtttatcagtgcagatgtacatggaatttggtcaaggttattttgtgatttcggtgatgaatttgaagttttagatacaacaggagaagaaccaaaagaaattttcatttcaaacataacgcaagcaaatcctggcattgttacttgccttgaaaatcatcctcacaaactggagacaggacaattcctaacatttcgagaaattaatggaatgacaggtttaaatggatctatacaacaaataacggtgatatcgccattttcttttagtattggtgacaccacagaactggaaccatatttacatggaggcatagctgtccaagttaagactcctaaaacagttttttttgaatcactggagaggcagttaaaacatccaaagtgccttattgtggattttagcaaccctgaggcacctttagagattcacacagctatgcttgccttggaccagtttcaggagaaatacagtcgcaagccaaatgttggatgccaacaagattcagaagaactgttgaaactagcaacatctataagtgaaaccttggaagagaagcctgatgtaaatgctgacattgtgcattggctctcttggactgcccaaggctttttatctccacttgctgcagcagtaggaggtgttgccagccaagaagtattgaaagctgtaacaggaaaattttctcctttgtgccagtggttatatcttgaagcagcagatattgttgaatcactaggcaaacctgaatgtgaagaatttctcccacgaggagatagatatgatgccttaagagcttgcattggagacactttgtgtcagaaactgcaaaatttaaacatcttcttagtagggtgtggagccataggctgtgaaatgttgaaaaattttgctttacttggtgttggcacaagcaaagagaaaggaatgattacagttacagatcctgacttgatagagaaatccaacttaaatagacagttcctatttcgtcctcatcacatacagaaacctaaaagctacactgctgctgatgctactctgaaaataaattctcaaataaagatagatgcacacctgaacaaagtatgtccaaccactgagaccatttacaatgatgagttctatactaaacaagatgtaattattacagcattagataatgtggaagccaggagatacgtagacagtcgttgcttagcaaatctaaggcctcttttagattctggaacaatgggcactaagggacacactgaagttattgtaccgcatttgactgagtcttacaatagtcatcgggatcccccagaagaggaaataccattttgtactctaaaatcctttccagctgctattgaacataccatacagtgggcaagagataagtttgaaagttccttttcccacaaaccttcattgtttaacaaattttggcaaacctattcatctgcagaagaagtcttacagaagatacagagtggacacagtttagaaggctgttttcaagttataaagttacttagcagaagacctagaaattggtcccagtgtgtagaattagcaagattaaagtttgaaaaatattttaaccataaggctcttcagcttcttcactgtttccctctggacatacgattaaaagatggcagtttattttggcagtcaccaaagaggccaccctctccaataaaatttgatttaaatgagcctttgcacctcagtttccttcagaatgctgcaaaactatatgctacagtatattgtattccatttgcagaagaggacttatcagcagatgccctcttgaatattctttcagaagtaaagattcaggaattcaagccttccaataaggttgttcaaacagatgaaactgcaaggaaaccagaccatgttcctattagcagtgaagatgagaggaatgcaattttccaactagaaaaggctattttatctaatgaagccaccaaaagtgaccttcagatggcagtgctttcatttgaaaaagatgatgatcataatggacacatagatttcatcacagctgcatcaaatcttcgtgccaaaatgtacagcattgaaccagctgaccgtttcaaaacaaagcgcatagctggtaaaattatacctgctatagcaacaaccactgctacagtttctggcttggttgccttggagatgatcaaagtaactggtggctatccatttgaagtttacaaaaattgttttcttaacttagccattccaattgtagtatttacagagacaactgaagtaaggaaaactaaaatcagaaatggaatatcatttacaatttgggatcgatggaccgtacatggaaaagaagatttcaccctcttggatttcataaatgcagtcaaagagaagtatggaattgagccaacaatggtggtacagggagtcaaaatgctttatgttcctgtaatgcctggtcatgcaaaaagattgaagttaacaatgcataaacttgtaaaacctactactgaaaagaaatatgtggatcttactgtgtcatttgctccagacattgatggagatgaagatttgccgggacctccagtaagatactacttcagtcatgacactgattaa

SEQ ID NO: 22362 - DNA, 2129 bp, Homo Sapiens
ccgctttcgtctccgtcctgctgccgttaccgccgctgctgccgccgcttgcgtcccccgctccggtctgtggtgcagccgggacccaggaccatgtctctgtctcgctcagaggagatgcaccggctcacggaaaatgtctataagaccatcatggagcagttcaaccctagcctccggaacttcatcgccatggggaagaattacgagaaggcactggcaggtgtgacgtatgcagccaaaggctactttgacgccctggtgaagatgggggagctggccagcgagagccagggctccaaagaactcggagacgttctcttccagatggctgaagtccacaggcagatccagaatcagctggaagaaatgctgaagtcttttcacaacgagctgcttacgcagctggagcagaaggtggagctggactccaggtatctgagtgctgcgctgaagaaataccagactgagcaaaggagcaaaggcgacgccctggacaagtgtcaggctgagctgaagaagcttcggaagaagagccagggcagcaagaatcctcagaagtactcggacaaggagctgcagtacatcgacgccatcagcaacaagcagggcgagctggagaattacgtgtccgacggctacaagaccgcactgacagaggagcgcaggcgcttctgcttcctggtggagaagcagtgcgccgtggccaagaactccgcggcctaccactccaagggcaaggagctgctggcgcagaagctgccgctgtggcaacaggcctgtgccgaccccagcaagatcccggagcgcgcggtgcagctcatgcagcaggtggccagcaacggcgccaccctccccagcgccctgtcggcctccaagtccaacctggtcatttccgaccccattccgggggccaagcccctgccggtgccccccgagctggcaccgttcgtggggcggatgtctgcccaggagagcacacccatcatgaacggcgtcacaggcccggatggcgaggactacagcccgtgggctgaccgcaaggctgcccagcccaaatccctgtctcctccgcagtctcagagcaagctcagcgactcctactccaacacactccccgtgcgcaagagcgtgaccccaaaaaacagctatgccaccaccgagaacaagactctgcctcgctcgagctccatggcagccggcctggagcgcaatggccgtatgcgggtgaaggccatcttctcccacgctgctggggacaacagcaccctcctgagcttcaaggagggtgacctcattaccctgctggtgcctgaggcccgcgatggctggcactacggagagagtgagaagaccaagatgcggggctggtttcccttctcctacacccgggtcttggacagcgatggcagtgacaggctgcacatgagcctgcagcaagggaagagcagcagcacgggcaacctcctggacaaggacgacctggccatcccaccccccgattacggcgccgcctcccgggccttccccgcccagacggccagcggcttcaagcagaggccctacagtgtggccgtgcccgccttctcccagggcctggatgactatggagcgcggtccatgagcagcgccgatgtggaagtggccagattctgagccgcctgactagagttagaatccctttgcccacgtccagctgaagccgacagtgaccaacgacaggtctgcccccctcctcagctgatggccacatctgcagtgctgcccatctggtggcttcccccgcccttcccatgtagcctgttctgtcatcatctgtgcgttcctgtgtagagaacatccaggccccggctgcctggtcttgccccacttgagtctggcctggactggatcccagctgttctaggcagggccgggcagagtggggcgcaggcccctgaagggcgagacccagtggctgggctgcccagggctgaggggccgcctcttgagggtacacgcctctggtcacatggccatggagccttgggtacccctgagttaagggaggacatttggccagctggtggctgggaggggagcctggctgccctgctgcttctcctgcctaataaacaggcttctcctgc

SEQ ID NO: 22363 - DNA, 2788 bp, Homo Sapiens
tcgaggtttcgggccgaggatgccagcccccatcagattgcgggagctgatccggaccatccggacagcccgaacccaagctgaagaacgagaaatgatccagaaagaatgtgctgcaatccggtcatcttttagagaagaagacaatacataccgatgtcggaatgtggcaaaattactgtatatgcacatgctgggctaccctgctcactttggacagttggagtgcctcaagcttattgcctctcaaaaatttacagacaaacgcattggctatttaggggcaatgctgctgttagatgaaagacaagatgtccatcttctcatgaccaactgtatcaagaatgatcttaatcatagcacgcaattcgtacaggggttagcactttgtaccctcggctgcatgggctcctcagagatgtgcagagatcttgcaggagaggtagagaagctcctgaaaacctccaactcttacttaagaaaaaaggcagcactgtgtgctgttcatgtcatcaggaaagttcctgaacttatggagatgtttttaccagcaacaaaaaatttattgaatgagaagaaccatggtgtcctccacacatctgtagtcctcctcacagaaatgtgtgagcgaagcccagacatgcttgcgcatttcagaaagcttgtgccccaattagttcgtattttaaagaacctcatcatgtccggatattcaccagaacatgatgtttctggtatcagtgacccctttttgcaggtacgaattttgcggttattaagaattttaggacgaaatgatgatgattcaagtgaagctatgaatgatatattagcacaggttgccactaatactgagactagtaaaaatgtaggaaatgctattctttatgaaacggttttgactatcatggatattaagtcagagagtggattgcgagtcctagccataaatatcctgggtcgtttcttattgaacaatgacaagaatattagatatgtggctctgacatctttgttgaagactgtacagacagatcataatgcagtacagaggcacagaagcacaattgtggactgtcttaaagatttggatgtctcaataaaacggcgtgcaatggaattgagttttgccctggtaaatgggaataatatccgaggcatgatgaaagaattactttattttctggattcgtgtgagccagaatttaaagcagactgtgcatctggaatctttcttgctgcagaaaagtatgcaccttccaaacgatggcatatagacacaattatgcgtgttttgacaacggcaggaagttatgttcgtgatgatgcagtccccaatttaatccagttaataactaatagtgtggagatgcatgcctatactgtccagcgcctgtacaaagcaattcttggtgattattctcaacaacctttggtacaagtggctgcatggtgtataggtgaatatggtgatcttcttgtatctggccagtgtgaagaggaagagcctattcaggtaacagaggatgaagtgttggatattttagaaagtgtcctaatctctaatatgtccacctctgtgacacgaggttatgccctcactgccattatgaagctttccactcgattcacttgtactgtaaaccgaattaagaaagtggtttccatctatggaagcagcattgatgtggaactccagcagagggcagtagaatataatgcacttttcaagaaatatgaccacatgaggtctgccctacttgagagaatgcctgtcatggaaaaagtgaccacaaatggccctactgagattgtgcagacaaatggagagacagaaccagctccactagagaccaaaccgccaccctctgggccacagcccaccagccaggccaatgatttattggatttgttgggaggaaatgacataacacctgttattccaactgcgcctacaagcaaaccatcttctgctggtggagaacttcttgatttgctgggagacatcaaccttacaggtgctccagctgctgctcctgcccctgcctcagtcccacagatatcccagccccacttcttgttggatgggctttcatcacagcctctcttcaatgatattgctgcaggcatcccctccatcacagcatacagtaagaatggcttgaagatagaattcacctttgaacggtcaaataccaaccccagtgtaacagtgataacgatacaggcctccaacagcacagagctagatatgacggactttgttttccaagctgcagtaccaaagacattccagctgcagctcttgtctcctagcagcagcattgtcccagcatttaacacggggaccatcacacaagtcattaaagttctgaaccctcagaagcaacagctgcgaatgcggatcaagcttacatataatcacaagggctcagcaatgcaagatctagcagaggtgaacaactttccccctcagtcctggcaatgagggtttggcaccattctcattctttatcccactcaatcaaaggaactctgggaaggaggttgtgattgctggcaagtcccccccaactgtaccacgggcatgaggagctgaagagaactgctgaggaggattttcctaaagttactgctgaccttgaagcattgttaaagactaatgtcctctcctccactgttgaggctggctgcttctggaggctactttgcactcttcctcttctcctttttccgcacttctccacccctcccacatttacagccagaatcaacattccctgggccc

SEQ ID NO: 22364 - DNA, 697 bp, Homo Sapiens
tatacctctagtttggagctgtgctgtaaaaacaagagtaacatttttatattaaagttaaataaagttacaactttgaagagagtttctgcaagacatgacacaaagctgctagcagaaaatcaaaacgctgattaaaagaagcacggtatgatgaccaaacataaaaagtgttttataattgttggtgttttaataacaactaatattattactctgatagttaaactaactcgagattctcagagtttatgcccctatgattggattggtttccaaaacaaatgctattatttctctaaagaagaaggagattggaattcaagtaaatacaactgttccactcaacatgccgacctaactataattgacaacatagaagaaatgaattttcttaggcggtataaatgcagttctgatcactggattggactgaagatggcaaaaaatcgaacaggacaatgggtagatggagctacatttaccaaatcgtttggcatgagagggagtgaaggatgtgcctacctcagcgatgatggtgcagcaacagctagatgttacaccgaaagaaaatggatttgcaggaaaagaatacactaagttaatgtctaagataatggggaaaatagaaaataacattattaagtgtaaaaccagcaaagtacttttttaattaaacaaagttcgagttttgtac

SEQ ID NO: 22365 - DNA, 1451 bp, Homo Sapiens
actgcctggaaacgggctgggcctgcctcggacgccgccggtgtcgcggattctctttccgcccgctccatggcggtggatgcctgactggaagcccgagtgggatgcggctgacgcggaagcggctctgctcgtttcttatcgccctgtactgcctattctccctctacgctgcctaccacgtcttcttcgggcgccgccgccaggcgccggccgggtccccgcggggcctcaggaagggggcggcccccgcgcgggagagacgcggccgagaacagtccactttggaaagtgaagaatggaatccttgggaaggagatgaaaaaaatgagcaacaacacagatttaaaactagccttcaaatattagataaatccacgaaaggaaaaacagatctcagtgtacaaatctggggcaaagctgccattggcttgtatctctgggagcatatttttgaaggcttacttgatcccagcgatgtgactgctcaatggagagaaggaaagtcaatcgtaggaagaacacagtacagcttcatcactggtccagctgtaataccagggtacttctccgttgatgtgaataatgtggtactcattttaaatggaagagaaaaagcaaagatcttttatgccacccagtggttactttatgcacaaaatttagtgcaaattcaaaaactccagcatcttgctgttgttttgctcggaaatgaacattgtgataatgagtggataaacccattcctcaaaagaaatggaggcttcgtggagctgcttttcataatatatgacagcccctggattaatgacgtggatgtttttcagtggcctttaggagtagcaacatacaggaattttcctgtggtggaggcaagttggtcaatgctgcatgatgagaggccatatttatgtaatttcttaggaacgatttatgaaaattcatccagacaggcactaatgaacattttgaaaaaagatgggaacgataagctttgttgggtttcagcaagagaacactggcagcctcaggaaacaaatgaaagtcttaagaattaccaagatgccttgcttcagagtgatctcacattgtgcccggtcggagtaaacacagaatgctatcgaatctatgaggcttgctcctatggctccattcctgtggtggaagacgtgatgacagctggcaactgtgggaatacatctgtgcaccacggtgctcctctgcagttactcaagtccatgggtgctccctttatctttatcaagaactggaaggaactccctgctgttttagaaaaagagaaaactataattttacaagaaaaaattgaaagaagaaaaatgttacttcagtggtatcagcacttcaagacagagcttaaaatgaaatttactaatattttagaaagctcatttttaatgaataataaaagttaattatctttttgagct

SEQ ID NO: 22366 - DNA, 4221 bp, Homo Sapiens
cagcccgagcccgagcccgagcccgagccggcgccaccgcgcccccggccatggcttttgccaatttccgccgcatcctgcgcctgtctaccttcgagaagagaaagtcccgcgaatatgagcacgtccgccgcgacctggaccccaacgaggtgtgggagatcgtgggcgagctgggcgacggcgccttcggcaaggtttacaaggccaagaataaggagacgggtgctttggctgcggccaaagtcattgaaaccaagagtgaggaggagctggaggactacatcgtggagattgagatcctggccacctgcgaccacccctacattgtgaagctcctgggagcctactatcacgacgggaagctgtggatcatgattgagttctgtccagggggagccgtggacgccatcatgctggagctggacagaggcctcacggagccccagatacaggtggtttgccgccagatgctagaagccctcaacttcctgcacagcaagaggatcatccaccgagatctgaaagctggcaacgtgctgatgaccctcgagggagacatcaggctggctgactttggtgtgtctgccaagaatctgaagactctacagaaacgagattccttcatcggcacgccttactggatggcccccgaggtggtcatgtgtgagaccatgaaagacacgccctacgactacaaagccgacatctggtccctgggcatcacgctgattgagatggcccagatcgagccgccacaccacgagctcaaccccatgcgggtcctgctaaagatcgccaagtcagaccctcccacgctgctcacgccctccaagtggtctgtagagttccgtgacttcctgaagatagccctggataagaacccagaaacccgacccagtgccgcgcagctgctggagcatcccttcgtcagcagcatcaccagtaacaaggctctgcgggagctggtggctgaggccaaggccgaggtgatggaagagatcgaagacggccgggatgagggggaagaggaggacgccgtggatgccgcctccaccctggagaaccatactcagaactcctctgaggtgagtccgccaagcctcaatgctgacaagcctctcgaggagtcaccttccaccccgctggcacccagccagtctcaggacagtgtgaatgagccctgcagccagccctctggggacagatccctccaaaccaccagtcccccagtcgtggcccctggaaatgagaacggcctggcagtgcctgtgcccctgcggaagtcccgacccgtgtcaatggatgccagaattcaggtagcccaggagaagcaagttgctgagcagggtggggacctcagcccagcagccaacagatctcaaaaggccagccagagccggcccaacagcagcgccctggagaccttgggtggggagaagctggccaatggcagcctggagccacctgcccaggcagctccagggccttccaagagggactcggactgcagcagcctctgcacctctgagagcatggactatggtaccaatctctccactgacctgtcgctgaacaaagagatgggctctctgtccatcaaggacccgaaactgtacaaaaaaaccctcaagcggacacgcaaatttgtggtggatggtgtggaggtgagcatcaccacctccaagatcatcagcgaagatgagaagaaggatgaggagatgagatttctcaggcgccaggaactccgagagcttcggctgctccagaaagaagagcatcggaaccagacccagctgagtaacaagcatgagctgcagctggagcaaatgcataaacgttttgaacaggaaatcaacgccaagaagaagttctttgacacggaattagagaacctggagcgtcagcaaaagcagcaagtggagaagatggagcaagaccatgccgtgcgccgccgggaggaggccaggcggatccgcctggagcaggatcgggactacaccaggttccaagagcagctcaaactgatgaagaaagaggtgaagaacgaggtggagaagctcccccgacagcagcggaaggaaagcatgaagcagaagatggaggagcacacgcagaaaaagcagcttcttgaccgggactttgtagccaagcagaaggaggacctggagctggccatgaagaggctcaccaccgacaacaggcgggagatctgtgacaaggagcgcgagtgcctcatgaagaagcaggagctccttcgagaccgggaagcagccctgtgggagatggaagagcaccagctgcaggagaggcaccagctggtgaagcagcagctcaaagaccagtacttcctccagcggcacgagctgctgcgcaagcatgagaaggagcgggagcagatgcagcgctacaaccagcgcatgatagagcagctgaaggtgcggcagcaacaggaaaaggcgcggctgcccaagatccagaggagtgagggcaagacgcgcatggccatgtacaagaagagcctccacatcaacggcgggggcagcgcagctgagcagcgtgagaagatcaagcagttctcccagcaggaggagaagaggcagaagtcggagcggctgcagcaacagcagaaacacgagaaccagatgcgggacatgctggcgcagtgtgagagcaacatgagcgagctgcagcagctgcagaatgaaaagtgccacctcctggtagagcacgaaacccagaaactgaaggccctggatgagagccataaccagaacctgaaggaatggcgggacaagcttcggccgcgcaagaaggctctggaagaggatctgaaccagaagaagcgggagcaggagatgttcttcaagctgagcgaggaggcggagtgcccaaacccctccaccccaagcaaggccgccaagttcttcccctacagttctgcggatgcttcttaacaaccgcccggggctgtggctggcagcttggtgggccccagggccttctccttcattctctgtgaacatgtaactcaggaccccttttccctcttgcgtctgtgccagctcaaatccagcccctcgccctgtgccaccccaactgtgcctgatagacctgccccagcgttcctgacttcttgctggcctgtggagggtgaggtgtaattatttgtcacctgaacctaatgtatattctccttgagccccagatcccttcaagctggaagggatggggctgttggtggggtcagggtccaagaggaatgggtgttctgtggcctcgagtcctctcctgtttgcgaaaataccagttttgctctctgtgggacaaagcactgctgatgaagtccccgtgggctcatccgggctggaattcttggtttttcagccattccctgcagagtcactcaatcatcaagtccctcacagccatttctgttcccagaggagccaggcctgcagctggctgctcaggagatggcctcattcctcctgttctcccagtttgctttccacttaagacaaagccttgtctatgtggggggcggggaccggggaaagagggaggctgaaatgtttattctgcttctcccgtgtttcatgccatctcgcgtcccccttcctgcacatgggtgtgaatgcacacacatacgcgtacacacaggacttggtctgctggcctggcctcttctgcccaggtgggttggaacacgtttgctgcctgagcctgtgccactgagcatgttaggtggagcagttggtgtggcacgtgcggggtgttggcaccggaggcatggaaaagcacaggctgtactgccaggctgcgatgcgtgctggcccccgcacaggctcctgtgtgcagggactgattcctcagcacacgaggcttccacaacccagtctgctccatagcactctggcccaccctgtctgcaggtgaaacaggagggctgtttgcctctgccccatccccccgactgtgttcaggagtcccaccttgcatttcagacctgggctggcagtctgttggacttctcttcaggaagaaaaagcatcagggggaaatggaatgcccctgccccaggaacatggcagaagcacaggttctgtacctcagatggactcctgctgggccttcggggtctcagttggcttcccccagattctgattctacagctgcagaatgtatataacacaataaaagcaaatgtttgaaccagt

SEQ ID NO: 22367 - DNA, 5792 bp, Homo Sapiens
aaagttcatccccccagaatgaaaatgaggacatttgagaaggtgatttaaggtgtggacatttgagaaggtgtcctatcaaattagtaaaccaaaggaaaagtactgaatagattaatccaaaacacttactgttttttaaacgaagaggatttcaccttgacagaaaaacaacttttattcaatatgtatttcctgaaattaaagagacaagtacagactgaaaggaaaatagattcgtaaataagctacgtcaactctatcctgctgaggatagctcagtgatgttaaatcctttacaaatccctggttgtcttcctacagacaagactgctttttgatgggactgatattaagagaaataggacctttggggcattcaactccttgataaaacttaaaagtatcggcatgagtggcttaacagaggaaataaagaagttttcaactaaatccaaaagtgcggtcattttctttactgctgttattttaaaaacctcttcataaccattgaaaaagaatcgacaactattttaaaagattaaagaaaggcagatgtctgcaaataattcccctccatcagcccagaagtctgtattacccacagctattcctgctgtgcttccagctgcttctccgtgttcaagtcctaagacgggactctctgcccgactctctaatggaagcttcagtgcaccatcactcaccaactccagaggctcagtgcatacagtttcatttctactgcaaattggcctcacacgggagagtgttaccattgaagcccaggaactgtctttatctgctgtcaaggatcttgtgtgctccatagtttatcaaaagtttccagagtgtggattctttggcatgtatgacaaaattcttctctttcgccatgacatgaactcagaaaacattttgcagctgattacctcagcagatgaaatacatgaaggagacctagtggaagtggttctttcagctttagccacagtagaagacttccagattcgtccacatactctctatgtacattcttacaaagctcctactttctgtgattactgtggtgagatgctgtggggattggtacgtcaaggactgaaatgtgaaggctgtggattaaattaccataaacgatgtgccttcaagattccaaataactgtagtggagtaagaaagagacgtctgtcaaatgtatctttaccaggacccggcctctcagttccaagacccctacagcctgaatatgtagcccttcccagtgaagagtcacatgtccaccaggaaccaagtaagagaattccttcttggagtggtcgcccaatctggatggaaaagatggtaatgtgcagagtgaaagttccacacacatttgctgttcactcttacacccgtcccacgatatgtcagtactgcaagcggttactgaaaggcctctttcgccaaggaatgcagtgtaaagattgcaaattcaactgccataaacgctgtgcatcaaaagtaccaagagactgccttggagaggttactttcaatggagaaccttccagtctgggaacagatacagatataccaatggatattgacaataatgacataaatagtgatagtagtcggggtttggatgacacagaagagccatcacccccagaagataagatgttcttcttggatccatctgatctcgatgtggaaagagatgaagaagccgttaaaacaatcagtccatcaacaagcaataatattccgctaatgagggttgtacaatccatcaagcacacaaagaggaagagcagcacaatggtgaaggaagggtggatggtccattacaccagcagggataacctgagaaagaggcattattggagacttgacagcaaatgtctaacattatttcagaatgaatctggatcaaagtattataaggaaattccactttcagaaattctccgcatatcttcaccacgagatttcacaaacatttcacaaggcagcaatccacactgttttgaaatcattactgatactatggtatacttcgttggtgagaacaatggggacagctctcataatcctgttcttgctgccactggagttggacttgatgtagcacagagctgggaaaaagcaattcgccaagccctcatgcctgttactcctcaagcaagtgtttgcacttctccagggcaagggaaagatcacaaagatttgtctacaagtatctctgtatctaattgtcagattcaggagaatgtggatatcagtactgtttaccagatctttgcagatgaggtgcttggttcaggccagtttggcatcgtttatggaggaaaacatagaaagactgggagggatgtggctattaaagtaattgataagatgagattccccacaaaacaagaaagtcaactccgtaatgaagtggctattttacagaatttgcaccatcctgggattgtaaacctggaatgtatgtttgaaaccccagaacgagtctttgtagtaatggaaaagctgcatggagatatgttggaaatgattctatccagtgagaaaagtcggcttccagaacgaattactaaattcatggtcacacagatacttgttgctttgaggaatctgcattttaagaatattgtgcactgtgatttaaagccagaaaatgtgctgcttgcatcagcagagccatttcctcaggtgaagctgtgtgactttggatttgcacgcatcattggtgaaaagtcattcaggagatctgtggtaggaactccagcatacttagcccctgaagttctccggagcaaaggttacaaccgttccctagatatgtggtcagtgggagttatcatctatgtgagcctcagtggcacatttccttttaatgaggatgaagatataaatgaccaaatccaaaatgctgcatttatgtacccaccaaatccatggagagaaatttctggtgaagcaattgatctgataaacaatctgcttcaagtgaagatgagaaaacgttacagtgttgacaaatctcttagtcatccctggctacaggactatcagacttggcttgaccttagagaatttgaaactcgcattggagaacgttacattacacatgaaagtgatgatgctcgctgggaaatacatgcatacacacataaccttgtatacccaaagcacttcattatggctcctaatccagatgatatggaagaagatccttaatcactgagctaacctaaataaggaaggatttcattttatggactgatattttgctgtgtaacttgttcttcgtagattgtcatctgcagtgctgcaaagatatgaagaaatatgataacgaataagtgacaccagtactgtagttcataatgagtaggtacaggcgggaaactgaataataagaagtcataatggaatcaaggtgaagctttttataaacttttttagcctaagcaataactggttttgtattttttcttaatccttcactttaatacaataggctcacttaatttgtcttcccatttctctttatatatatatatatatataaaaaaatataaatatatgtttgtttgtttgtttttttaaggaaaaacaagtcaagctagcatccagttactatatagcttggctaaattatacaagacttacaagattgattactcgacaggcttgtatttaagagataactgtgaggttaccattatgtgatgttactataaggacttttaacattggtttaacaaaccatagaggcattgaagggtttttcttagatgcctagaaaaagcacactgggctgttttacctttcttttttaggtcaatcaagactccaaaatagtgattcctaacctttttggagttgctctgctactctgaatatgttctatacagcataaggattgtcaccttctgtgtgttgcaacagcttctaagataattagggacaaatgatgttacaaaaggaagagtactgctggtctaagtgctgagttgtatgtctttgcatagctccactctgctgctaaatatgcatgttctgactgacaccatcttgatgccagtactggattccagcattcagcaggtgcagatctcggctttacacaatttatctttacctagggttcagtcagtaatttctgctttttagccagggccagtgcagggtcagttaatgctacagttactgtatagcaaacagtatccttttttctccttcccctagcctattgggctttgcagatatctggagtgttttaaagtcaattattttaagcagtttgaggggatgtgtaggagtggagcatgaaacagtttataaggctggggctgtattatcagcacagcaaattaaagaatgaaagaagtacttctttttacatttcagctccagcagccagctatttaaaaaatatttttaaatatcttccccaaagtttaagatgtgggaccatctacttgtaagaaacagtggcttatttcttcatttctcagtaatcattgtaaacctttttttttttcttctccactctaacaaaagtaaaagaacaaaacttttgctgaggtcttggactccactacttgttagttatgttggcctggacagatggcaggtctgtcggcagttcctcagtctgtaaaatgaagattatcattcttgcctctccctttgtcacagtgttgtcgtgaagatcagatatgtatgaatgcagtcaaataaactaaaaactaggaaagtgttaactatcgttgcccaccgaatttgaggtagcaaaaaaaaaaaagaatgttctggtacatgaacagactgagaaggcctttcgacatccctgaagctagtctcctgtctagactaaaaatatccttgaaagaatagtagcaaacagtatgcagtactcctgtgttctaagttcttttatgttttagtttaccctcacagcagccatagtgttaagtcattatgagcttcatcttaaagataagaaaactgaggcaaggggagattaacttactgccaaatttcaaacagttagtagtatttgagaccagtagtatggctctaatcttacccttagccctcccaaccattatgctgtactatctacccataaatacctccaggaaacattcccctcttggtaatttgtccttctatagaagcttcaaagattaaatcaaattaattttcaaaaaaaatttttttttagaaatgttattttccctgtgatagaggatgacttcccagtttcaccaaagtctgtttatatcaacacacacaaaatggaataattctgagtcactaggcaatcaatctactgtggttttactatgtaaggtgaaaattaactggaacgatgtttgtttgctatacttacatagtcaaactttacaagccatgaaattaattgcactctttgtatttgttgttaaatgcctaagaagttttctaaaaattttgtaaaggcactgtcagagaatctggagttgaatgattattccagatactgtataacctgcataactttttgtctttaagtcgtgtttgtaaaagaagtaattgctagaaacatttgataatgtacaaagtagtctataatgactgttcagtacatttttaatatttttttggttatatccaactttttgtaaatatactggaagcttgataataaaatgtatttcctatcaccatacttttccatgtgaaaacctgagcctatttctagtataagtatccaaagaaaagttttacctggttgtgttattttaccagac

SEQ ID NO: 22368 - DNA, 14728 bp, Homo Sapiens
gtcgacctgcaggtcaacggatcaggcgtctgccccacccagggcgggtaaggtctgcaagcccccttacccaggggacctggggctgctggagtctcccatccagccacctccctcgactctagtgtggccaggaagctacagcctgccaggttttgggtggacctggttggtgtgggatgaccccctaagcccaaacaggtgtggtatgtggggtgcgtggtggtgggtcacactgcccacagccatcttcacagactccaagggtggcagcaccaggctgtgtccagggaggccagccacaggccagacaggcagcctctggacatgcagacagagagatggaagcggccggccgggcgggagcctgaagcagccttacccaggaattgcaggggttggggtggcgagcagtcgcggcgcctcagcctaagtggcttttaggggcagctgccgggatatgggcacccagggggccatggcccaggaggctgcccagaggcgagccctgtgcttgggtgggggcaggggagcccagcccagggccccggagagacgagagggagaggaggactgcgccaagcctgcttctacggctcacatggggaattgcctgggctggctgtgcctgacccctgggaaccaggtatgtgcaagggggcctggctgggctggggaggagggcagactggggctgtgcctggactcagctaccttcctatattggagacagaggaagagctgggtggtgaagatagcatggactccgaatctcacatccctgggcccaaatggagctgaggaggcttcgtgggtcttttccctctccaggcctgtttgcaggtctgtgaagtggccggtcccctagggttgttccaggtaaaatgcacttaggcctaaatgatttcactgtggtggtgactgtcctgttggggaaggagggacactcgtgcttcaggtagaggctgagggacgtggacggctgtgggcaggggaggggaggcctgctgcctgcctgtggacactgtggagcagcgcctgtgcacacccagagcttagagcccaaataattcagtggagtgtagcccatgtcaggaggtgggtagcagggaccctcgagactcatatccttttgtcaccctgcaaagtcacagtccaggcctggggtgggctgggacacaagtgagggggccggcccggccaagggaaagaatggcagcagggcgtgggaaccgacgcggtgcagataggccgaacacggtgggtaggccagggagtctcccagccactggcccccaggatgcagggaggggctgctgcgtgtcacttttaaagccctttttgcctcctgggccctcctgagactctgccctgggccagggagtctcccagccactggctgggagggatccaggtgagacacagccgagaggagacaggcaagggggtccggaagggcttcccggggagggtggggagggctgtggcccttgttcttaccctttggcccctttgtcggggtcccttggcctggagaccctttgtccaacccgtcgcccacctcaagacctgcctcgatgctgcgcatacagtaggtatccaataaatgttcctgggatagaaggcaaaggcgctggcaccaaggcggctgcccagagtaggggcgagacagagaggtcccggtggttaaggggtcccctagccctgccgcctccccctgccccgcctcgggctggccgggcgcggaggtaggggcctggccgggacggctgggactggaggcgggggcggccgggcggcgggggcggggaaggggcgggcgcggaggcggtgccgcagcccgagccggagcccgagccggatcccgaggcgacgggagccgaacaggagccgccgctgaagccaccgccgggtgcccagcgccgccgccgcccccgagctcccccgcgcccctgcccgcgggcggccggtgggcagcgggcgccatggccgcgccggagccgctgcggccgcgcctgtgccgcttggtgcgcggagagcagggctacggcttccacctgcacggcgagaagggccgccgcgggcagttcatccggcgcgtggaacccggttcccccgccgaggccgccgcgctgcgcgctggggaccgcctggtcgaggtcaacggcgtcaacgtggagggcgagacgcaccaccaggtgggggccagcgctcgcccccggcccgccgccccctccccgagcgcgtccccctggggcgagcaggggtcgcacgggggcccgagggggctcccgcggggaggacgcggacgttgtcgggaggcagcggcccggcgccttcggagtcccggcgcaggaagctcagtcctgcacgggggtgggggggggcatcctggcagggaggggcccgcactgcggctcctggccgctggcctcgccctttggtcgcgttttggcctcagtgtgccgtgaaggagggtgttgggccgcctggagcccctccggaaaggtgaagacctgggtgcttttgcctgggtgtgtgtgtacacgtgtgcgtgtgaacacagctgggcgtgtgtatgcaggtccctttggggtcagccatgtgtgcatgcgcctgcctgtgcgtacccaggaggggtcgcagtaaaggcatcagtgtgtctgcacctgtgtgtgctgtagtgtgtgtgtgagtatacaggtctgcacgtgtgcctgtgtgtgtgcaggtctggactcctgggcgtatgggagctgggctctgtgtgtgtgcacgcctggctagtgtactcatcactgtctgcaggccggtgagtctttgtgtctgtactctagtgtgtcccagctggtgtgtctgggaccgggctgagttggccattgctggcaaccacattccttagctacaaaggcactactcctcctcagaggctgcctagcctggctggggttactggccgaagcctcctgcctcctggctaaggagaacagagccttttctctgtgggttctgacccctgaggtgtgtctgtctcccacaggccagggactccctccagaccctggttggggtccagcgtccacacaccccttttcctccaggtcccctgtccctcacagcaccgatgaatccataacctgtctacatggctggtcctggaacctaaagattagcaggttggttcagctggacctggagctggtctcctgtttacctggtgccttgtctgtcactctgtcggccggccccatgccttccacccagagtgtctgctgtgtaaggttgtttgctgaagaatgtggggatcaggccaggggcctggacctgagggattgagggtagggctgccagggctggggccaggctgctgttggatagtcactgccaccctcgccctgggaacacctgcttttccaaggccctgtggggctggtctctgaggactggacacacagaccatggtggactctccccactgccccaggagggcaagaggggcagttactgccccatttgacagttgaggaaactgatgccagagattgagggtaacttgtctgggacacatagtcaagaagcagctgggcactgggttcctcttgtctcactctgggtcatggggagagaggagggctgggggaagatgggcctggctcagtccctcctatctgttcaccacccctgctgagcccggcagctggtggggagccttgtccaccctcccccaggccgcaggtgggagtagggctgcccctcttcctgcccacttcccagtgggcactgctttctctccgcgggtgtgcgctggccccccgcgtggtccagacacttcacaggcacctgcacgcacacaccgacggccaccaagccacagctgtccacaggtgcacctgcctctccccctcgccggctgcacctgaatcctgcttccctggctgtgtgtgggtgcccgagccaggagcccagcccttcccctctctgcagatccagagggaatgggcccatggccatggcctggaggtagatataaggcctagggtcaggagtttagactcccacactgcacggcagagaatgacgggaatgggcacagacacactcaaactggggcccagggagacacacctctccttcaaacctggacggagacacagactttgaaacagatggatgcatgcgcgcacagggacaggcagactgaaaacctgaaggtccactgtgcaccatttttgtcacttccagacaggacttacccagcggccctatcctgcagccccttcccagccccgcctggagaagaccctgggctaagggcaaggctctgggagcaccctgaagccctcacagcctgggcctcagtgtccggagcctgagtgcagagggagggagccgctggagtccgggggtggggggcggggccggcaggcctcttggtgcagccacccgcccatgcagaccagccgcctgtccgcacgcctgggccagcccagagtggtgccactgcccatgtgctgcccggaatgtgggccactgacccgctcctatcgcccattcgccccaggtggtgcaaaggatcaaggctgtggaggggcagactcggctgctggtggtggaccaggagacagatgaggagctccgccggcggcagctgacctgtaccgaggagatggcccagcgagggctcccacccgcccacgacccctgggagccgaagccagactgggcacacaccggcagccacagctccgaagctggcaagaaggtatggcgggcttggcccacagggaccaccctagcctctcccagaggctctctcagcttttgacgacgatctttgcctttggtcacctccagaagtcttggtctcttctgccttttggggctccttttctgccccagggaccatcttgttggccactgggggccactgtttctaccctcagcctgtgttttaaactgggtagggtcagggcagcctggcctgttcctcttctccaggatgctccagagccacttgccctatcgaggggtcactctgacaagctgccgcctccccagcccccagcctcgtggctgaggaaccctgggaagaggcattccaggtctgcgtgtgcgcagctctgtgcctgtgctgggtgtcatccgtggctctgtctttgtctctgttgaaggcgcctgcatgctgggaaggcctgggagagggccggccttctccacaggcagcgccgtggttggggaagcctaggaggccactctgccaggcctggcgtaggtggggctgggagcatgggagtggagttgggggtccaggaggctccagggtgagcccactcctccccctagatacaagggagggccctgggaccctgtctgctgttcctcctggactcctgctgggtagtacttcctccttcccctgcccttgctcccagccaggagacccagaaaagtacaggggcggcctgctccacctcctgctaggtggccgactgggaggggcggcctggcaggccttggggaccaggaggaacagcctgaagctgtctgtcttatcttcctggaggccctgatggcattatctccatgttctctcctacctttttttttttttttttttcattttcaaagagaaccctggccgggtgcggtggctcacgcctgtaatcccaacacttcgggaggctgagatgggtggatcacctgaggtcaggaattttgagaccagcttgactaatgtggtgaaacccccgtctctactaaaaatacaaaaatcagttgggcatggtggggcacgcctatagtcccagctacttgggaggctgaggcaggagagtcgcttgaacccggcaggcggaggtttcagtgagccgagatcccgccatagcactccagcctaggcgacagagtgagactgtctcaaaaaaaaacaaaaaaaggaaaagaaagaaatcccttcaggggatatgagtccaggggttggccagaccccactgtgagaaccgcgcttggggcaggggtgtgggatctggagttctgagggtgcaggggatatacacattcactttctccctttcccagacgtcactgctgaagctggctgcccctaggagctgagcccggggggagcggcttggcagggagacagcattccctgtggggagcccagcctgggcgcaggcctgcccgtgggacctgtgggacccgttttgttcctggggcttgagggcgggccacagtggtgctcagggccaaggtgcccagcccagggctggtgggggggctggccttgcaggggggctggctggtcctaagcccctgtctccaggctgagggttggggcctccctctttcccagccaccttccctcccccaggaggaagctccccctctgcctcaggcgtttgtccattgatttggacacaaacgcatggttcaccttcctgtggaaaaatccggccctcggactttatctggagggtgcagtggcccaggcaccttgccttgggtgggaccttccccctctgctatttcaggctctgggggctgcaggaagccctaggaggggcttcctctgggtgtatttttagaggaacaaagggtggcctgagtggcaggtccctttgtgcatgagtctggctggggacaggggctccaggaggtcagggggcacccaaggaacagggtctccccttctctcttctggcatcaagacctgaggtttctttttctttttctttcttggctcactacaacctccgctgtctgggttcaagcgattctcttgcctcaccctccccagtagctgggattacaggcgcgcaccaccacacctgactaatttttgtgtttttagtagagacggggtttcaccatgttgctcaagctggtctcgaactcctgatctcaggtgatgtgccctcctcgacctcccaaagttctgggattacaggtgtgagccactgtacccggcccctgaggtctgaggtttcatttctttctttctttttttttttttttgagacggagtttcactctgtcgcccaggctggagtgctgtggtgcgatctcggctcactgcaagctccgcctcctgggttcaagcaattcttatgtctcagcctgctgagtagctgggattacaggcgtgtaccaccacacctggctaatttttgtgtttttggtagagacagggtttcaccgtgttggccaggctggtctcaaactcttgggctcaagtgatccgcctgcctcagcctcccaaagtgctgggattacaggtgtgagcccctgcgcctggctcaggacctgaggtttcttcacctgagctcccagcatgggcaggaagaggtgggcctcacctgacctccacagagcaggctcagatcctgcccttctcagcctgggttcagggcatgcctcagatggtcagggagcccaggagggcaaagcttaccttgcggggatggctccagtgggggcactggtggcagagaggcagagctctggaagggatgtgtgtagtttgtctttggtgaaggatggagagggcccaactttgggtgccccctgggagctaagggtggctctcagtgtcctctgtcctggctggggataggggaggtgggcaggggaggacactgatgtggttggcccctccttttgggggccgtgaaggcctagttagtgatgactcagccctgggccacaccaggctgggggtggccgcagctgcagtgcagctgatcctagtagtgacgacaggggacagcccccaaacagagacggggtggccagcggtgccaggccctggaggtggtggcagaccctgagccctctgccccctgcccctagcccatgtctccacccccatctggagggccttgggggctaagagcaggtgtgaggggtgacagttctgcgggaggcggctgtgtggttggggcgcggtgcctgcgggggcttccgggcttccctggctcttgctcctctggagcctcaacaggaccgtcctgtgttctggggccgggactcctccctgtcccctcagccctgggtcctggggcagggcagggccttccagcagcttccttccttcctttcttgggacggaagcctagctgggtggggggcgccgggctggagccttcgcaggggagcgggctcagtcatcaccctgctccccagagtgactcagcccccacgtccccacccatccccggggagccagggccgcagagggaggtagataagtggggtggcagcctgggtcggccagagagttcaggccaccccggccggacgcctgccacttgctgtcactgtgccgctgtcatggcacgctccgggagtgccacgccacctgcccgggctccgggagcccctccacggagcccaccccagaggctggtacaggtcaggtggggtgggaggaagggagggctaggaggaaccggcagccgctcagcctcccggggtggaaggaggggactccgggaccttgatgtaagcaggctggtcgctgagcaacaatgaaggcctttctctgccagggctggtgcgtcaccatctgggggggtgcccagggtacccccatgccagcctctttgtccggacacaggcatggctgggggaccagggatggtccagctctgtgctggccgccggcagggagggagcctggagcccgtgggagcccgagggcctggcgggaggcggcaggaagtgtgtgctgagccagggcagggaggaggaatgtgagctatgaacgccgcccgagctcctcggctctctgggccccccttccccacgagcccatgtgctgccagcagcccaccctggcccctccattgcagcccctccacctgaggttttagtgctgtgcctggcgccactgggaccctgctgacaatgaaggggtttaggtttgataggcagaacttcttgccttgtagagtgaaagacggctgcttctggacagaggcagaggggtggccagaatgaccctgagaacactgaggggtccttggcctggcctcagggccccagacacccaccagatcctgcttcctgtctggtgccctgagaaaccctgctccgcaggccgctgtgcaggcgtgggaagggctgccgggccagcactgtggggctggccgcatgtgtgggctgctgtgcgtgtttgcaggtgtgtgtggacgtcttgtgtctgtggctgtgtgatgtgtctttgcggactgggcccatatcacgctcccacctcctccactgaattgggctcctgtccccacgccttccctgcgtcccaggccagcctgggggccgtgctccacctcccctcccgaactggactcctgtccccacgccttccctccgtcccaggccagcctgggggccgtgctccacctcccctcccgaactggactcctgtccccacgccttccctccgtcccaggccagcctgggggccgtgctccacctcccctcccgaactgggctcctgtccccacgccttccctccgtcccaggccagcctgggggccgtgctccacctcccctcccgaactggactcctgtccccacgccttccctccgtcccaggccagcctgggggccgtgctccacctcccctcccgaactgggctcctgtccccacgccttccctccgtcccaggccagcctgggggctgtgctccacttcccctcccgaactggactcctgtccccacgccttccctgcgtcccaggccagcctgggggccgtgctgtgactgcatccctgaggggcactttggtgggcaggtgtcagggtcagccttgaagccccacgcctgtgccaccaggtgtgtctgggggaggagtgagtctatgtggtggggccctggagattttgggggtcttgcaccctccaattcagcccatgtggcccagctgagcccctgtggggccagggagccacaggcttgtccctggagtttctggtgtgacgggctgggtggtggccatgcagagagggttcagagggtgggcaggaggcttcagatgaggcatctggcaggctggacaggagaagggtgttccagaccaagggcaggtcctgagcccaggggacagagcactagctgtgtggagaaggacccccttgctcccttggcggggcggtcccccccgctgacatggccgtttctggtccattggggtttggagcgagcttgaaggtgggtggctggaggggttgggggtgtctgaggcctggagacctgccctcctgaggtctgagcgcccccttgccatgccgccccagccctggcctggcctggcctgtggtccctcagggacacacagggaggtaggaggtgagggaagggccctggcagcccccagcccgcctgcacagtctcccctgcgcacgccctcaagcttggcgctccctggaaacctgagctgcctcctgcctgctccggccaccgccatgtttaactgagcacgggcagccgctggccaccgccgccgcaccctggcccaccccctggctgggaggtggtcattgggcctggccttgcctgcatggtcccctggcccagagccctaccgcaggatgccagaggtaacatggggcagggcctgggatggtagcggggggtccttccgggcaccaggaggccctctgtgccctgtccacactaagctcctgccccagcccctgcttgctgggcccacgggggtggggcggctcattttcctggaatgtgaaagcaaacagagccgccaccgcagccagccccacggaggcctctggagagaaaacaaaactgctggcctaggagcgcctgccccacgctctggaggagagcccggggcagggggacgcacaggcagagccctcagggacaaccgccccaggaggccgacggcgacagttcatcccacctggtgcttcctcccaccctgcctgtgcgccacgctggcctcgagccaaaggaattctcccagcaacccgggaaggcggctgggcccgtcggggaggcttctgggtttgaaaacaggctttgcccaagttcccacagctaaagctctgtcacaggcagcctgggtgcccggagtgtttgccactgagacctgggcctgcccgtggggggcacggtaccgagtttgggcagtggcggcaccaccggggagtggcctctggaggcgggaggctggagcaagagactgaccctgtccgttgggcctgcaggatgtcagtgggcccctgagggagctgcgccctcggctctgccacctgcgaaagggacctcagggctatgggttcaacctgcatagtgacaagtcccggcccggccagtacatccgctctgtggacccgggctcacctgccgcccgctctggcctccgcgcccaggaccggctcattgaggtaccggcccaccagggctgcggggtgccgagtgccccgcacctgtccacactggggccctgggtccttgcagggaggagggagacgctgggaacctgagctggtgcgcctcctgctgcctcggtgggcggtggctgtgatgaatatttgatgccacacctggccacgcggcgttgggggctgtctgggcccatggcggggctgatacatgctggtggcggcaggtgaacgggcagaatgtggagggactgcgccatgctgaggtggtggccagcatcaaggcacgggaggacgaggcccggctgctggtcgtggaccccgagacagatgaacacttcaagcggcttcgggtcacacccaccgaggagcacgtggaaggtgggccacggcccagggcacagggtgggtgcggtgtggtggctgagcagccactgacacgctgtccccacaggtcctctgccgtcacccgtcaccaatggaaccagccctgcccaggtaagagggtggggtgcccatgagacacagggtgcctctgggggtacccaggcccgacagaggcccccttctccctggagatccgtcctcgaggtgtgctagtgacacccgattttagccctgtcacctccctttaatgcccctgtgggtctcatcctgggtcgtgccacacacaagccacgtggggcccctggggtcggggccactgccttctgtcctctcctgggcaccacctggtaaggagttgccctccagtctctgcctcctcagggagctggcggtggcctcaccccaggcgttgctcacgccggccattcctgcacctgaaccccctctgcaccatgagccggccaggccacctgcctgtcactgccaggcgcccggtgcctgccccgccgcatctggagtccaccagaggcccgaggccccctgccgagtggaggagcacacactgggggggggtgtgcctctgtgcacatgtgtgcgtgtgcaggtgttgtgtgtgtctgtgaaaccacaatctgcccttggtttcccagctcaatggtggctctgcgtgctcgtcccgaagtgacctgcctggttccgacaaggacactgaggtatggatgttctccactcctgagctcacacgtggggttgctagaggccttggggtaggcgtctgtggagatgtcagcccgggcagtggggtctctgttcaggaagtcctcgtgagccccagccccagcaggcagcctctgttggttgctccctaggaggggccaccgtctggggtgtgggactagggctcactccagacaccccacccaccgtgctcaccccaggatggcagtgcctggaagcaagatcccttccaggagagcggcctccacctgagccccacggcggccgaggccaaggagaaggctcgagccatgcgagtcaacaagcgcgcgccacagatggactggaacaggaagcgtgaaatcttcagcaacttctgagccccttcctgcctgtctcgggaccctgggacccctcccgcacggaccttgggcctcagcctgccccgagctcccccagcctcagtggactggagggtggtcctgccattgcccagaaatcagccccagccccggtgagcccccatcctgcccctgcccaccaggtactgggggcctgtggcagcaagatagggggagagagacccagagatgtgagagagagtcagagacagagacagagagagagagagagagacacagagagagacagagagagagcgagcgagcgcgcggcagccgcggggcgagggcctttgctgctctgccggggcctgctgactgaaaggaatttgtgtttttgctttttttccaaaaagatctccagctccacacatgtttccacttaataccagagaccccccccccttcccctcccccttcccctcccccttgggacgcgctctaaataattgcaataaaacaaacctttctctgcaaaccatttcctccccgccccctcccctcagcagcggccgtcctgagtgggagtccctgggacttcccagtggccaagttggggcgcccagcctttttgtggggaccttgggtaaggccagggaggcctgatgtggccgtaggagctgcccctgcccacctgccctggtgtgggggtccctaggccacaccctgctccccacccaggtaccctgtgcgcctgtgccctgctgggggcctgggctttccgaggggcctgaggatggaggccccaagtccccgaggagggcggcctttggacaggcccctcattccgcgcggcagctcccaggcctggggaacgtaggtgtgtgagagcggcacccgggaaggacgcctggcctttggctcagccctgcttggcgggctcccccgtggacaccctgttgactttgcacttccctcccgggccccgcacccccgaaccgaccaccgatcgaccggcaccgctgttgcctcgtaagccatagcgcatgcgcgctctcaggataaacaggccctgcctgggacccacacgcctctgtcttttctgagcctcctccccgtggggtgagaggggtggagggatgaggctgtttcagggagccccctccccgagtctcagcagctggaaacggtctcgttcctgagcccgtgccctgcatccatctgctcccagccctgctccatctcccccgctgacccccatgggaccccctgctgtgtggcacatcctgggcccatgcccatctctcttatttggcagactcagcctcccaccttcaccttccctgtgaagccatccggccccacacaacacccacacgggccaccctttgcccaattcaccctgcgacctctagcagtcacaggtcaagctttgtaccctgtggcgccctgcctgggtccccagtgtccctttcaaggccgggtagctctgtaaacaggggtgggaccctggcagaggctgggctttgagggcatgaaagttcaggagctggcggtgtccgggctgggaagctggggggccggcggtggatagcatgaggggccagggtccccagccagctgcccgggggctgcttgcttccccagcggacttccaacagctggctgcagctggctctccccacttcctccctcccaggttcatgcacaccccctccccctccctgagtacatagcaaagattgtcacgtccccagccggcctcccaggcagccctgctccagacacgcgagcacgggtgtgtacgaacacatccttgtatgcgattcccaggctctctgccccctcagggacagacatcagccagatcccatct

SEQ ID NO: 22369 - DNA, 1020 bp, Homo Sapiens
agttactttcaggctcggggagtgaaggcctcgttgagagaaggtctcattcggtgttttgggaagagagtcgtgtgggcccaggtatcgtagcggcgacacgagagagacgggcggtgtgacagccttccactacctgcacgagtgtattggtctgtctgctatcagctatgccgctgcccgttgcgctgcagacccgcttggccaagagaggcatcctcaaacatctggagcctgaaccagaggaagagatcattgccgaggactatgacgatgatcctgtggactacgaggccaccaggttggagggcctaccaccaagctggtacaaggtgttcgacccttcctgcgggctcccttactactggaatgcagacacagaccttgtatcctggctctccccacatgaccccaactccgtggttaccaaatcggccaagaagctcagaagcagtaatgcagatgctgaagaaaagttggaccggagccatgacaagtcggacaggggccatgacaagtcggaccgcagccatgagaaactagacaggggccacgacaagtcagaccggggccacgacaagtctgacagggatcgagagcgtggctatgacaaggtagacagagagagagagcgagacagggaacgggatcgggaccgcgggtatgacaaggcagaccgggaagagggcaaagaacggcgccaccatcgccgggaggagctggctccctatcccaagagcaagaaggcagtaagccgaaaggatgaagagttagaccccatggaccctagctcatactcagacgccccccggggcacgtggtcaacaggactccccaagcggaatgaggccaagactggcgctgacaccacagcagctgggcccctcttccagcagcggccgtatccatccccaggggctgtgctccgggccaatgcagaggcctcccgaaccaagcagcaggattgaagcttcggcctccctggccctgggttaaaataaaagctttctggtgatcctg

SEQ ID NO: 22370 - DNA, 2736 bp, Homo Sapiens
cccaacgactagtgggactccgcgggggcgggggtagctggagcctggctctggcctggcaggagccgagcttgttccggaagaagccgagcggacgggggccagcctcagcgtcccgggagtgaggcgatagctgcggcggcgacagcgcgggccgggatgaaccgcgacggctgaggcagcggaggtgccggctgcgcgggccccagtgagactccctcgaagcggcagcccaccgttcggggctttgcctcgagccgagccctgcccccgcgagcctcccggacccctttgtgcggccggaggcggcggcgggaacggccatggcggccaacatgtaccgggtgggagattacgtctattttgagaactcttccagcaatccttacctggttagacggattgaggagctcaacaagactgcaaatggaaatgtggaggcaaaggttgtctgtcttttccggcgcagggacatttctagtagcctcaacagcctggctgatagtaatgccagggagtttgaagaggaatcaaagcagccagggatgtctgagcagcagcgccatcaactgaagcaccgggaactttttctttctcggcaatttgaatcattaccagccacccacatacgggggaaatgcagtgtgaccctcttgaatgagacagatatcttgagccagtacctggaaaaggaggactgctttttttactcactggtgtttgaccccgtgcagaagacacttctcgctgatcagggcgagattagagttggttgcaaataccaagctgagatcccagatcgcctagtagagggagaatctgataatcggaaccagcagaagatggagatgaaggtctgggacccagacaaccctctcacagaccggcagatcgaccagtttcttgtggtggcccgagctgtgggaacctttgcaagagccctagattgtagcagctccattcggcagccaagcttgcacatgagtgcagctgctgcctcccgagatatcactctgtttcacgccatggataccttgcaaaggaacggctacgacctggctaaggccatgtcgaccctggtaccccagggaggcccggtgctgtgtcgggatgagatggaggaatggtcagcctcagaggccatgctatttgaggaggccctagagaagtatgggaaggacttcaatgatattcgccaggattttctaccctggaagtcacttgccagcatagtccagttttattacatgtggaaaaccacagaccggtatattcagcagaaaaggttgaaagctgctgaagcagacagcaaactgaaacaggtctacattcccacctacactaagccaaaccctaaccagatcatttctgtgggttcaaaacctggcatgaatggggctggatttcagaagggcctgacttgtgagagttgccacaccacacagtctgctcagtggtatgcctggggcccacctaacatgcagtgccgcctctgtgcttcctgttggatctactggaagaagtatgggggactgaagaccccaactcagcttgagggggccactcggggcaccacggagccacactcaaggggtcatttatccagacctgaagctcaaagtctctctccttacacaaccagcgccaacagggccaagctactggctaagaacagacaaactttcctgcttcagaccacaaagctgacccgtcttgccagacgcatgtgcagggacctattacagccaaggagggccgcccgacggccttatgctcctatcaatgccaatgccatcaaagcagagtgctccattcgacttcctaaggccgccaagactccattgaagattcaccctctggtgcggctgcccctggcaactatcgtcaaagatctggtggcccaggcacccctgaaaccaaaaacacctcggggtaccaagacaccgatcaacagaaaccagctgtcccagaaccggggactggggggcattatggtgaaacgggcctatgagactatggcaggggcaggggttcctttctctgccaatggaaggcctctggcttcagggattcgttcaagctcacagccagcagccaagcgtcagaaactaaacccagctgatgcccccaatcctgtggtgtttgtggccacaaaggataccagggccctacggaaggctctgacccatctggaaatgcggcgagctgctcgccgacccaacttgcccctgaaggtgaagccaacgctgattgcagtgcggccccctgtccctctacctgcaccctcacatcctgccagcaccaatgagcctattgtcctggaggactgagcacctgtggggaagggaggtgggctgagaggtagagggtggatgcccagggcacccaaacctcccttccctttcgtgtcgaagggagtgaggagtgaattaaggaagagagcaagtgagtgtgtgtccctggaggggttgggcgccctctggtgttaccacctcgagacttgtctcatgcctccatgcttgccgatggaggacagactgcaggaacttggcccatgtgggaacctagcctgttttggggggtaggacccacagatgtcttggacagttttggggggagggttttttaattttttaaaagttttgcctccctttgtgaaaggggatggggaggggaagagtaaacagataacaggtggtggtacctggttgggggaggggggcgtgcactgccatg

SEQ ID NO: 22371 - DNA, 13467 bp, Homo Sapiens
gctgccgggacgggtccaagatggacggccgctcaggttctgcttttacctgcggcccagagccccattcattgccccggtgctgagcggcgccgcgagtcggcccgaggcctccggggactgccgtgccgggcgggagaccgccatggcgaccctggaaaagctgatgaaggccttcgagtccctcaagtccttccagcagcagcagcagcagcagcagcagcagcagcagcagcagcagcagcagcagcagcagcagcaacagccgccaccgccgccgccgccgccgccgcctcctcagcttcctcagccgccgccgcaggcacagccgctgctgcctcagccgcagccgcccccgccgccgcccccgccgccacccggcccggctgtggctgaggagccgctgcaccgaccaaagaaagaactttcagctaccaagaaagaccgtgtgaatcattgtctgacaatatgtgaaaacatagtggcacagtctgtcagaaattctccagaatttcagaaacttctgggcatcgctatggaactttttctgctgtgcagtgatgacgcagagtcagatgtcaggatggtggctgacgaatgcctcaacaaagttatcaaagctttgatggattctaatcttccaaggttacagctcgagctctataaggaaattaaaaagaatggtgcccctcggagtttgcgtgctgccctgtggaggtttgctgagctggctcacctggttcggcctcagaaatgcaggccttacctggtgaaccttctgccgtgcctgactcgaacaagcaagagacccgaagaatcagtccaggagaccttggctgcagctgttcccaaaattatggcttcttttggcaattttgcaaatgacaatgaaattaaggttttgttaaaggccttcatagcgaacctgaagtcaagctcccccaccattcggcggacagcggctggatcagcagtgagcatctgccagcactcaagaaggacacaatatttctatagttggctactaaatgtgctcttaggcttactcgttcctgtcgaggatgaacactccactctgctgattcttggcgtgctgctcaccctgaggtatttggtgcccttgctgcagcagcaggtcaaggacacaagcctgaaaggcagcttcggagtgacaaggaaagaaatggaagtctctccttctgcagagcagcttgtccaggtttatgaactgacgttacatcatacacagcaccaagaccacaatgttgtgaccggagccctggagctgttgcagcagctcttcagaacgcctccacccgagcttctgcaaaccctgaccgcagtcgggggcattgggcagctcaccgctgctaaggaggagtctggtggccgaagccgtagtgggagtattgtggaacttatagctggagggggttcctcatgcagccctgtcctttcaagaaaacaaaaaggcaaagtgctcttaggagaagaagaagccttggaggatgactctgaatcgagatcggatgtcagcagctctgccttaacagcctcagtgaaggatgagatcagtggagagctggctgcttcttcaggggtttccactccagggtcagcaggtcatgacatcatcacagaacagccacggtcacagcacacactgcaggcggactcagtggatctggccagctgtgacttgacaagctctgccactgatggggatgaggaggatatcttgagccacagctccagccaggtcagcgccgtcccatctgaccctgccatggacctgaatgatgggacccaggcctcgtcgcccatcagcgacagctcccagaccaccaccgaagggcctgattcagctgttaccccttcagacagttctgaaattgtgttagacggtaccgacaaccagtatttgggcctgcagattggacagccccaggatgaagatgaggaagccacaggtattcttcctgatgaagcctcggaggccttcaggaactcttccatggcccttcaacaggcacatttattgaaaaacatgagtcactgcaggcagccttctgacagcagtgttgataaatttgtgttgagagatgaagctactgaaccgggtgatcaagaaaacaagccttgccgcatcaaaggtgacattggacagtccactgatgatgactctgcacctcttgtccattgtgtccgccttttatctgcttcgtttttgctaacagggggaaaaaatgtgctggttccggacagggatgtgagggtcagcgtgaaggccctggccctcagctgtgtgggagcagctgtggccctccacccggaatctttcttcagcaaactctataaagttcctcttgacaccacggaataccctgaggaacagtatgtctcagacatcttgaactacatcgatcatggagacccacaggttcgaggagccactgccattctctgtgggaccctcatctgctccatcctcagcaggtcccgcttccacgtgggagattggatgggcaccattagaaccctcacaggaaatacattttctttggcggattgcattcctttgctgcggaaaacactgaaggatgagtcttctgttacttccaagttagcttgtacagctgtgaggaactgtgtcatgagtctctgcagcagcagctacagtgagttaggactgcagctgatcatcgatgtgctgactctaaggaacagttcctattggctggtgaggacagagcttctggaaacccttgcagagattgacttcaggctggtgagctttttggaggcaaaagcagaaaacttacacagaggggctcatcattatacagggcttttaaaactgcaagaacgagtgctcaataatgttgtcatccatttgcttggagatgaagaccccagggtgcgacatgttgccgcagcatcactaattaggcttgtcccaaagctgttttataaatgtgaccaaggacaagctgatccagtagtggccgtggcaagagatcaaagcagtgtttacctgaaacttctcatgcatgagacgcagcctccatctcatttctccgtcagcacaataaccagaatatatagaggctataacctactaccaagcataacagacgtcactatggaaaataacctttcaagagttattgcagcagtttctcatgaactaatcacatcaaccaccagagcactcacatttggatgctgtgaagctttgtgtcttctttccactgccttcccagtttgcatttggagtttaggttggcactgtggagtgcctccactgagtgcctcagatgagtctaggaagagctgtaccgttgggatggccacaatgattctgaccctgctctcgtcagcttggttcccattggatctctcagcccatcaagatgctttgattttggccggaaacttgcttgcagccagtgctcccaaatctctgagaagttcatgggcctctgaagaagaagccaacccagcagccaccaagcaagaggaggtctggccagccctgggggaccgggccctggtgcccatggtggagcagctcttctctcacctgctgaaggtgattaacatttgtgcccacgtcctggatgacgtggctcctggacccgcaataaaggcagccttgccttctctaacaaaccccccttctctaagtcccatccgacgaaaggggaaggagaaagaaccaggagaacaagcatctgtaccgttgagtcccaagaaaggcagtgaggccagtgcagcttctagacaatctgatacctcaggtcctgttacaacaagtaaatcctcatcactggggagtttctatcatcttccttcatacctcaaactgcatgatgtcctgaaagctacacacgctaactacaaggtcacgctggatcttcagaacagcacggaaaagtttggagggtttctccgctcagccttggatgttctttctcagatactagagctggccacactgcaggacattgggaagtgtgttgaagagatcctaggatacctgaaatcctgctttagtcgagaaccaatgatggcaactgtttgtgttcaacaattgttgaagactctctttggcacaaacttggcctcccagtttgatggcttatcttccaaccccagcaagtcacaaggccgagcacagcgccttggctcctccagtgtgaggccaggcttgtaccactactgcttcatggccccgtacacccacttcacccaggccctcgctgacgccagcctgaggaacatggtgcaggcggagcaggagaacgacacctcgggatggtttgatgtcctccagaaagtgtctacccagttgaagacaaacctcacgagtgtcacaaagaaccgtgcagataagaatgctattcataatcacattcgtttgtttgaacctcttgttataaaagctttaaaacagtacacgactacaacatgtgtgcagttacagaagcaggttttagatttgctggcgcagctggttcagttacgggttaattactgtcttctggattcagatcaggtgtttattggctttgtattgaaacagtttgaatacattgaagtgggccagttcagggaatcagaggcaatcattccaaacatctttttcttcttggtattactatcttatgaacgctatcattcaaaacagatcattggaattcctaaaatcattcagctctgtgatggcatcatggccagtggaaggaaggctgtgacacatgccataccggctctgcagcccatagtccacgacctctttgtattaagaggaacaaataaagctgatgcaggaaaagagcttgaaacccaaaaagaggtggtggtgtcaatgttactgagactcatccagtaccatcaggtgttggagatgttcattcttgtcctgcagcagtgccacaaggagaatgaagacaagtggaagcgactgtctcgacagatagctgacatcatcctcccaatgttagccaaacagcagatgcacattgactctcatgaagcccttggagtgttaaatacattatttgagattttggccccttcctccctccgtccggtagacatgcttttacggagtatgttcgtcactccaaacacaatggcgtccgtgagcactgttcaactgtggatatcgggaattctggccattttgagggttctgatttcccagtcaactgaagatattgttctttctcgtattcaggagctctccttctctccgtatttaatctcctgtacagtaattaataggttaagagatggggacagtacttcaacgctagaagaacacagtgaagggaaacaaataaagaatttgccagaagaaacattttcaaggtttctattacaactggttggtattcttttagaagacattgttacaaaacagctgaaggtggaaatgagtgagcagcaacatactttctattgccaggaactaggcacactgctaatgtgtctgatccacatcttcaagtctggaatgttccggagaatcacagcagctgccactaggctgttccgcagtgatggctgtggcggcagtttctacaccctggacagcttgaacttgcgggctcgttccatgatcaccacccacccggccctggtgctgctctggtgtcagatactgctgcttgtcaaccacaccgactaccgctggtgggcagaagtgcagcagaccccgaaaagacacagtctgtccagcacaaagttacttagtccccagatgtctggagaagaggaggattctgacttggcagccaaacttggaatgtgcaatagagaaatagtacgaagaggggctctcattctcttctgtgattatgtctgtcagaacctccatgactccgagcacttaacgtggctcattgtaaatcacattcaagatctgatcagcctttcccacgagcctccagtacaggacttcatcagtgccgttcatcggaactctgctgccagcggcctgttcatccaggcaattcagtctcgttgtgaaaacctttcaactccaaccatgctgaagaaaactcttcagtgcttggaggggatccatctcagccagtcgggagctgtgctcacgctgtatgtggacaggcttctgtgcacccctttccgtgtgctggctcgcatggtcgacatccttgcttgtcgccgggtagaaatgcttctggctgcaaatttacagagcagcatggcccagttgccaatggaagaactcaacagaatccaggaataccttcagagcagcgggctcgctcagagacaccaaaggctctattccctgctggacaggtttcgtctctccaccatgcaagactcacttagtccctctcctccagtctcttcccacccgctggacggggatgggcacgtgtcactggaaacagtgagtccggacaaagactggtacgttcatcttgtcaaatcccagtgttggaccaggtcagattctgcactgctggaaggtgcagagctggtgaatcggattcctgctgaagatatgaatgccttcatgatgaactcggagttcaacctaagcctgctagctccatgcttaagcctagggatgagtgaaatttctggtggccagaagagtgccctttttgaagcagcccgtgaggtgactctggcccgtgtgagcggcaccgtgcagcagctccctgctgtccatcatgtcttccagcccgagctgcctgcagagccggcggcctactggagcaagttgaatgatctgtttggggatgctgcactgtatcagtccctgcccactctggcccgggccctggcacagtacctggtggtggtctccaaactgcccagtcatttgcaccttcctcctgagaaagagaaggacattgtgaaattcgtggtggcaacccttgaggccctgtcctggcatttgatccatgagcagatcccgctgagtctggatctccaggcagggctggactgctgctgcctggccctgcagctgcctggcctctggagcgtggtctcctccacagagtttgtgacccacgcctgctccctcatctactgtgtgcacttcatcctggaggccgttgcagtgcagcctggagagcagcttcttagtccagaaagaaggacaaataccccaaaagccatcagcgaggaggaggaggaagtagatccaaacacacagaatcctaagtatatcactgcagcctgtgagatggtggcagaaatggtggagtctctgcagtcggtgttggccttgggtcataaaaggaatagcggcgtgccggcgtttctcacgccattgctcaggaacatcatcatcagcctggcccgcctgccccttgtcaacagctacacacgtgtgcccccactggtgtggaagcttggatggtcacccaaaccgggaggggattttggcacagcattccctgagatccccgtggagttcctccaggaaaaggaagtctttaaggagttcatctaccgcatcaacacactaggctggaccagtcgtactcagtttgaagaaacttgggccaccctccttggtgtcctggtgacgcagcccctcgtgatggagcaggaggagagcccaccagaagaagacacagagaggacccagatcaacgtcctggccgtgcaggccatcacctcactggtgctcagtgcaatgactgtgcctgtggccggcaacccagctgtaagctgcttggagcagcagccccggaacaagcctctgaaagctctcgacaccaggtttgggaggaagctgagcattatcagagggattgtggagcaagagattcaagcaatggtttcaaagagagagaatattgccacccatcatttatatcaggcatgggatcctgtcccttctctgtctccggctactacaggtgccctcatcagccacgagaagctgctgctacagatcaaccccgagcgggagctggggagcatgagctacaaactcggccaggtgtccatacactccgtgtggctggggaacagcatcacacccctgagggaggaggaatgggacgaggaagaggaggaggaggccgacgcccctgcaccttcgtcaccacccacgtctccagtcaactccaggaaacaccgggctggagttgacatccactcctgttcgcagtttttgcttgagttgtacagccgctggatcctgccgtccagctcagccaggaggaccccggccatcctgatcagtgaggtggtcagatcccttctagtggtctcagacttgttcaccgagcgcaaccagtttgagctgatgtatgtgacgctgacagaactgcgaagggtgcacccttcagaagacgagatcctcgctcagtacctggtgcctgccacctgcaaggcagctgccgtccttgggatggacaaggccgtggcggagcctgtcagccgcctgctggagagcacgctcaggagcagccacctgcccagcagggttggagccctgcacggcgtcctctatgtgctggagtgcgacctgctggacgacactgccaagcagctcatcccggtcatcagcgactatctcctctccaacctgaaagggatcgcccactgcgtgaacattcacagccagcagcacgtactggtcatgtgtgccactgcgttttacctcattgagaactatcctctggacgtagggccggaattttcagcatcaataatacagatgtgtggggtgatgctgtctggaagtgaggagtccaccccctccatcatttaccactgtgccctcagaggcctggagcgcctcctgctctctgagcagctctcccgcctggatgcagaatcgctggtcaagctgagtgtggacagagtgaacgtgcacagcccgcaccgggccatggcggctctgggcctgatgctcacctgcatgtacacaggaaaggagaaagtcagtccgggtagaacttcagaccctaatcctgcagcccccgacagcgagtcagtgattgttgctatggagcgggtatctgttctttttgataggatcaggaaaggctttccttgtgaagccagagtggtggccaggatcctgccccagtttctagacgacttcttcccaccccaggacatcatgaacaaagtcatcggagagtttctgtccaaccagcagccatacccccagttcatggccaccgtggtgtataaggtgtttcagactctgcacagcaccgggcagtcgtccatggtccgggactgggtcatgctgtccctctccaacttcacgcagagggccccggtcgccatggccacgtggagcctctcctgcttctttgtcagcgcgtccaccagcccgtgggtcgcggcgatcctcccacatgtcatcagcaggatgggcaagctggagcaggtggacgtgaaccttttctgcctggtcgccacagacttctacagacaccagatagaggaggagctcgaccgcagggccttccagtctgtgcttgaggtggttgcagccccaggaagcccatatcaccggctgctgacttgtttacgaaatgtccacaaggtcaccacctgctgagcgccatggtgggagagactgtgaggcggcagctggggccggagcctttggaagtctgcgcccttgtgccctgcctccaccgagccagcttggtccctatgggcttccgcacatgccgcgggcggccaggcaacgtgcgtgtctctgccatgtggcagaagtgctctttgtggcagtggccaggcagggagtgtctgcagtcctggtggggctgagcctgaggccttccagaaagcaggagcagctgtgctgcaccccatgtgggtgaccaggtcctttctcctgatagtcacctgctggttgttgccaggttgcagctgctcttgcatctgggccagaagtcctccctcctgcaggctggctgttggcccctctgctgtcctgcagtagaaggtgccgtgagcaggctttgggaacactggcctgggtctccctggtggggtgtgcatgccacgccccgtgtctggatgcacagatgccatggcctgtgctgggccagtggctgggggtgctagacacccggcaccattctcccttctctcttttcttctcaggatttaaaatttaattatatcagtaaagagattaattttaacgtaactctttctatgcccgtgtaaagtatgtgaatcgcaaggcctgtgctgcatgcgacagcgtccggggtggtggacagggcccccggccacgctccctctcctgtagccactggcatagccctcctgagcacccgctgacatttccgttgtacatgttcctgtttatgcattcacaaggtgactgggatgtagagaggcgttagtgggcaggtggccacagcaggactgaggacaggcccccattatcctaggggtgcgctcacctgcagcccctcctcctcgggcacagacgactgtcgttctccacccaccagtcagggacagcagcctccctgtcactcagctgagaaggccagccctccctggctgtgagcagcctccactgtgtccagagacatgggcctcccactcctgttccttgctagccctggggtggcgtctgcctaggagctggctggcaggtgttgggacctgctgctccatggatgcatgccctaagagtgtcactgagctgtgttttgtctgagcctctctcggtcaacagcaaagcttggtgtcttggcactgttagtgacagagcccagcatcccttctgcccccgttccagctgacatcttgcacggtgacccttttagtcaggagagtgcagatctgtgctcatcggagactgccccacggccctgtcagagccgccactcctatccccaggccaggtccctggaccagcctcctgtttgcaggcccagaggagccaagtcattaaaatggaagtggattctggatggccgggctgctgctgatgtaggagctggatttgggagctctgcttgccgactggctgtgagacgaggcaggggttctgcttcctcagccctagaggcgagccaggcaaggttggcgactgtcatgtggcttggtttggtcatgcccgtcgatgttttgggtattgaatgtggtaagtggaggaaatgttggaactctgtgcaggtgctgccttgagacccccaagcttccacctgtccctctcctatgtggcagctggggagcagctgagatgtggacttgtatgctgcccacatacgtgagggggagctgaaagggagcccctcctctgagcagcctctgccaggcctgtatgaggcttttcccaccagctcccaacagaggcctcccccagccaggaccacctcgtcctcgtggcggggcagcaggagcggtagaaaggggtccgatgtttgaggaggcccttaagggaagctactgaattataacacgtaagaaaatcaccattcttccgtattggttgggggctcctgtttctcatcctagctttttcctggaaagcccgctagaaggtttgggaacgaggggaaagttctcagaactgttggctgctccccacccgcctcccgcctcccccgcaggttatgtcagcagctctgagacagcagtatcacaggccagatgttgttcctggctagatgtttacatttgtaagaaataacactgtgaatgtaaaacagagccattcccttggaatgcatatcgctgggctcaacatagagtttgtcttcctcttgtttacgacgtgatctaaaccagtccttagcaaggggctcagaacaccccgctctggcagtaggtgtcccccacccccaaagacctgcctgtgtgctccggagatgaatatgagctcattagtaaaaatgacttcacccacgcatatacataaagtatccatgcatgtgcatatagacacatctataattttacacacacacctctcaagacggagatgcatggcctctaagagtgcccgtgtcggttcttcctggaagttgactttccttagacccgccaggtcaagttagccgcgtgacggacatccaggcgtgggacgtggtcagggcagggctcattcattgcccactaggatcccactggcgaagatggtctccatatcagctctctgcagaagggaggaagactttatcatgttcctaaaaatctgtggcaagcacccatcgtattatccaaattttgttgcaaatgtgattaatttggttgtcaagttttgggggtgggctgtggggagattgcttttgttttcctgctggtaatatcgggaaagattttaatgaaaccagggtagaattgtttggcaatgcactgaagcgtgtttctttcccaaaatgtgcctcccttccgctgcgggcccagctgagtctatgtaggtgatgtttccagctgccaagtgctctttgttactgtccaccctcatttctgccagcgcatgtgtcctttcaaggggaaaatgtgaagctgaaccccctccagacacccagaatgtagcatctgagaaggccctgtgccctaaaggacacccctcgcccccatcttcatggagggggtcatttcagagccctcggagccaatgaacagctcctcctcttggagctgagatgagccccacgtggagctcgggacggatagtagacagcaataactcggtgtgtggccgcctggcaggtggaacttcctcccgttgcggggtggagtgaggttagttctgtgtgtctggtgggtggagtcaggcttctcttgctacctgtgagcatccttcccagcagacatcctcatcgggctttgtccctcccccgcttcctccctctgcggggaggacccgggaccacagctgctggccagggtagacttggagctgtcctccagaggggtcacgtgtaggagtgagaagaaggaagatcttgagagctgctgagggaccttggagagctcaggatggctcagacgaggacactcgcttgccgggcctgggcctcctgggaaggagggagctgctcagaatgccgcatgacaactgaaggcaacctggaaggttcaggggccgctcttcccccatgtgcctgtcacgctcaggtgcagtcaaaggaacgccttcccctcagttgtttctaagagcagagtctcccgctgcaatctgggtggtaactgccagccttggaggatcgtggccaacgtggacctgcctacggagggtgggctctgacccaagtggggcctccttgtccaggtctcactgctttgcaccgtggtcagagggactgtcagctgagcttgagctcccctggagccagcagggctgtgatgggcgagtcccggagccccacccagacctgaatgcttctgagagcaaagggaaggactgacgagagatgtatatttaattttttaactgctgcaaacattgtacatccaaattaaaggaaa

SEQ ID NO: 22372 - DNA, 3159 bp, Homo Sapiens
atggctgggatggacagtggcaacctgaagaccgcgaggctgtggcgggacgccgccctgcgtgccaggaagctgcggagcaacctgcgccagctcacgctcaccgccgccggggcctgccccggggccggggccgacgcgctcgagtcccccgcctccccccagctcgtgctgccggccaacctcggggacattgaggcactgaacctggggaacaacggcctggaggaggtacccgaggggctggggtcggcgctgggcagcctgcgcgtcctggtcctgcgcaggaaccgcttcgcccggctgcccccggcggtggccgagctcggccaccacctcaccgagctggacgtgagccacaaccggctgaccgccctgggcgcggaggtggtgagtgctctgagggagctgcggaagctcaacctcagccacaaccagctgcccgccctgcccgcccagctgggcgctctcgctcacctggaggagctggatgtcagctttaaccggctggcgcacctgcctgactccctctcctgcctctcccgcctgcgcaccctggacgtggatcacaaccagctcactgccttcccccggcagctgctgcagctggtggccctggaggagctggacgtgtccagcaaccggctgcggggcctgcctgaggatatcagtgccctgcgtgccctcaagatcctctggctgagtggggccgagcttggcacgctgcccgccggcttctgcgagctggccagtttggagagcctcatgctagacaacaacgggctgcaggctctgcccgcccagttcagctgcctgcagcggctcaaaatgctcaacctgtcctccaacctcttcgaggagttccctgccgcgctgctgcccctggctggtctggaggagctctaccttagtcgcaaccagctcacctcggtgccatcccttatctcgggcctgggccggcttctcaccttgtggctggataataaccgcatccgctacctgccggactccatcgtggagctgaccggcctggaggagctcgtgctgcaggggaaccagatcgcggtgctgcccgaccactttggccagctctcccgggtgggtttgtggaagatcaaagacaacccactgatccagcccccctacgaggtctgcatgaaggggatcccctacatcgcagcctaccagaaggaactggctcattcccagccggcggtgcagccccggctcaagctgctcctgatggggcataaggctgcaggaaagactttgctgcgccactgcctcaccgaggagagagtggagggatgcccaggaggaggggacaaggagaagtgctacccaccgtcacctccccctgtgagcaagggcatcgaggtgaccagctggacggccgatgcctcccggggcctgcggttcatcgtgtatgacttagctggggatgaaagttatgaggtgatccagcccttcttcctgtccccaggggccctatacgtgctggtggtcaacttggccacctatgagcctcgccactttcctaccaccgtgggctccttcttgcatcgggtcggggcgagagtgcccaacgcggtggtgtgcatcgtgggcacccacgcagacctgtgcggagagcgtgagctggaggagaaatgtctggacattcaccgccagatcgccctgcaggagaagcacgacgcggagggactgagccgcttggccaaggtggtggacgaggcactggcccgggacttcgagctgcgctctgccagcccccacgcagcctactatggcgtttcggacaagaaccttcgacggcgcaaggcccattttcaatacctgctcaaccaccggctgcagatcctctcccccgtgttgcctgttagctgcagggacccgcgccacttacgacgccttcgggacaagttgctgtcagttgctgagcaccgagagatcttccccaacttacacagagtactgcctcgatcctggcaggtgctggaggaactgcatttccagccacctcaggcccagcgactgtggctaagctggtgggactcggcgcgcttgggcctgcaggcgggtctgaccgaggaccgactgcagagtgccctctcctacctgcatgagagcggcaagctactctactttgaggacagtccggctctcaaggagcacgtcttccacaacctcacccgcctcatcgacatcctcaatgtcttcttccagagggatccctctttgctgctgcataagctgctcctagggaccagtggagagggcaaggcggagggggaaagctccccgcccatggcgcggtccacccccagccaggaactgctccgggccacccagctccatcagtatgtggagggctttctgttgcatgggctcttgccagctcatgtcattcggttgctgcttaagcctcatgtccaggcccagcaggacttgcagctgttgctggagctgctggagaagatgggactctgttactgcctcaataaacccaagggcaagcctttgaatgggtccacagcttggtacaagttcccatgctatgtgcagaacgaggtgccccatgcagaagcctggattaatgggaccaacctagctgggcagtcttttgtggctgagcagttgcagattgaatatagctttccttttacttttccacctgggttgtttgcacgctacagtgtccagatcaacagccatgtggtgcacaggtcggatggtaaatttcagatctttgcctatagagggaaagttcctgtggttgtgagttacagacctgccaggggagtcctgcagccagacaccctgtccattgctagccatgcatcattaccaaatatatggaccgcatggcaagccataacccccttggtggaggaactgaatgtcctacttcaggaatggcctggactgcactacaccgtgcacattctctgttctaagtgccttaagagaggatcgcccaatccacatgcttttccaggggagttgctgagtcagcccagaccggaaggagtggcagagatcatttgccccaagaacggcagcgagcgagtaaatgttgccttggtttacccacccacgccgactgtgatcagcccctgttccaagaagaatgttggtgaaaagcacagaaaccagtga

SEQ ID NO: 22373 - DNA, 2248 bp, Homo Sapiens
gaattcggcacgaggtttgttttctgaaagctttgtggtttcggtgagctctcagagccgatttctagcgtccgtgccggggacaggtgtccagaggtcgactgctgcagacatggcggcctccaccgcggccgggaagcagcggattcccaaagtggccaaggtgaaaaacaaagccccggctgaggtacagataactgctgaacaactcttaagagaggctaaagaaagagaacttgagcttcttccacctccacctcaacagaagatcacagatgaagaagaattaaatgattataaactaaggaaaaggaagacttttgaagataatataagaaaaaacaggactgtgattagtaactggataaaatacgcacaatgggaagaaagcctaaaggagattcaaagggctcgatccatatacgagcgtgctttagatgtagactaccgaaatattacactctggctgaaatacgcagaaatggaaatgaagaatcgccaagtcaaccatgctcgaaatatctgggaccgggccataacaacgctgcctcgagttaatcagttctggtacaagtacacgtacatggaggaaatgttgggaaacgttgccggtgcccggcaggtgtttgagcgctggatggagtggcagcctgaggagcaagcctggcactcctacatcaactttgagctgagatacaaagaggtggatcgggcccgcaccatttatgagcgatttgtcctcgtgcaccctgatgttaagaactggatcaagtatgcccgctttgaagaaaaacatgcttattttgcccatgcacggaaagtgtatgagagagctgtggaattctttggagatgaacatatggatgagcacctttatgttgcctttgccaagtttgaagaaaatcagaaagagtttgaaagggtacgagtgatttacaagtatgccctggacagaatttcaaaacaagatgcccaagaactctttaaaaattataccatctttgagaagaagtttggtgataggcggggtattgaagatatcattgtgagcaaacggagattccagtacgaagaagaagtgaaggcgaatccacacaattatgatgcatggtttgattacttgcgcttggtagaaagtgacgcagaagctgaagccgtgagagaagtctatgaaagggccattgccaatgtcccacccattcaggagaagaggcactggaagcgctacatttatctttggatcaactatgcactctatgaagaattggaggcaaaggatcctgagaggacaagacaggtgtatcaagcctctttggaactaattcctcacaaaaagttcacatttgccaaaatgtggatactgtatgcacagtttgaaatacgacagaagaatctgtcattagccagaagagcattgggaacttccataggcaaatgtccaaagaacaaattatttaaagtttacatagaattggagctacagcttcgagaatttgacagatgccggaagctttatgaaaagttcctggaatttggacctgaaaattgtccctcatggattaaattcgctgaattagagccaatccttggtgatattgacagagcacgggcaatctatgaattagccatcagtcagccacgtttagacatgccaaaggtgctttggaaatcatatattgattttgaaattgagcaggaagaaacagaaagaacacgaaacctttaccggcggttgcttcaacggacgcagcatgtcaaggtatggatcagctttgctcagtttgagttgtcttcaggaaaagaaggaagtttgactaaatgcagacaaatttatgaagaagctaacaaaaccatgcgaaactgtgaagaaaaggaagagagacttatgctgctggaatcttggcgaagttttgaagaagaatttggaacagcttcagataaggagagagtagacaaactcatgccagagaaagtcaagaagagaagaaaggtccagactgatgatgggtctgatgcaggctgggaagaatactttgattacatctttccagaagatgctgccaaccaacctaacctcaaactcctggccatggccaaactgtggaagaaacagcagcaggaaaaggaggatgctgagcaccatccagatgaggacgtcgatgagagtgaatcctgatctttttttcatagacaaatgttttgttatttttataaattaattgttggaaaaaaaaaaaaaaaagaaaaa

SEQ ID NO: 22374 - DNA, 1123 bp, Homo Sapiens
  misc_feature (1081)..(1081): n is a, c, g, or t
ccatcatggaagcaatgtggctcctgtgtgtggcgttggcggtcttggcatggggcttcctctgggtttgggactcctcagaacgaatgaagagtcgggagcagggaggacggctgggagccgaaagccggaccctgctggtcatagcgcaccctgacgatgaagccatgttttttgctcccacagtgctaggcttggcccgcctaaggcactgggtgtacctgctttgcttctctgcaggaaattactacaatcaaggagagactcgtaagaaagaacttttgcagagctgtgatgttttggggattccactctccagtgtaatgattattgacaacagggatttcccagatgacccaggcatgcagtgggacacagagcacgtggccagagtcctccttcagcacatagaagtgaatggcatcaatctggtggtgactttcgatgcagggggagtaagtggccacagcaatcacattgctctgtatgcagctgtgagggccctgcactcagaagggaagttacctaaagggtgctctgtgctcacgcttcagtctgtgaatgtgctgcgcaagtacatctcccttctggatctgcccttgtctctgcttcatacgcaggatgtcctcttcgtgctcaacagcaaagaagtggcacaggccaagaaagccatgtcctgccaccgcagccagctcctctggttccgccgcctctacattatcttctcccggtacatgagaatcaactcactgagcttcctctgaagccttgaagggttttcaggtccaaggaacaaaggggaaaatagacaaaggagtgcagaggacctggcctggcactggcttatttacctgagctcaaggagatccccgctggagcagcctctgcaaaagggagcccatgtaggccaggggctgtccaaactccagcttcttcccctgggaaaaaacccaaagaaccaaaaacaaaccaccccaaggataataatagctacactgctagcttctcaagttcttgtgaaaaacaatttacataatgacacagtagatgtggaacacctagcccagtgcctgggcaggtncctattatcataaatgaacataaaagtgctctaaaaacactc

SEQ ID NO: 22375 - DNA, 3851 bp, Homo Sapiens
ctctcccaaccgcctcgtcgcactcctcaggctgagagcaccgctgcactcgcggccggcgatgcgggaccccggcgcggccgctccgctttcgtccctgggcctctgtgccctggtgctggcgctgctgggcgcactgtccgcgggcgccggggcgcagccgtaccacggagagaagggcatctccgtgccggaccacggcttctgccagcccatctccatcccgctgtgcacggacatcgcctacaaccagaccatcctgcccaacctgctgggccacacgaaccaagaggacgcgggcctcgaggtgcaccagttctacccgctggtgaaggtgcagtgttctcccgaactccgctttttcttatgctccatgtatgcgcccgtgtgcaccgtgctcgatcaggccatcccgccgtgtcgttctctgtgcgagcgcgcccgccagggctgcgaggcgctcatgaacaagttcggcttccagtggcccgagcggctgcgctgcgagaacttcccggtgcacggtgcgggcgagatctgcgtgggccagaacacgtcggacggctccgggggcccaggcggcggccccactgcctaccctaccgcgccctacctgccggacctgcccttcaccgcgctgcccccgggggcctcagatggcagggggcgtcccgccttccccttctcatgcccccgtcagctcaaggtgcccccgtacctgggctaccgcttcctgggtgagcgcgattgtggcgccccgtgcgaaccgggccgtgccaacggcctgatgtactttaaggaggaggagaggcgcttcgcccgcctctgggtgggcgtgtggtccgtgctgtgctgcgcctcgacgctctttaccgttctcacctacctggtggacatgcggcgcttcagctacccagagcggcccatcatcttcctgtcgggctgctacttcatggtggccgtggcgcacgtggccggcttccttctagaggaccgcgccgtgtgcgtggagcgcttctcggacgatggctaccgcacggtggcgcagggcaccaagaaggagggctgcaccatcctcttcatggtgctctacttcttcggcatggccagctccatctggtgggtcattctgtctctcacttggttcctggcggccggcatgaagtggggccacgaggccatcgaggccaactcgcagtacttccacctggccgcgtgggccgtgcccgccgtcaagaccatcactatcctggccatgggccaggtagacggggacctgctgagcggggtgtgctacgttggcctctccagtgtggacgcgctgcggggcttcgtgctggcgcctctgttcgtctacctcttcataggcacgtccttcttgctggccggcttcgtgtccctcttccgtatccgcaccatcatgaaacacgacggcaccaagaccgagaagctggagaagctcatggtgcgcatcggcgtcttcagcgtgctctacacagtgcccgccaccatcgtcctggcctgctacttctacgagcaggccttccgcgagcactgggagcgcacctggctcctgcagacgtgcaagagctatgccgtgccctgcccgcccggccacttcccgcccatgagccccgacttcaccgtcttcatgatcaagtacctgatgaccatgatcgtcggcatcaccactggcttctggatctggtcgggcaagaccctgcagtcgtggcgccgcttctaccacagacttagccacagcagcaagggggagactgcggtatgagccccggcccctccccacctttcccaccccagccctcttgcaagaggagaggcacggtagggaaaagaactgctgggtgggggcctgtttctgtaactttctccccctctactgagaagtgacctggaagtgagaagttctttgcagatttggggcgaggggtgatttggaaaagaagacctgggtggaaagcggtttggatgaaaagatttcaggcaaagacttgcaggaagatgatgataacggcgatgtgaatcgtcaaaggtacgggccagcttgtgcctaatagaaggttgagaccagcagagactgctgtgagtttctcccggctccgaggctgaacggggactgtgagcgatccccctgctgcagggcgagtggcctgtccagacccctgtgaggccccgggaaaggtacagccctgtctgcggtggctgctttgttggaaagagggagggcctcctgcggtgtgcttgtcaagcagtggtcaaaccataatctcttttcactggggccaaactggagcccagatgggttaatttccagggtcagacattacggtctctcctcccctgccccctcccgcctgtttttcctcccgtactgctttcaggtcttgtaaaataagcatttggaagtcttgggaggcctgcctgctagaatcctaatgtgaggatgcaaaagaaatgatgataacattttgagataaggccaaggagacgtggagtaggtatttttgctactttttcattttctggggaaggcaggaggcagaaagacgggtgttttatttggtctaataccctgaaaagaagtgatgacttgttgcttttcaaaacaggaatgcatttttccccttgtctttgttgtaagagacaaaagaggaaacaaaagtgtctccctgtggaaaggcataactgtgacgaaagcaacttttataggcaaagcagcgcaaatctgaggtttcccgttggttgttaatttggttgagataaacattcctttttaaggaaaagtgaagagcagtgtgctgtcacacaccgttaagccagaggttctgacttcgctaaaggaaatgtaagaggttttgttgtctgttttaaataaatttaattcggaacacatgatccaacagactatgttaaaatattcagggaaatctctcccttcatttactttttcttgctataagcctatatttaggtttcttttctatttttttctcccatttggatcctttgaggtaaaaaaacataatgtcttcagcctcataataaaggaaagttaattaaaaaaaaaaagcaaagagccattttgtcctgttttcttggttccatcaatctgtttattaaacatcatccatatgctgaccctgtctctgtgtggttgggttgggaggcgatcagcagataccatagtgaacgaagaggaaggtttgaaccatgggccccatctttaaagaaagtcattaaaagaaggtaaacttcaaagtgattctggagttctttgaaatgtgctggaagacttaaatttattaatcttaaatcatgtactttttttctgtaatagaactcggattcttttgcatgatggggtaaagcttagcagagaatcatgggagctaacctttatcccacctttgacactaccctccaatcttgcaacactatcctgtttctcagaacagtttttaaatgccaatcatagagggtactgtaaagtgtacaagttactttatatatgtaatgttcacttgagtggaactgctttttacattaaagttaaaatcgatcttgtgtttcttcaaccttcaaaactatctcatctgtcagatttttaaaactccaacacaggttttggcatcttttgtgctgtatcttttaagtgcatgtgaaatttgtaaaatagagataagtacagtatgtatattttgtaaatctcccatttttgtaagaaaatatatattgtatttatacatttttactttggatttttgttttgttggctttaaaggtctaccccactttatcacatgtacagatcacaaataaatttttttaaatac

SEQ ID NO: 22376 - DNA, 9724 bp, Homo Sapiens
ggtaccatgaagcaagaaaagaccaaggagatggtgaagacagcagaagcccagaagcagcaactgaaggaggagcaggggaggtcagcaaggaacgggagagtggggatggagaggctgagggagaccagagggctggagggtactatttagaagaggacaccctctctgaaggttcaggtgtagcgtccctggaggttgactgtgccaaagagggcaatcctcactcttctgagatggaagaggtagccccacagccacctcagccagaggagatggagcctgaggggcagcccagtccagacggctgtctatgcccctgttctcttggcctgggtggcgtgggcatgcgtctagcttccactctggttcaggtccaacaggtccgctctgtgcctgtggtgccccccaagccacagtttgccaagatgcccagtgcaatgtgtagcaagattcatgtggcacctgcaaatccatgcccgaggcctggccggcttgatgggactcctggagaaagggcttgggggtcccgagcttctcgatcctcttggaggaatgggggtagtctttcctttgatgctgctgtggccctagcccgggaccgccaaaggactgaggctcaaggagttcggcgaacccagacctgtactgagggtggggattactgcctcatccccagaacctccccttgtagcatgatctctgcccattctcctcggccccttagctgcctggagctcccatctgaaggtgcagaagggtctggatcccggagtcgtcttagtctgccccccagagaaccccaggttcctgaccccctgttgtcctctcagcgcagatcatatgcatttgaaacacaggctaaccctgggaaaggtgaaggactgtgattaggaccacagccctgggcaaaggggaccagcaagttgtcttgaatctccagggttcctgactagctgtctcctctgcagcatgagcagctgtagtgcccaactctataggctttggccctccagcttctctctttgactgtgggaggcactgccttggttggtttacctgaacttgtctccgacacaaagcacttatctcttaggagattcccaagaaagtcaacaagatcttgttcccagggagtgggtcattggccaaagggaacataaggtaggcagaaaacttaaaagagtttgttaaagtgaagactggagaaattcctcccttcctctgagctgtgaatctctcttcatgaaagccaaaggtagagacagggaggacagggccaggttagggccttccacacacaaacacttctagagttgcccattcctgttatgttcttggaccctaagatacctcctgtcccttttaaatccagattaagagaaacgtccaggaagagctctttgaagccctcaatatttgttggagggactggactcctctccagctccccaccctctgcctccagtcaccatgtgcaagagaggtcctgtacagatctctctgggctctcctttctcctttggaataacttgttcctatttcaggaaagggaaatggtgtcactcaggccctgggactgcttctccagccaggctggggccacaggtcccactctagtgaaggtcaatgtctcagaataaaagctgtatttttacacatagtgtggagtctcattattcttattaaagtctttggtgataggtattatatcttcacatatttggcaaaacattctttttcttcttcttgtttgggtgctcttcctcagttgttgtcatggagactagtggccagaaactagagctaggttcatggtggtcaggaaataaggaagagaaacttatatttacataatgcgttcattatgtgccaggaactggactaagtatcctgtgctcacaaaatctatgtccttgattttatttaatccacacaattctggaaggttggtgctagtatctccagtttatagatgaggaaactaaggctcaattaagtcaaaatgtttgccaaaggtctcagaggtaagaagtggcagagatgggtttgaaacctggatctgcctggcccccaagcttgaatttttcccattataccacactactccaaatccattcagggtaggtcttgattgagaagaatgggaatcaagattcctgtcacagaaggtgtgagcctttagaacactagaagctttggggtctttggatgagtgactgctgacgcgaataacaaggaacatatccaattctatgcatgccccgataggtcgtaatctctagcaggtaacctttcaaaaagacgccctgcgccaagatggcctcccaaatagcccttgttaaagatggcgcctccgtcggacgtccctcccttgatctcagctggattctcttctttcctggaatgaaaaaatgccctgccaagcactaagatattagtacaagttagtcgtctctttcccgttcttgtcgaaagtggccaggccttcagctacattctccaggacacggcttctttccggcttcacaaataacccacaaacaccaactctcatcaagatggagtgagcggaagtggggcagttctgagtttgagtttatgggcggggcgagagcgacacttccgcccctcaccaacatggccgcgggctggaagtgcgcatgagcagctgtctatggagatacctaggccgggagagggagaacacagttggagaaaatcggcagctgagacggccttggccggtgagtgtaggaccgggcagaagtctggaaactgggtggactggcaaggcagggcagctttgattttgtttccgtttttcaagttagagaacactgctggggaggaaggctttgttttgggggagggggctgtgctggttctttatctcataccctgctttgtgggccaaactctctcccttccccagagcgcgagcgtcccagccctcctgcgctgtccagctgcgcgccgcagccgccggcaccgggcgcttgagctccctagtccccgaggccctttcctgcctcctccgcggagcagctggggcgcggggctaagactgcggggctgcggggtcacggcgcaggctcccgggctcgcgcctggcgggcgctcagctccgtaagcgccttctggttggtgagcctgcagggagacgcctcattctaaggcaaggtctaggtgcctgacttctttcgggagttgattttttttccctttgtgtccagacttagcaagggctcttactgggcccttctggcctgagcgtgcacaccacaacgtcccatccctgtttccgtgtcaccgatccctaatgcctaggaaatgcttccggatgtccaactaagatttgaataagtaccctgaccccgttgctgggtgtcctcagagactgccccggctgacagctgtggccaatagagatgcctcctgtgccgggccctctatttcattgccttcccctgcagtcagcgcggcaagcttcgcagggcatttcctcttcaggtttgaagatggaaatgtaggtggtcccaaaacactagtgctacttccccttatcgactgggatctccttgcagcgttacttcgtctgtacggtttcactttcagttcctttttcaacattttcctcggacgcggtctttccgaggcttatccactgaaaattttccttggataggaaaggtttggaggaccttatgggtagagaatttccaaaaatcttgccccttttgtgttgggattatcttattgctttgtactgtgtagctgtttctttctggaggcatgtctgcccagctctttgtttttcctgccctctggctgggtgtcagggtcctaaggcagagcttgtaggtggattcttccccctttgtctcttcttcagaaccctgtttttttttttttaccccttcttgctcaggcttagttgatttggagttgtcatagcaacattttagcaacagtgttgttctgcaggaaggcttgatgaataaaatagagaatgcttgaagacgatccacttgggctttagggtttctaacagattatataaatctggataccccaaaacaagagtcctgtcagtagaatggggcccaaatgccaagtctagtctttgtggtcagggatattcttccagtggtagtgggcttcagatttcctcttcctaggtttgaaaacagaaatgtcttgatggacaacatgtggctgagaaactggaagaagcatcagtgtccatgacactgtattttttgatggtggggccaatacatggcccttcctgattcccatgaagctgccatcatggcaggtcataatagctttaatgatccatttagagatgtgttgttggctgggtgcggtggctcatgcctgtaatccaagcactttgggaggcggaggcaggcggatcacctgaggtcaggagttccagaccagcctggccaatatggtaaaaccccatctctactgaaaatacaaaaattagctgggcgtggtggtgggcacctataatcccagctattcaggaggctgaggcaggagaatcacttgaacccaggagatggaggttgtaagccgagattgtgccactgcactccagcctgggtgacagagcaagattctgtctcagaaaaaaaaaaaaaaaaaaagaaagaaatgtgttgtttcggccaggtgcagtggctcacacctgtaatcccagcactttgggaggctgccgaggtggacagatcatgctctcaggagttcgagaccagccgggccaacatggtgaaaccccgtctctactaaaaatacaaaaattagccaggcgtggtggtgtgcacctgtaatcccagctactccggaggctgaggcaggagaatcacttgaacctgggaggcagaggttgcagtgagctgagatcgcgccactgcactccagcctgggtgacagagagagactctgtctcaaaaaaaaaaaaaaaaaagtgttgtttctgtcttccagtataattatccactctccaccaggagttggagtgataatggagggatggggaacactatttgtagccttgctttttcaatcactgtaggccagtcctcaacatcagtatggtggaggctgattgtcccctgcagatgactgggttattttcctggctatgtgttcatggaacctaagttctagaaccagagatactgttctgtttcctaaactcattgcaaacttcatgatttctaccaggacttagcactcaggcctgtgaatcaggaaatacaaagacctccaaaaaaggaccagttcctcggatgtgccccctcacagagagatgaaggggtgagtgaagaagaggtagggtctgggatgaaagatgggtggcctggaagaatgcaaaatgaccaagagcactgcctctggagtcaggcagacctggattcaggttctactctatcacttactgtgtgatttggtttctctatctataaaatggaagtagtgctatctatctcgtggtgctgtttttagtactaaataagattacatgtaatgtacttagcttagtgcttatgtacatagtaaacagtaaacactagttgttattctaacctaacccagcttctgttgggaatgccaatgagtttgcagccatatgttactgggccagtgagcttctcattgacttcttctcatactcttccttttgtcctttcaccacaaacaggcagcagaaaacagctgaaacggaagaggggacagtgcagattcaggaaggtgagtgctagaaacagaaccaagactaagaacccatcatggcctcccttccttccccaccagaccatctcctgtgcatcctcctccttccgtgacatgcaaatggaacgggggtagaaaggcagttaactcacagacttttcctttgttcttttaattcaggtgcagtggctactggggaagacccaaccagtgtggctattgccagcatccagtcagctgccaccttccctgaccccaacgtcaagtacgtcttccgaactgagaatgggggccaggtaagggagggggccaggtggctgcaggtgttatctggggttgggattgagggaggtaattgaacatgtcttggggagacctggcttggaggatgagttgaaagagtggactgttgcaggggagggaggtgctaatactggagtagagactggtgtgaggttagatgtatgctgaaacctctgtgtggggaaagaagggagaatggctgaatccatgtctctgaaggactttgttttggggccctatccaagggaagctttatgaggggccctaggattcccaacacttaatcttttcttctctcttcactccctctgccttcctctacacttctaggtgatgtacagggtgatccaggtgtctgaggggcagctggatggccaaactgagggaactggcgccatcagtggctaccctgccactcaatccatgacccaggtacagggtatgggctggggaggtcactagagttctgagaagtaagatgaagaagggaatcagtaggatgggggtgaagctaggaacagtgaggcatctaaggctgccttgtcccaaagcactaggctctccttttctggatgtttctctctctctctctctctctctccaccctacctaccaccccaagggatagaagctgcagagtggtgtagtgggaagaagtttttgactgttaccagaatcagttttcttgctccccttcccaggcggtgatccagggtgctttcaccagtgatgatgcagttgacacggaggggacagctgctgagacgcactatacttacttccccagcacggcagtgggagatggggcagggggtaccacatcggggagtacagctgctgttgttactacccagggctcagaggcactgctggggcaggcgacccctcctggcactggtgagatattgcatgaggatgctggctgaaagggctagaataggctgtgggacatgactggtaggcagtgagccttcactcatgactcttagtgatcattaagacctggacaggcagtgagtccggggctgctcttctattagcatgttctttttagaggaggggaccagggtcttcacctcagggcttggtgaggttcctacccatgtcctgacagaacctaccctgcatcttcacaggtcaattctttgtgatgatgtcaccacaagaagtactgcagggaggaagccagcgctcaattgcccctaggactcacccttattccccgtgagtgacccttgtttcttctcagattccgtaagtggttttttttttttttttttttttttgagacagagtcttgctctgtcacccaggctggagtgcagtggcatgatctcagctcactgcaacctctgcttccagggttcaagcgtttctcatgcctcagcctcctgagtagctggaactacagacatgtaccaccacccctggctaatttttgtatctttagtagagacagggtttcaccatgttggccaggctggtctcgaactcctgacctcaagtgatccgcctgcctcggcctcccaaagtgctgggattacagatgtgagacaccacacccagctaccataagtggtcctaatacctgctaaatcttgtataattccttaaccccaaacttcaatcatgtattttgtcttcttactctggccaccctgggctctgttgtcaggaagtcagaagctccccggacgactcgggatgagaaacgcagggctcagcataatgaaggtaggtatgatctgggtggagctagaagctgtctggtgtgatctcagcagtgatgtctgaggggaggagggattaggtaattttaccctgggacttgtggcgagttttcactgagtcaccttgtcctccactttgccccacagtggagcgtcgccgccgagacaagatcaacaactggatcgtgcagctctccaagataatcccagactgctctatggagagcaccaagtctggccaggtcatggaaagaccctggtagtgggcaggatgcctgaattctgcctcctggtattgtttccagaaatggtagagagaggggcacacatgacagtagtcttatctctccctgaggttcctgtatccctgggagatattataccaccttccttagatgaaaatgaggtccaaagtgtgaacctacttttggaaagcaagctgggtatctgaaatcctagttctcattttgttgaccttatcttgcagagtaaaggtgggattctatccaaagcttgtgattatatccaggagcttcggcagagtaaccaccgcttgtctgaagaactgcagggacttgaccaactgcagctggacaatgacgtgcttcgacaacaggtcagactcctacccccagtgcagcccttctcagttctgctagccactgacccagtttgacaccctctactttgttctccatggagaaggcttcatcttttccccctcaccagtggatgtctgaatacattcaggggcttggaagtgccagctttactacccattccctttactgcctccttcccatgtcaggtggaagatcttaaaaacaagaatctgctgcttcgagctcagttgcggcaccacggattagaggtcgtcatcaagaatgacagcaactaactatggggattcaggggctttgggcccaagaactgcagatagcccaggagcaacagcctaatcccgtgcccctttccttcactgccccacttctggcatgggacagggggaagttcagaaggtgtgtccttgaactgaggccctgtgatatggcggcctgcagtggtgtgaaacacacaatgtggacgtgcactgacagccttgcccacccccaccatgcagcccctgggcccttgtgctcctctcgcacaatgcatgtgctgtctccatgctggatactggacacactaaactctggggcttgtcctgtgcttgcttagagtgcccagcagaggtttgctgacaggtgatgctctggcttgccccaggactctggcacttccattggttcttcctttccctggagctgaggtttagatgtgcaacctgtggctcaggggagcaagcttacacaagaagtgagggaaggatgtttagcagtggctggtgcccatgaagaggagattggccagtgagaagctgaggcctatgcagacatctctggagccagagagaacaacaggcaggggcccacttggggccttcccccttgtgggggtcgtttttttttttttcttttcttttttttttttttttttttttttaagataaaattgttcaaagccacagttgtctgtttttcttccttttgtgggccacgggctggaagggaggggcacattgctcttcgaccagtaagggctgtgccaagttcagggtggggtgctgctcctgcatttattacccggagtcctggttcctgggccagaccggtgtgtcgtttttggcccaagctagagaatgttaagggcttctgcggtgggttggtgctagaggcgccgcgaacaggtgctgcgggggcggcgcgggaggcggtgcccttgcttccggatccggtctcagctctgggagggaacgggagatgttgcaggcgccgagagggcgggccagggccgcactccggagactcgcggttgctacgcgcaccatggctggaggtacc

SEQ ID NO: 22377 - DNA, 9824 bp, Homo Sapiens
  misc_feature (1474)..(1474): n is a, c, g, or t
  misc_feature (1520)..(1520): n is a, c, g, or t
  misc_feature (1581)..(1581): n is a, c, g, or t
  misc_feature (2261)..(2261): n is a, c, g, or t
  misc_feature (2467)..(2467): n is a, c, g, or t
  misc_feature (2496)..(2496): n is a, c, g, or t
  misc_feature (2719)..(2719): n is a, c, g, or t
  misc_feature (2781)..(2781): n is a, c, g, or t
  misc_feature (3450)..(3450): n is a, c, g, or t
  misc_feature (4442)..(4442): n is a, c, g, or t
  misc_feature (4458)..(4458): n is a, c, g, or t
  misc_feature (4461)..(4461): n is a, c, g, or t
  misc_feature (4478)..(4478): n is a, c, g, or t
  misc_feature (4727)..(4727): n is a, c, g, or t
  misc_feature (5177)..(5177): n is a, c, g, or t
  misc_feature (5613)..(5613): n is a, c, g, or t
  misc_feature (5622)..(5622): n is a, c, g, or t
  misc_feature (5636)..(5636): n is a, c, g, or t
  misc_feature (5650)..(5650): n is a, c, g, or t
  misc_feature (6123)..(6123): n is a, c, g, or t
  misc_feature (6794)..(6794): n is a, c, g, or t
  misc_feature (7052)..(7052): n is a, c, g, or t
  misc_feature (7058)..(7058): n is a, c, g, or t
  misc_feature (7078)..(7078): n is a, c, g, or t
gatcgatttattcccttaaaactcgtggaaggggtacgagttggtgggcacagaggagtatcgaaagtattagagtttgcagaaggtgggaatcagagtacctttctgcagaaggcgcacctgttgcctgctgctcggctgcattgtctgcgaaaggaaaaggggcgacgcttcactctgacttttggggtttctaaagagctgggtcacggtcactgtctaccctctccccttcctctccccccccccccgcaagcaccacgtcctccatcgaacgtgggcactgcatggaaataaggaaacatagaaaaataagccctacccccactcccattccctttcagatgggagtgtggggggtgggggtggggtagagagagtgagagagagagataattagaatgaatatatgccagaagaggaggaggcctgggacaggaaaagggagtaaaaggggatgaaccgggtagggaaatcccacccgaactgcgtgagccctctgagcgtctcgtgtcatgggacatctgtacgctcttccgctaagggggtgacgaaggtgggtgggagaggttagggcgctgcaaggcacatcccattccgtgcggctccaggtgcgtactacctggcccacgccggccttgccttccgccggtgcttttgttgcaccctccccacatgtgagcggccgagccgctgcgcgggcgcaggggcttcggggaaagtgaagtgtcgcgacgctgcgggctgcgcagacctgggagaggtcacacctctttcggaaaaaaaaaaagaaaagaaaaaaaacaccaaaaaccacccaagctggctaccaaggtgaacgcagagcggttcccaccttaaaatcggccctgctcgtgacgtcaggtcggaaatataccaaagcgagcgcgggccaggagtccagggagcgcggcagcgcggcgattgggcggcgggccgctgacgcgcgctgacgcgcggagactttaggtgcatgttggcagcggcagcgcaagccacataaacaaaggcacattggcggccagggccagtccgcccggcggctcgcgcacggctccgcggtcccttttgcctgtccagccggccgcctgtccctgctccctccctccgtgaggtgtccgggttcccttcgcccagctctcccacccctacccgaccccggcgcccgggctcccagagggaactgcacttcggcagagttgaatgaatgaagagagacgcggagaactcctaagtgagtagatgcagcccatgcagttcgccttcttttatgctttttccttcttttgcacgtctcttctttccacttgtgtgggacaggttctctggaagtgggagccagaggcttctagtgagagtgggaccgaaggatggggagtgcgtgcgcgcagttaccggggggcatttgttcgaactccggctttggcactagtggggagttggctctcgacanaggtttccaggctcctcattggtggacgtggaagggagactccacngttttgggagctgaggactagcccgcggaaatgtgcgcaaagtttgctgttagtgaggaantgattgtggcctgtgaacacggaaactccaagtcctatgtatacgagggaagctgcccacaaactgacagggagaggaagttcttcagtttatgcgttgcttgggaactgtgtctccgcggctggccagcgcgcgatgtttcccgggtattgttgagtaagggtggtgttggtagcgtgtcctgttactaagttgcctgaaatttctggttttgacatatgctgtccttgggtttgcgaatgtatcagagcgagaatatgaatatgtaaagagtacagttatgaaactgtggagctaccagggggttaatatccaacacaggaatatctctaagggctgtggggttcgagtctcctttctgctttttctgggtaatcttccccccacccccaccaccactatgaagcaagattgtgggggaggggaaagaataaaaagagaggatactggctttcttttttcattagtaataagattgtctgtgctctagaatgtcttccaagtgggaacatctgaaaattactaggacacaagaatgccttgttccagaaaggcagattgtggaaggcattatggggaaggtgttcatcttgctgtgctgggaaacacttctaatattggtgccaataccatataagcagtatgtcccccctctgcaattgacctaagaagctcctggnaaagtagatcccctcttcccaccttgtgaccattaagccttgtgaccattaaagatgctgaaagacaagttttctggaaaagtgaacatcaatttatctgtagctccaatcccagtgctctgtcaaaagcactttagaagtgcggatgcttccactcaagttgccttctcagtcaaggcctttctaacattttgtaagggggaagnttgttttctcattttatattcttgacttntactttcttcccctctaccaaaagaaaaggcaatttcaccacaagaaaaaaaaatgcaagagaaggttccaatgctgtattttcatactctagtcttcatactcaggtcctgaattaacctaagatggaaatgacctctccacctacactgtagcaaaggggccagttcattacatcataaatgttaaatgagttcatggactagctttcctcttgcaggatnttctctctgcaaggatttacacagtgcaatgggtggtattttctgttgtttcaagtcatttnttttatacattcattttaagtgctatgtttggtaaaggcttcccactcatttccaatgagacaaacagggaaggcatggaagggcctgcctggtgagtctacatatgcccagctgaatctctgtcgggaagaaaccctgaagcttcctgtgtctgtatttcagggaggagattggacaggctggactccccattgcttttctaaaaatcttggaaactttgtccttcattgaattacgacactgtccacctttaatttcctcgaaaacgcctgtaactcggctgaaggttagtgcaacttcatttctttcctttactctccagagctccccaaacatcaagaaacaggacaaggcaaaccctgtaacttaaggtttgcccgacccatcgccttcgggaacaactttctcattgtgaaattcaacttcatttctagatggtcatttctagaaagagactgctgaatctgagcttcagagaagaggctcatctgagtgggatgagtgggggggtatgagggagatgtttggaaatacccaggagtgtagaccctcagtagctttttagctctgggtctttatttggttagtctttccacgccctaaactgttgttctgcagcattctctctctcctgcctttcctctcgcgcccctacatgctctctgacngccgcgggctgccggtgtagctccaggtgtacccgagcccgggagaaagtgttcagttgacccaggctgagtgtgttatcaccctgtttcatttccagccatgccttgtgttcaggcgcagtatgggtcctcgcctcaaggagccagccccgcttctcagagctacagttaccactcttcgggagaatacagctccgatttcttaactccagagtttgtcaagtttagcatggacctcaccaacactgaaatcactgccaccacttctctccccagcttcagtacctttatggacaactacagcacaggctacgacgtcaagccaccttgcttgtaccaaatgcccctgtccggacagcagtcctccattaaggtagaagacattcagatgcacaactaccagcaacacagccacctgcccccccagtctgaggagatgatgccgcactccgggtcggtttactacaagccctcctcgcccccgacgcccaccaccccgggcttccaggtgcagcacagccccatgtgggacgacccgggatctctccacaacttccaccagaactacgtggccactacgcacatgatcgagcagaggaaaacgccagtctcccgcctctccctcttctcctttaagcaatcgccccctggcaccccggtgtctagttgccagatgcgcttcgacgggcccctgcacgtccccatgaacccggagcccgccggcagccaccacgtggtggacgggcagaccttcgctgtgcccaaccccattcgcaagcccgcgtccatgggcttcccgggcctgcagatcggccacgcgtctcagctgctcgacacgcaggtgccctcaccgccgtcgcggggctccccctccaacgaggggctgtgcgctgtgtgtggggacaacgcggcctgccaacactacggcgtgcgcacctgtgagggctgcaaaggcttctttaaggtgagcaaatggcggggagcggagttangcaggtagggagcccntantgcccgggacctcggantgtgccctctgccttggtgccagtagcccagccccagctctcccgggactgcccagctctccggggtccgccgaagctgccctgcaggagaccatgggctgcggcggggacttcccgggtgtctgagaaagggaagcagaaagactgggaggcccagggtcgcatcccccctcgcattcagccgacccggcttggccccccgcccgaagttgctggagccggagttggaagagggtcatttgcatgtgnataggagctgtcttccctgttcaagaatgaaattggttaggacagagaaccgtgtctgagctaaccaagtggaacagaattccctatggtcaaattaagtgatctctttatttcgccatcctgattgaataatcttatcattttaaatagagaaggtctccaaggaatgtaaataatatgaatgcccacggatttgtatttactgagcgtctccttctccttctcttggcatataaaacacagcaaggagcggcaaggttagctcaaatgttaacgctatcaattttcttctgttaaatgccctgggggaggaaaaaagaaaagaaagaaagaaaaggaagagaaaaaaataaaatggaattgtgtgtatgtgtttgtttgtggggaggaatcgtagaccccagtcacataacagaaattttctccgagttgcctgattttcaaaagaanaaaaaaaatgttggtctatattgtctccttttgcagcgcacagtgcaaaaaaatgcaaaatacgtgtgtttagcaaataaaaactgcccagtggacaagcgtcgccggaatcgctgtcagtactgccgatttcagaagtgcctggctgttgggatggtcaaagaaggtaggctgaggggagctgccgaccctccagtttgcgcctttaggaaaccactgctcatactccagcatcacgttccacttcccggtgctggggatctccgactccccctcagtatggcctccaggaccctgcagctgcctgcttgcccggccttccctagagaaagccgccaggcccttctctcctttaactatacgacccatttggaggaagacataaaataaccccgcattttttaatgcttctagtcagtgaaggctttacaagcantgggggccntcagccgctcagcntggtgccccgcggntgcggccttccccggggagggaccgaggcagcagctgggcctgggctcggaaaagcggcgctaacagggctcttcctttgcagtggttcgcacagacagtttaaaaggccggagaggtcgtttgccctcgaaaccgaagagcccacaggagccctctcccccttcgcccccggtgagtctgatcagtgccctcgtcagggcccatgtcgactccaacccggctatgaccagcctggactattccagggtaagaagctggcgggggggatatcatgtggacaaaccgacagatgggcaggacccctccccacatccgtcattaactctcagattcaacgggggtaaagaaggcaagcaaggctgtatatgcctcgcagctctggccagggcctcaagattcagatcttcagacaatccatgtagctgggggcatagacatgaggacaggatggaggaaggaggagagggacacnccacagggtttgaagctgtgtgaattcccactaccccactaccccatcgcccctcctcttccatatacaccagtgcctctaccatgaaatccaggggctgtgcaaactctcccccttcccaatctactttattcccagtcctccatagagatagatgctttaatcctcatccttcctggcactgtgctggggaaggatgtgggggcctgtctgggggtcagggaagggaaggagagggtgtaaagaatgccagtggggtgggggatcaagtggtcagatcctttttactccagctgtgaaaaatatgcgggctttaattggaggaagtatgttgagcaaacctggtagggactgcaattttattaagatttgcaaaagggcgtctcagctcgaggcccactctgggactagcatgaatactaacatgtcaattgttttgtggagataagagtgaacgtttcccagggctggatggcactgtatttagtctgtatggaaatgacaatttacatatttaaagcagcgacctcgtagcaccatccctaattgaattaattgccccggaacatctaatttccttactggtcagagagaggtttaattgttataaaaacctggctcccctattagaaacggggttagcaatttcacgggttatatattttagagancctcattaagtgctttttaaaatgaaattccagttccaggcgaaccctgactatcaaatgagtggagatgacacccagcatatccagcaattctatgatctcctgactggctccatggagatcatccggggctgggcagagaagatccctggcttcgcagacctgcccaaagccgaccaagacctgctttttgaatcagctttcttagaactgtttgtccttcgattagcatacaggtaataagggagggaggagacnatccanggaggctgtgagagaaatcnagaaaggaaaagaaagggaggaagggaaaccatagggtggggtagagaaaaagacagaataggaaatggaagtcggagaaaggaagaaaaagaaagaaaacaaaaaaagacgagaagaagcgagcccagaagccttggatgaatggaatggaggtgggatagggggcgttcttgattgttatgaaattaaaccctttcaaggtccactggtctacattttattaactcttcagtaattaggtgactcttaaatccctcatttattgctcttcaagtaattagttgtttagcttttctctctctctttttctcccctctctctctttggtattaattgcaggtccaacccagtggagggtaaactcatcttttgcaatggggtggtcttgcacaggttgcaatgcgttcgtggctttggggaatggattgattccattgttgaattctcctccaacttgcagaatatgaacatcgacatttctgccttctcctgcattgctgccctggctatggtcacaggtcagtactgcaggcgcagggcgcttcccctccagaactgcctagcaggatttgtcctgagtttcccttgtcacagattctccttggttttgccaactagctaactgtcttgtacattcttcttttgtttctgattatgttttctgcagagagacacgggctcaaggaacccaagagagtggaagaactgcaaaacaagattgtaaattgtctcaaagaccacgtgactttcaacaatggggggttgaaccgccccaattatttgtccaaactgttggggaagctcccagaacttcgtaccctttgcacacaggggctacagcgcattttctacctgaaattggaagacttggtgccaccgccagcaataattgacaaacttttcctggacactttacctttctaagacctcctcccaagcacttcaaaggaactggaatgataatggaaactgtcaagagggggcaagtcacatgggcagagatagccgtgtgagcagtctcagctcaagctgccccccatttctgtaaccctcctagcccccttgatccctaaagaaaacaaacaaacaaacaaaaactgttgctatttcctaacctgcaggcagaacctgaaagggcattttggctccggggcatcctggatttagaacatggactacacacaatacagtggtataaactttttattctcagtttaaaaatcagtttgttgttcagaagaaagattgctataaggtataatgggaaatgtttggccatgcttggttgttgcagttcagacaaatgtaacacacacacacatacacacacacacacacacagagacacatcttaaggggacccacaagtattgccctttaacaagacttcaaagttttctgctgtaaagaaagctgtaatatatagtaaaactaaatgttgcgtgggtggcatgagttgaagaaggcaaaggcttgtaaatttacccaatgcagtttggctttttaaattattttgtgcctatttatgaataaatattacaaattctaaaagataagtgtgtttgcaaaaaaaaagaaaataaatacataaaaaagggacaagcatgttgattctaggttgaaaatgttataggcacttgctacttcagtaatgtctatattatataaatagtatttcagacactatgtagtctgttagattttataaagattggtagttatctgagcttaaacattttctcaattgtaaaataggtgggcacaagtattacacatcagaaaatcctgacaaaagggacacatagtgtttgtaacaccgtccaacattccttgtttgtaagtgttgtatgtaccgttgatgttgataaaaagaaagtttatatcttgattattttgttgtctaaagctaaacaaaacttgcatgcagcagcttttgactgtttccagagtgcttataatatacataactccctggaaataactgagcactttgaattttttttatgtctaaaattgtcagttaatttattattttgtttgagtaagaattttaatattgccatattctgtagtatttttctttgtatatttctagtatggcacatgatatgagtcactgcctttttttctatggtgtatgacagttagagatgctgattttttttctgataaattctttctttgagaaagacaattttaatgtttacaacaataaaccatgtaaatgaacagaattttgtcttctttttgggtcagaaaaaataatgactaaacagcaacataacatacacagttggagattaatttgggataggtcacttattcaatatctgaattttaaacagcctaaatctattctggcaaaagaaatcaggtgaaccagaataattatccagataattcagtaaaatattttttcttaaccagaattttccagtctggtgaccaatatttattaggatcaatttagaatatctcaattcttctgttaactttgcaagtaagtgtagctttcaggagagaagttctggagacccaaaagcttttgaacttgagcaaggtcagagtctagtcaagtacttgtcttgcacagtgattaggaagtatctttttaagactcaagaagtcaacatggatttgaggagtgttgtatgtaatctccgattttccaatttctcaatttacaactgttgggtcatggagaaagggcaaagcagttcaggccctttgggccttgggtcactt

SEQ ID NO: 22378 - DNA, 125000 bp, Homo Sapiens
tgtgcatgggatcatgcaaccccttgaagggctgaagagaacaagaaggcagaggaaggaggaacttgcctctttcctcccacctgcctgcttgggctgggacactggccttctcctgccctgggactgggtccccaccatcagctcccgggtgctgccctcaggcttgcactggagccacaccaccagctttcccggggctccggcttgcaggcggtagctggcaggacttctcagcctccgtcctcatgtgagccaactcctcactattggtctgcttctctgaaggaccccaactcatgggtccacctgaccgtggtccaagtcccatcacactttgcaaagctgactgcagctgctgctcactggcctccctgcctggccccttccatgcaccctcctccagcatccaagaggatcctgtgaaaacccacgtcagaccatggccctctgcaccgcctcctgcaaggcatgcagtggaggaagagtgacctcaagtcactcgtgtgaccacgcggggttgcccccgtcacctctctgacctcacagcccactacggtcccccacagcccactccctccctccgctctggccacgtggcctcctgcataaggctgcttctgtgccagaacgtccttccctctgacacacacaggctccttgctcctaacacctgtaagatccctcctcctatgtgaccttttgcctggccactttctctaaaattccaactccctcacactgcacattccctcacactgcacattctatatccccttccccgcaggatttttcttttttagagatggggtctcactatggatttttcttctttgccttaatttttatccaacaccctacacattctatttatttataccatcgtgtctgtcttccccagagaatgccagcttcttcaggccagggatctctgcttattctgttcactactgaattcccagtgcccagaacagcacccaacacgcagtaatgagattgttgacgaatggaagaccgcactgctccatggggatctgggagaggaaagggttcctctctaggcagctgctgaggcctcatcgatccagtatctacacaggggtccagtccagctcctaaaagtgcaaagtaattatagatgcgattattctcctgagcacagaatcagccaggcagtgtgaggggccagcctgcactggtgctggacgcacacagagtctcagagccacaccctccaccctcctggggaactgccctgcagaaccaccccccatgggcgggcactcgtccttctggggctcttggaggaaatggttacagaagactaggccagatgacaataagggatggagaataactaagtgccaagccaatgagccatctgctggtaagaactccatgccaggcagcacaggcggtcccaacagcacgatctctggattagcccaaatagcatcggaacatttgacaacaaattgaactactagtaatagtgctcacttcaatgagccggggacacagtatccccatggcgagtcagctggcccgctgtaaccacccagctgggtctccccaccccaaaggcctccaggctgtccccttctcatcctgtcacttgaaaagcacaactcatggtgccaaagctctgacacggactccactggagctgtgggcagggggtgccaaggtaccgagttccaagccgttgttatttgagagcgtgccccccgccatgagagcaggtggggggacataaagtgacacaggatggactggccaaaggctgaggacgatcacttacctcacaggatgatgccacccccacggacaggcaaggagctctcaccttccccaggaccccagctgccaccagagctccagatggccctgggggtgtctgtaaagcctgtgaccgtccaccaggtggagaccaggctggccaggggagggagaggaagtgaccactggccctggcactggctggccggctccagcaggcccgaaggggagggaggagcctgggtgcaccagactctctcaataagcagcacccagacacttaacagatggaaagcggtggcttggaactcacttccaacgaaacaatagcacatgctccggctggctttgacacttgcttccaaaggcgacctgcacccagggccaggaccacggcatctgagcctcctcccccagccgccaaccccattcccaatggaggagcccaggagaactgggggcggccaaggcagcccttccctgctccgcagatccagaggatgcccacagcccccttcccctcccgcctttcccacactccctgtagcaattcacacaagcggggaggggacgaaactgctgaatccagcagatagcttgtggcggggtaatcctcggtccggccccatacaggacagaaataaaatcgccatttcagctccgggcgcagctggaggaggctgacgccccctagttaggggaaggctgtgggtgaccgagaaggaacttttcccgttttctattcaaatgaaatgagggtggcggtcgcagcagggagagaggagcgaggggagttttcccggcggggctggggggtccacagcggcgcggccacgctcagcccagcgctggcttaggagggacgggctgcgtggggaggcgacggctccgggccgaaggggtcgctcagggctctgcacagctgtccagggggcatcgggagataggcagccgaccgggggctggagtcaagggaagaagaaagagggggaagggaggtgcagggagtgaagaggaggggagagaggagagacgggggagggaggggggaggggggagggggaggggcgggcgggcggccgggaggaggagcgcgcgagccggagtcggagcccgagcccgagcgcgagccgagcggaggagaccctgcggcgcgcggcggcggctcccgggcgtcccgggcccggtggcggcgcggctgtggttggctgagcgccgcgggccgccccccgcccgccccctcccctgctcccctcccccgcctcccgcggcggctggcgtcgggaaagtacagtaaaaagtccgagtgcagccgccgggcgcaggatgggatccggctcctccagctaccggcccaaggccatctacctggacatcgatggacgcattcagaaggtagcccctcccccacccagacaccccctcctccccccgggtgacagcgccggggccgggcgcggcggggcgggactgtccgtgcgtctgccggtccaggctgcggcctccgtgcgctccgccagctctggtcgggggcgggggtccccacgcgccggctccccggggaaaggggcgactcgccctggggggtggggggtgggggggcgggctagtgtttccgtttcacaggcagagcttttctttttgaaaatctgattaggctgagtttttacattcaagggctggcacatgaagcctttaatttccggtggatcggcccgccgggcagccccggggtcgtggtccgcggagggggcgagcagccgccgcttcctgtcgcgcgggggcaggtgcggggggcgccggcggggacactgctcccccgcaggtgagtagctccgactgcagagggggactcgggccgctgcacctccggggccccgcggagagcctggggggcagcgggtccggctctcccctgctgtgcggagataggaagtccctcgaatgtccagcgttcctagcggacttgagttacacgggagaggggttcagaatagaccccctttgttcgtggccccctctgacgggcagggagggacaatgagcgcgccggcttggaaggggctctcatgagctccccctaaagtccccagggaaaagccattgtgaggaaatccctcaaacctcagctgggcgtttcaggaagcccttgcagctgcttctcacctttctgcccacggagtactccactgaaggaggccagggagagatgccccagccaggcacagagcaggtgccggccaggcttgagtctttcctgttcccagaggtgcatttggccagtttaatcagtagatttaagccaacaagcctccctcaccctgtgcccggcttgatccccgtgaaatggaaagtacagccctctcccaccgtagcccgctttgagagactcagataaccgggaggaggaagcatcttcaaggacaggtggtcacccccttatttaatcagtgctgggcagctgggcagctgggcagcggcagacgcacaactagacccaggtccctgactccaggactaggcgtctgcaattgcatgggactgtaacagcctcctttctccccaaaggaaggagtggccctcccttgaatatgtcactgcaccagcatgcacactcacacacacacacacatgctccaatgctcacacatccactcacaaacacacacacgcacacacgtgcatacacacacgtgcacatgagcacacagacatgcacaccacataggcacatgcacacacactttttctgcccgatagatgagaatgtatcaaagacctgcctttaaaagcaaaagtctttttaaagtgagttgtcaccagatcaacagtagcaggtccgtcctaagaacttcctaaagatgtcccgggagcagctctcttggaagcaggtgaaaagtggaggagagcttcaggaggggtgggaggaggacgctgggcatggcaggccaggctgttattgtgggcagggtagcttttcacagtggacacgctgaggttggggtgatctccagaaaagcagcctgcaggtgggccctggggaagacatggcatgtggcacctttgcgggggagaggcggattgactgccagctctaccacttcctgtaccacgagcaagcccctgggctccccaagctggcatccccgtccataaagaagggataataaaatctgctttatagactggaatgagaagggaatgagtgaatgtaaacactgcctggaacactgcagaacacgatgagcattattcttccctcagttccttccataaacgtccttttgtggtgcaaacagggaggcgccagacgggtctccaacccccaccccgccccccatctccacgaggtctgttgcttgctcctgagctgcccccgccctctgccccttgctgtgaaccccgttggaagctcctagctggactgtgagtcctggttgaagctgaatcgtttgcccaagccatgtgccgggcaaagcatgataacttctcgctcacctcccaggctgcacacccagcagtgctgtcacggatgggttgcaccgggctcagctgagagcactttcagtgccgctgccatcagccgccattccttctcttaaagtaccaggcactgggtaaatcctggaatttccagcgtgaatctgtctccctgccatccgccccatctcctctccatcaaaggtcatggaaacaaacccatgttgcttcctaggagggagccctgggggtcactgggtgcaggagataagggatgtgttgctttccgtcactgtgttcgtcggcaccacctggccatgagtcctggcgatgggcacacccgccccttcgttatctctgctctttgtccctctggttacctgacccctggccatctcagtttccccctgagaccgcagagacggggaggaaggagggaacattagaaactgggggttctgccgagttctgtgctccggcaaagctccaggttgacaatctgaagttgtctgagggaggccccgggcagcaagtgccggtgtctcctggcttggccttacctgtgcaggtaaccctgcagacatgcccagtgattcagaggagccgctgcagccacttggcgccaggccaatgctttatttatatgaagaaaactccagacacgcacaggtgtcacatcaccagagtgacacagtgggagtcagcaacaggaatttgggggattgtcttccctcctcaggagcttttccttcagaggttgtgcagaggaagctgggcgtgtgaagtgagtcggaggttgcctcctgagccctacacgaaggcaggactctgtgccctggagtccaactgaggctccgttttcagtgctcccctctcatctcgagaaccttgggtcagttacttcactctgtgcccctgtgctgctgtgctaataattaaatgggataaggcagattgcctggtcaatgagcccgccgtgtttattgagcatctactatgtgctgagtgctggggtccatgggaagctgagtgctggcggaatgggaaggcaactacaaatgataaacagcagcagacgttgcaggctgggtgggccagccccgtgtggggcctgatgaacaggtttttttccctgacgatcggctttgcaggctttgtgggctttgtggggaaggagccctttgtgcagaactggtagccatgaggatggcctggtgagaagctgctgaagggctggggacagcctccacccagccagcagcatctgcaccggcctgttcccgtcatctgttccttggcttgccagggtgcacagatcaggacttggcacttccccagcaccaggtgaagccctcctgtcacccccaaccccgtgtctagaccctcaggtgggctgttaaagaaggggagaggtggaagccaggtccccaaacctagggtgctgaggtccttgcttcagagagactgtgtcctctaggagctgaagcgcttcgtctttccccagaggattcgttttttcctttcctcagctgcccctaccctggggggccctggctgcagcacctgctcctttctcttgcctatggagaaagggtttgctcagctgagctgcccatggagtgacagggacgacgcactcagcactggggagctggagggggtcccacctggtggcacatccaggcttgggtttgccaatcttccgaatcggggaagagagaggcctttgggacccctgggccaggctgtgggctcgggtgtggtgaggagccacatctgggcaagactgaatgctccggggcctctgtggtgccactgccctgacctggcggccccctcgggacactcgcactgtgcgcggcctccctggcgcctctgggctgtggtgttctggtcttggccttgctctgcagctggaacccaggtctgaacacatcggtggccgcttgagtttgcggggctgtttctactgtaaaccagagcagtgaatgcgcacagcccaaagggaggagccgcgctagaaagtgttcaagcgtccgcagaagtcggctcccagttcttaatagtttgccacccaccgtggctacgccacacctacgcttgcctccacccgacctatgcctgcccccttcacatgcgggagcccagggctccgtgccctgggcagctggtggggtctgcccaggccttctcgtgatgcttccacccagcctggtcctggcacccaaggccaacctctgcgggccccagagctgtgcctttttggctcaggtcctccccgcagtgcttggagtccaggcctctgcaccctgctggggtggtctgtggtcctggcccaagggaatgtcgctccctgctgcctggttctactgatctgtcctgttcaggcccctctgccttcatttcttgctttggcacaagcatgagctgctgtttcccccagctcctcaggggagaggagtgcactgccccaaccttgtctggtgtggttagcatggtggggccttaagccctacccggctcctgcgtgcctttcccctctcctgcccacgacatggtcaaatgcaaacctcctttcattttagaaggcatgggctgctcagcccacacgcgcagtgccctttcctgtggctgcaggcatctctgctcaattgtgcagggctgcgtcccccggccacactgactcctctccaggtttctcggctccagcaccactgtctgcgccctccttcccaggtggacggcggctctcctcgccatcctctccacttccagcctatcatctgtctgcctgttacatgtttgtaacttttgacctttaaattggtataaaaatggtactgtaagttcactgaaccaagaaaatctgctgaaggaagggggtcagtcacacccttttggggtttccagtgtatgaatggagggggtggcggtggtggagggacagggagcaatgagagttgccagccttattgctgtcctgacccctggctggggacgactcccctgtctccacctgaattgaagctgggctgtgaaaagtagtaagaaccctcggtttttggttcctttttcaaccagcaatcagccatgaagtgcctgaccacttgagagctacagcaggtgctgtctcggagagggcacaggaaactgggcccttcccaattttagcccaagggtgccgaaaagtcagggagctgctggcctccacactccttcccattggtgtggtccgaattcccctttagccagacatttccaatgtccagaggcccaggaggggacagctggaagccagaagcccacctgacgccatcaggaatttccatgaatgacctggaaacctctcagactaaaccaatgccgcccaatctgggaatccaggagggctggtcccatagagtggtggggacatggtgctgagacggacagcctcgcctcatccgcctttcccacttgccagccgggaggcctgggcaaaatcactttctccccagggaagtggaggctcactgtgcagtccacgcggagcaatggggtgaagtttccagagcagggcagggcatgtggggaggctcaggaatgccacccttgccctcaggcctgggcacagcatagcccccatgacgcttctctcatcctggacccatcagcccggaagactctggaagcagcagtggcagcaccttcctgtcacttgtcttgtcactccccgagtccactgtgagctagaaccacaggctcccatgaagaaggagccagaaccacaggccccatgagcccaggtcccacagcccgcaccttcgtcttccagccagcctctccggagctcagtgtgggtggaggggctgtctggcctcagaaatgggcaaaagacagctctcgttgtcagcgaggtaaatctagcgcagaggaagggcacactgtccccgtcagacgcctcagatgaactgacatgcaaatgagagatgaaacggggacgagccgggcagctgatctcagtgcagcaactgggacacctcggggcataagccgggcagggaggcggcaggaactgggccccagggggccaagacttcctgagaggctgggcccggtagcccagtcctgggcttgcttcccagggggtggtgggcaaccctgaaccctctctcacccaatcacctgctcccctgggtgcaggtgacccagcaagccgcactcctgggaaatttcagaaggttttgggcaagaagggcccagagagcccccagagaccagacggcacagcccgatagctgggcctgccccagacaaagcgtgtctgcactccttggctttctccccagacaaacccaccctgagctcaggatccctccagcttccaggagcaggtgcggggcctgcagggacggctcgcagagaaggcagtttgcgagtcagtgcctggcttgtggaggttgagaccaaggccagttgggtgcttgcatttccaggggtccaaatatttttgagaagaaaatgttctaagaaagtgcacagggtggtggatgaaagaccacgctctgggtaccgtgtacaccgctcgggtgacagtgcaccagaatctcagaaatcaccactaaagaacttacccatgtaaccaaacaccaccccttccccaaacactattggaattaaaaaaaaaaaaaaagattaaaatggttaaaaatagaaagtgcacaagcaagggtccatctgcaggagttggaggagcgcatgcctgtattcctggcactgcgggcacagtcatgccatgggcaccagggacgcccagtgcactcagccacccaggggtggctcccaacattttcaagctcaaaaagaaatattttcacttgagggtgcaacttatttgtcttgaacccatccctgactgcctgtctcccccctcaccctgaccacatctccccaaatcccgaagctggtcacgcaacgggagcattggccctgaacagaaacccgcagtacccctgaaaactcggtctagaaacaactaaaagaagaaccacagcattttattccgtttgctttagattctctgccaatttttttttttttttgagatggagtctcgctctgtcgcccaggctagagtgcagtggcgtgatctcggctcactgcaacctccgcctcccaggttcaaggaattctcctgcctcagcctccggagtagctgggactacaggcgcctgccaccaggcccggctaattttttatttttagtagagacggggtttcagcaccttgaccaggctggtctcgaactcctgaccatgtgatccgcccgcctcagcctcccaaagtgctgggattataggcgtgagccaccacgcccagccttttttttttttttaattttaaattgtggtaaaatatatgaacaataaaccctccctccccatccccctcccccagcccctgacccccactgtacattccgctttctatctccatgaaactgctgagtgcggggacctcacagaagtggaatcacacaggatcgccctgctgtgcctggcctccttcactcggatcatgccctcaggtgcatccatgttgtagcacgtgtccgaatttcctgcctttttaaggccgagcggtattccattgtgtgcgtggaccacattttgtgtttccattcaaaacggatgaatcgatgaaactgcctgatatttttaaagcctcagtcattttcattcttagttcttcagtttgcaaagggccggcctgttgtgatgggtttattgttgcatcttctgaaaaactttgtgagttcccgaaggcctctccacgtcttgagtcatggctgtgctgctttgcgaagctgtgtgcatgtctgtggtgtagcctgtgtacagcctgtgatgcgtcgcagcggaagggtagggggctgcccagggaagacagatgcgccaggttccgctccacggagctcagctaccagccctggtggagagcgcagatggggccgatttgtcatttgtctgcgcttgagcccagcagctgtgtggcctccctggggcaagtcattcaccctctctgtgcctcagtgtctctgtgaagtggggggaagtttttggaagattaagtgggctaatacgcgtcaaatgctagaacacactggcacttggtaaatgctatataagtgttatcatttttgtttgtttattatttatttatccatgtcatggatttaaggcagtctaatctcagtgcctggtggagacccgggcgccacccccccaggttgtcaagtggtccctgtgcctcccactatcgtccccagcacggtgccgtgtccgggcgtgcgtgaagggccagctcacctcacagctctgcttcccaggttagctcccatccaccctccccctacctgtttcctcaccgaaggaaggggcagaaagatgccctccatgccccttccgactgttgcagagggatggaggactatggtacatacacacatatacacgcacacacccaccacacacacacaccatgcacatgcacatcacacacacgcacacaccatgcacacacaccacacacgtacacaccatgcacatcacacacaagcacaccacacacaccaagcacacgcacatcatacacatgcacacacaccacacacaccacacaccacacacacgcacatcccacaccatgcacacacacaccacgcacacgcactgcacacacatgcacacaccatgcacacgcacatcacacacttgtacacaccaggcacatcacacacaagaacgcacaccacacacaaggacacacaccacacacacacaccaagcacacacacaccacacacacgcacacacacgcacacacccaccacacaccacacacatgcacatcacacacgtacacaccacacacagcacacacaaaaacacaccacacacaccatgcacatgcacatcacacacatgcacaccacgcacacgcacatcacatgcacacgccacgcgcctcacacacaagaacacacaccacacacacgcacaccacacacacgcacatatcacacacatgcacatcacatacatgcacacaccacacttacacacatgcacatcacacacaagaatgcacaccacatacacgcacatcacacacatgcacacaccacacatgcacatcacacacctgcatatacatcacacacacatcacacacatccacatgcaccacacccaccacacacatgcacgcacctaccacacatgcatatcacacacatgcacacacaccacacacaagcacatcacaaacaccacacaggcacatcacacacatacatacacaccgcgcacacatcacacacatgcacacacaccacacacgcacagtatgaagatgacagagaagtcagcagagcccctgggggtttcaggagttgagtggggacgaggcaggtggccacacagctcggagggagggcagaaggcacccgtcttcgcagagtcacagtggggcttgcctcctatacgtgccggaagggtgaagccccttatctcattgcccgatgtgatgaggtttgaagtggttgagcttggagggtatgggctgagcccacagcagacaggcctggcagtgccccccgtcttcccaccctgcggtcatgcagcccgactcttgggggcggggtgccaccgtgatgtgccgtcacttgcagcagtatgtcctcatgccaggctgagaccagcactgtgtgaccagcctgccccatgtccctcagcgctgtgtcacactccacactgaggccccactgaagcatgccaggccccatcctatttcttccaggtagtcgtctgcccagcacctcccctcccaggccttgccctaaagcccaggcctctcagcatccaggactctggaatctcccaggtgttgatggctgaggtcatcagctggatgccaggacacccaggatgctccaggtccttgctggggtctggagtttgtgattcagcctcagtccctgtggtgagtccaccatgtgtcctcagacaatggatcagagagcccccagaggacggcccggggccgagtcgggtccagatgccaaaggggcttctcgaggcatctccagctcccacctgcccctcggagtgccaggcttggcttctggaagagaaagctgggggtttagtgactccagccaactgctgtgagcccaaggcatcaaactaaaaatagcgaggccaagagggagtctttgtgttcggctcagtgggcaatggtgcctcacctcgcagcatgacacagggctgatgacacggggcacgttggtcacaaagtgccagtctcagcctggcacagggacgtgccacctgcaggtgatgacacatcacagtggcagccgctcctgatggtgctgctgcattgagtaggagcccagatccagggagacagttgcagcagatgaggcaggaggccagcgaggggttctacctgctttccgggctggcctctgcatggacacaaagcagaaagggcataaaggtgaccctggccaccaaagcagacctggagcaaactggaccagcgcaaggccccggtgccagcactcagagacatttcttttctggcaggaaatttgtgcttcattttctaatgaaattccaaggcaatcaaaaggcaaggaaagaggagggaaaggaagggagggagggagggggttccattcccatccgaatggaagcccccaaggcttctgtagctccccccatcaccaacttcactcaccactcttatctgatgcctcctatttgggtacacacggccgggtcggccttgcgagagactcagtttcctctcgacttccgcccgcctgcactgtcaccacgtcctgccattgacctctgttcatccactcatggtcactgctgtgagttgaattgtgtctcccaaaaaagtggatttctgtgctaacctgtgaatgtcccgttagttggaaatagggtatttgcagacataatcacatcaagatgaggtcatactgcattgggatgggcctcaagcccatatgcccgccatccttctaaggagagggaaaggcagacacacatttgtccatggaaatgagaacggaagacgtagagacagaatcaggccatgtaaagacagactcagagaccagagtgatgcatgtacaagccaggctctgcgggcagcccctagaagctggaagaggcaagcctcctccctggagtcctgggaaggagccagccccgcccatgcctcgagctcaggcttcaggcctccggagccaagagagataaacctctgtggtttcatgtcacccagtttgtggtctttgttatagcagccccaggacactcagggggttgccttgtccacccccatcctggccctctgagggactggttggctcttagaagaccgttcaacctgccctctggtcctcctcccccacccagagacccctggctacaccctgcccaagggagctcaccaaagcccacagggtccctgtgatcttgtcacctgggctcccacaggccagcagtgttggaacctggacatctggctccagccttggtggccacccccgaccttgctctgctcctacagctcccggccttccctgccctggccggcccttgctgaatgtccccgctcctaggaagccggatgtgtcgcgtgcaggtgcctctctgcactgtaataactcctcaccaggcacccttggagcccaggatcaagtcactcaccttccaaccctgcccctgcccagagactggcacgagaaccagtaacagttgttgaataatgaacaatggatgcatgcagctcacccgtgagagggcgttgctcggctgggccagggatgaagcttctcccgcgtggctccaccgtctatccctcaagctcctgatgctcccctgggcacctctgcgccatgaggccccgttgaagtcagttggggaggcagtgtggaccgtgagaagggagtcctaagcacaggaaacgctgccttcctggggccctaaagaacaggctcaccttccccaagggccttcaggccctgacatctaaaaagatgttctttatcaaaggggaaagcagccctggggtgggggcgtggccaccagtgcagtgggcgtggccacaaccgagagggcgtggtcattcgtgcagtgggcgtggtcatcaagaaagggcgtggctgcagccggaagggcgtggctatcagctccagaaggcccttcttgctgtccttggacttgggttctccttgtcgacgaggatctcagctggagctgccaggggcagggctggcaccaaagcacttctgaagtctccccgcctcccaagtgtgaggctgtggggaaggagggagggcagctggcttgtttctggatgagcccatctgactcagcagctgggacccagcaggagcgcagagcaggtcctgaaggtgccgaggccccacccgcagctccgtctcagctttgtgagggctgcactcccccgtgtgcatccggcgtcacaaaggaccacaggcccggcggcctccacagcagacaccaaggccctcgcggtctgaaggccgaattcccaggtcaggctgcagcagggctggttcctgaggcctctcctgggctggcacctcctccccgtgtccatgcagggccgagcctctgcatgtctgtgtcctcggcgcctcgttttacaaggacatctcattttaaaggcccggtctccaaataaggtcatatcgtgaagtgctggggtcagaactacagcatgaattttgacgggacacagttcagtccatagcacccgctttgggaagtgggaatgacctctcccttccccatcttctggcctttgtaaccctaatgtgggaaagcaggagggatccagaacgacattgggtcaccaaagagagcatcgcagcccaaaaggttgaaaggcggcaccaaggtcccgcgcctggtgaccgccgactcgccctcccgggctccaggctgtccccactcccccccgccccaaccccagcatgttgaggcgcctggtcccaactgcccattcactccctgtacacagactgcttctttgtcctccagccaggggtgaagggccatgctggcgaaacagcaaacaaccccaacatgctttgcagcctggccaaccacatgaccagtttgaggaggttggctggagatcacaatgaggaagttggatgagggggtccaacttctagcagcccataagcctatccattcagacaccaaatccatggaaaacagagagacaatatactgattttcaaaagggagacataccccagcaagtacagaccagggaacagggtgctgacgtggccacagttcttaaactactcgacttcatggatggggcacagttttttttaaaggaggatttagaattctatttggcaggtggcatgaaaaagagttttgaatagaaacacacccctccctcccagttgcctgcccagtatgtttgttttgttctcttgaaacaaaggaagagagtggtgaggagggagggaagatgaaccaggaagaatgaaagcacttggcctgcttctcagatggtcttggactgtctccgctcacaggagttgcaggtttttgggttttatgcaagttcggatcacaacaggcctcttgcaagaaccaggcattacctttattccaaaagccttgctgggccttcttgaaaggactggcagccaccacttccctagaaacccgtggcaagttccctcctcccgaccccctgctgtttggtccaggaccccctgcagtcctgactgggacccacttggcccttctcaagggacccagcacaggacgtgtgtttctgctttgatgaaccgccctttcccccctgcagttctagtggaatctcccctcccttatcccattcccacttggaaatgatgatgatggaatgggcgatgccggcttaccaagacatccaagctctctgggtcgaagttggagagaggggtgcacaaaaaggattccactcctgtctgccttcccctgcctccccgctggggtgtccctttcccatggtttcctctaaatcttttcacccatgtccagccacaccattctcacatactgccttgaaactgggctcgaaggggctgcgtgctgagagaaggtcctctcccccagtgatcctccagaggggctgccgcctgggtcccccgagcacctcctaccccaccctccccattcctgccatccccagggtccagggagcccagattccagggaagggttgcattagctcccactcggagtcctgatgcagcagagacagacagaggccctgggagaagtgagcatgaattattaagacaagacaagggtgaggccccagagagggggtggcggaagggtcatgttcatgcagcgagagttgcttcgagcttgaaccgcgtatccaggagtcaagcagattgcaactggcgagaggccttcagaaatgccccgtgagagtcctgtgtgcagagctccatctcagcacacttcctgttcttttggttcgtcgatttttgcattttcagtcccctgtgatccattatttataacagtggagattggcctcagacactagcagtgaggaaaacaaaagcgaagctacgcagaaaaatgacaagagtgatgagcacagcagtcatgacaaatgagccctgtgcggaggcccgggatccgcgcagatgccggcgcgggggaaatgggccctgaaatcccaccgtcaggccaggcagctctgagcgtgacctggagggctgttcagacggtctgggtagccgtgtcctgcgcatgaacatcctccgtcgggagaggaattccccacggattatcagagctgctccctccaccccccgccacgtcccacgcgggccacatcaactccctctgcagcctctggccagcggctgagccctccgtgtctcccctcgttaatgcctccttcaccatcccctcctgaagtttcccccattgcatacacgcgctgaggcccacccggtatcaaggactcccattgcttgcgaaaaagattccacccctcttagaacagagaccagggccgctgtagcaaatggccataaatgccacagcttaaaacaacagaaacggattatctcgcagctctggaggatggagtccaaaatctgaatcgctgggctgaaatccaggtgtgggcagggccgcgctccctctagaggctcccccggagattcccttccttgcctcttccagctgctggtggctgccagcagtttgggaattgcggccgcatcacaccacctttctgtttgttgttgacatccccgcctcccctgcctgcggggtcttagatgtctctctccttcccactgagtttcactccacatttgaattggattaactcatgccatgttaggcaaacgtgcccctcaaatccttccacttaacagacatttattgaaggttcctgtgtgcggggcccaagagaagggacattaaattaggagatgaaccttgggaggccatggcatgcttcggagcctcggcgtcaaaatgacaacccacaccccacttggcggttcatctggggccctggaatcagcagactgaggctggaacccagcaatggcacatgctggctgtatgttctcgggcctcagtttcaacatcagtgacatggggatagaatctgcccagcggagttaagtcaccgcatcccggagagccgagtgtctcatagaggctcctggtgtggtctccatgctgctgctcagcacggaatgaagaggttcaggaacttgcccacagccacggataatgagggacagagctggaattgagcccgggaacctgcacacacagcccagtgtgaccgtgccttctagagagaggccagccctggcaccaggtgggcatgccagcatcaccttcaaggtgtgctttaaggatccaagataatgtgggtgcttcaacagatgcatggcaataaaaggaaagcaccatgtttcaccttcacacacacacacttacacattcacacactcacatacttacacacattctcatacactcacacatatgcttacacacattcacaggctcacacatgcttacacacacattcacacgcacacacattcacacgcacacatacacttacacacattcacacacatacacttacattcacacacatacacttacattcacactcatacacatacatacattcacacacatattcacacattcacacatacacattcacacacatacacttagacaccacactcacattcacacacattcacatacatttacacacacatccacacacacattcacacacattcacatttacattcacaaacattcacacatacattcacacgcacttacagtcacacatacacttatacacagtcacacagacttgcacatagacttacacacatacacttacacacgcactcacaccttcacacacacaggcaatcacacattcacactcacgtacacttacccacacattcacacatacacacaccacatacacgcatacacttacacatgcactcacacactatcacattcacacacacatacacttacaaactatcattcacacacatacacacatacacatgcattcacacacatgctcacacactcacacatacacttacactcacagtcacatacacccacattcacacacatacactcacattcacacgcacatacactctgacacacatatacatacattcactcacacatacattcacacacacacggatgcattagttttcaagtcaggatcctagcacagcccacaccctgcatttgcttggtgtctcctgaggtctctagttatacttcccatcccttttcttgccatgtatttcctgaacacatgttatctttgatccttaaaccatgacttagagatacagatgtatgacaagctgagagatgatgtgagactgttgttaattttttctccatgtactaattacattgtggttatcttaaccacaaaggaagcgttctactccagagaaccgcgtggaaacagtgcagatggactagcacgatacctgagaggagctttaggataactccggtgctggggaggttggggcccagttcaagcaggaggggaggcgtggggacaggtgttgaagctgtgggtgtgcagcggaggcttcatgacgctttcctcctgctcttgtgtacgtctgagcatttccataacagggaagtgttttgttttgttttttaaataacattttaaatgcctctggcacatgggaatccatggtaatttctgtcgttgttgtatattctttttcaaatgcaaggacctgaaaaatatctcctaaactggaaaaggaaatgaggctgaatacagattttattttagcaaatagagaagcagtgattgtctggcggttaactgtaatccattctgagtgtgactttactgttaagtattctaaaaacaagagaccaaacaaaatgaacaatatgtccaaatgtgtatatatataatttgtaactagaggtaaattgcagatgaattgcagatgtacacagacagatggatggacagatgattgatatagattgattgacagatgattcatagataacttgcaatgtttcttcagtgaacgcatatttatttcttgggtaataagaaaaaacaatagaatgtggaatttggggcttggcctcttttagctcatttaaaaaaatattaaacacttggaattatcgagcgctgaaaaaggcaatagaaaattcaccttttaactccctcaaagatagaaatgtgtgaatctgctagtgggttgcgtttggctggtcctgcaggctgatttggtctgttctctctcccagagagatccccaagcccggctgagatgtgcctgtttgtcttgagggcagacaaagcctagcaaaatcttatggaagctgatataaaagcttaatagcttataaaagctctaaaaatgattcacagtctaggatagagaaaataaaaggaatttgaattggtttattttcctttagaggagcctaaatcaatatttattctgagtatgcaatcagaaatatcagtaatttgagaacaaggcaaacagagctgcacatcccgttatggccacgagcccacctcgccttcgttcagaccacagctgaaggtctgacttaggtgcagcacgcacccctggagctgagggcctggagcagggccaggccgggctcttctctctcttgtctgtcctcgtctgtgggggaatgaagatgacacagcactcaggaggtccttttcaggacccagagtcactgggcttttagggcgtttggctctggttctagcccgagtgtggtctcagtccccattggtggttgtggttgtggcatgggcatcattagtcacacaacataaaaccacagaacgcagaatttgctcaccctggttcacacaggagcaagcttgggcaccagcaccccctgaacgcatgccaaagggcaggtccagctcagtgctggggtgtggaggaacccacctggggcctgcctgcaaagacagatgccctgccgtgtttagaaaaagagaaaactggcctaaaccacagtgaggtcaaatggatcatttaacccgtcgagtttggtttcttgttcatccgacgcggttgatcttattaacgcatatgtgtttgtgttgatgtggcctccagcttctgtcgcactgtggacacagttggatgtggctgctaatcaatgcggggctccgtaggtcagtgagagcaatcagagcctgctgtgcggtggcatccccgagttaagacaggcttttgtcccatactctattgaaacacccagaaatgctgacatgttgaagttaaggccatgtgccttggtgctacttgcttgcgaaacagcctttgaaggaaaaaggaggaggaggatccatgagtttcaagggtcccctcctgtaatcacggctgccactcaacggagtaagtaatgtgtagcgggccctctatctgcatgacgaatcctcctaacattcctgtgggcgaggtaggatttgtctcgctttgcagccgaagaatcagagcctcagaaaagttaagaaatcttccctgggtcaagctggtaggaggagggactggaactgaactcacatctccacctcctctcttcctactcctctgcctttcttgcacctagagcagtgtacaacatcaacaactgaccagggcgatcctagaggtaagagacagccgaatggcacggacccagccaagcccaggcctgcccaggtggaacagagccagctaggagcattcggtagcagaggtcagtccgctgattgactgttctcacttccaggcccacagcctcctccaccctgatggtctatgagtctagtgcggccctttgcacaattttagcaactgaacccttttcctcacagaattgtgataccgtcctaacatatgaagcatatataaacagttgggcaaatcataatagtttccattatttcataaatttgcatttgtggcaccaaggagagaattaatgggaacaagagggttcttgtgtgagttccgcatttggatttgggggttcgaggtggcagctataggctcacattagtgtctgcatcactttgcttcagtttgtcacggtggccccccaaatccagaaccgccctcctcgctgtgtgaggagggtcctgcctgcaccgctttgcagacatgggccagcctggatgcctgggcgacgctgccctgcgactcgctggcctgcaggacatctgcaaaacattcaggtctcacggcagtggccatgaacggcctcacagacactgagtggacctgaccccaaagagaatgcgtcgtccttgaacgtgtcgatatttaggttattacacaatgagtgtgttgctttgcaattagtgtctgaaagagttagagcagatgtacatatagaaacgaagaaacgaaatctgaatccatgctgacagattccccctccccaaaccttgctcaaggtaacacaggcgaccaggagcaagtcccggccggccccctgctagcgtggtctgagtggcccaagcaggacccctgcccaggctcactggactctcctggagcccccagacacgacacccttcctcatcactgaaaatccacttccacagtgtaggagatgcatggatctgagggccagtaggaagtgctggagctttaggctttagacattctttttttttttttttttgagacagggtctccatttgtggcccaggctggggtacagtggcgtgagaaattctttaacactctgccgagtcctggcccttggggagtgaggcctggctatgaggcttcttgtcagaactccgtgtgactctcaggatggaagaacagggtgggggctgctcctcccctccctccctccagcccctggcctttgtaaaacggctccgcctacgcgcctgtagccagtgcagaaccagggaggcctctccccttcccttcccaggaggggccccgccttgtcctccatgccggattctgttcgtcctcccccaggtcctctctgctgcctcccactgccccatttcctccaggaaccttcctctctcctaccaccagcctctctcctacccccagacacacactctttacatgccgatttctgtcctctggttaactggcgtttaattttctcagctgcttggcttaatgccaaagagtgttcttccaaataaaaatggtaaagaccttttttctcccatgagaattttatgtaaacgcagtgcagcatgctcgtaggctggttctgttatcaatttctaagctcagcttccagagctagagaacttttttattggttataaaaaccctacatattcagtgcagaaattctgaaaaatgcagaacagtatcagggagaaaataactcatcccccactacccagagaaaaccgctgttaacaccgaagtgccacagttgctggcgttctcacacaggtgtgcgtttaggagtgtgtaagtgcgtgtaagtgtgtgtctggctttctttcacataattttgtgtcctgatcattttcactcagcattacatcagcagcggtttccaatatagcattaaattgtcttcaaaaacatgattttaatgcctctataaagttccatcatggaggctcactaaaatgtaatcacttcattgtttatgagatactcagcttaattccatttctctgcagtgaataatccagaggaacacgctcagtgtgcatctttgcttgcagcagggcagcgcagggcattggttggggtataaatccgggggtgcagtggagattagattagatcgtccgtggaaagcaccagaatggtgcctggcacttaataaatgctcttattagtatgtttatcttcattatgtccctaagagccattcctggaaatgagactgtgagtcaaagggcacaaataccgccaacctgctttccgacagcgctgtgtggatacacgggcccgaacggcgccagcctcactgcctctgcgttagtgccgccacttcatctcagatactctcctgaagataagaggagagtcccatgcagccataagaaagacaacggagagatctgtgtaccctccacccagtctcccctactgggactgtcgtgcaaaattatggcccagtcttacaaccagggtattgacagcgagacaagcccccatctgatccagattctccagttgtacttgctgatgtcgtttagatatttgtccccgccaaatctcatgttgaattggtatcctcagtgttggagtggggcctggtgggaggtgactggatcgtggggtgggtttctcacaaatggtttagtgccatccccttggtgctatccttgagatagtgaattcttgcaagatctggttgtttatgtgtgaaggtagaaggcatctcctctctctccctcacgggtgtgcacgcctcccttcatcatgtgatatgcctgctcctgtttcaccttccatcctgagtgaaagctccctgaggcctccccagaagcccagtgatgtcggtgccatgcttatacagcctgcagaactgtgagccaattagaaattggctttataaatgacccagtctcagatatttctttatagcaatgcaagaacagcctcatgcacttgtactcacttgagcatgtgcacttacttctgcacgatgttcttgcctgtgtagactcttacatccacaaccacagtcacagtctagaacattccatcgccgcaaggctgcctcttataaccaaccacatcccctacctgcacccatttccaacaccccatgcctaactcgatttccagcaccccgtcctggtgaacatgaatctgttctctatctcttcaattccgtcatttcaagaatattatataaatgggattacacagtatgtaacctcttgagactggctttttccaactggcatcattcccttgagatccatccaagtggttgtgtgcaccttttccttgctgagccgtgttccatgttgtgggccgaccccagtttagcactcgcccattggagggttggagggcatccgactcatctctagtgtggggcagtgcgtcaccttctcacaattgtcaacgggattgtcactagtatttgccttccatgtcttggaggccaatgtggctgctcttagaaatcagtcctccttattttggttggggagatttctgatgtcagtttgacgtttataattaataagcatcatcatcaagttacaagagtaaataaaaatatgaggcagggtgaaatgtaagatgctcgagaggctgagatcagtagctgtgtgaatacagcagggcgggcaccagcagtgagctccacggggcccagcgtccggcctcattaaccagctgcccttggggaggagcagagcccgctcttccctcctggggaagggtagtgtgatggaaagacaggctgcccttctctcctgcaggagctcagcatcatgctgtgtacatgcctgggctctcttcttcagccctagccacttaaaaccacttggagggaaagattgtagaataattataatgaggaaaatttcgctccagattcgttactccaagttcagagaagctctgtaaaaattgttgctaaggcaattgaataaagaatgtcagccgatgtaagcgataacagcaagacaatgaacataattgcatgttttacaacaaccaacctcaaagcatgacttccctgacatagatatgttttttaatgattttgaaaggtaacacagacattttcagggatttggagaggaaactaatgccatcctggtttaccagctttatggggtcatctctccggtgaaaaagactgcagccagccttgcagagagggcgctgtcttagggaggcacctccaactgtccccgcgacccagcccctaagtgcttcacatcaacactgttcttttgtgacggtgctgctgtctttcattcgccagcctgtcatgctcaactcaaacctcagttgccatccagttatcttttttttttttcttgagatggagtcttgctctgttgcccaggctggaatgcagtggcacaatcttggctcaccgcagtctccacatcccgggttcaagtgattctcctgcctcggcctcctgaggagctgggactacaggcacatgcccccacgcccagctaatttttgtatttttagtagagatgggatttcgccacactggccaggctgggctcaaactcctaaccttgggtgatccacccacctcagtctcccaaagagctaggatcacaggcgtgagccactgagcccagcctagttatcttgtttgtccaggaattggagcatttctaggtagcaccacaaatgtctgtgcaagaaacccacaatttccagtggtcattggctttgtgccaatccaaactagagtctgacaaacccagcaagaaatattcgcggcagctgcaaggaagctcctcaaatagaaatagaaaaatgaaccagggtctgctcttcccttccgggtgtggaatcaacggaagccgactcaacacagagccctgggggcgtgaggggtttggcgggatctctgccggctgcagatctctgctctgttattaccagcccttctgcccagctcctaattgctctgaagagggaataattttctcagcagccattgccagccacatttggactgaatagatgctgaaatggcaagggtaaatggggcagagacagtgaaaagccattttctatctggagcccaaataaaatcttcctcccacactcctgcctggctcctccgcagcctcaatgcccttctgagagctgcctgccccagtaggaggccaggctgggaccaaggacacccagttctgggtaaccatcttcccatggctccttggacaaccaccttaaagaagggaaaggcaagaagcagaaggaaagcagaggctggacattggaatcagcctttctttaaactaaaaaaaagttttcacatatgtgaatgcgtgtgtgaatttgaagtcgtatgtggaaggggccatatatccgtcaatgcatgctccaaaaatcagaactgatggacggcaaacagcatcggatgtgcagccagcattcttccggcggccacctcccgggggaaataggtgcagcagacaggaccgtctgtgggacggggacaggcaagcatgacagcaggtaccacagatcagggtgcacagacagggctgggggaggcagcgtggcacggcacccacttcccctcggcgtgtctgggctgaagcccagtggactcccgctgatcagaaggatcctccactagaaggatctcactggacgagtcccctccaaactggaacatgcaggtgccttgggcttcatgctgcacctttcagataaaaacacacaggtgagctgggagagctggagtcccatggaccccagagatccaggtcacgaggaggggatcgcgctgcaccaggacacattcaccaaggtgagccctggttcctccccacaggctgtgggcaaggaagtgtcgatgccaggctggctcagtaggtggaagaaccttccggaatgcctgcccgcaggctgctgctggcatcgagtctgtgtcctattttccattcactgcatgcatcctccaagtatgatttccactcggaaccctgagctgcctcatccctcgctccgtctcccctccctcccgcccagctcacactgaaatcacgcctcgcgttcagcggctggagtcctggtggattgctgcttcggggctctcagaaatccctttacttgagtcttggttttacaggaagaccatgaagcaccccccaggagctggagctcctccttctggacccagtgtctcttctcagcctcacgacgaggagacctgctcatggagctgctgcgccggcctgagctctgatccctcctccgacccagcctcaccctgcaagcagcaccatgtggggctcagaatggggatcttaagggacccttcccacaacctcccgataagcctttccacggagggcccaagcggagacaggagaacactgtatttgataaaatagagtcaaatccaggaaaatgcctctggacccggaaaggaaacgactcaccccccacccatgagagacccttctgtcctgtcccttaacccagaggccctgggcatgggtttcgcagccccctggaggccagaccctcaaactccagccttgtttcttctaagtgtgccagtcaagatgcttctcactgcaagaaacagactctttctcaagccagttcaagaagatctgcgttgctgcagaggccgatgggtgtggggagcaggctcagtgagagactgtcgtaaggaggctgagaggtcttcagaaaaatccccaggacctggggtgccaggagcctgggcgggcctgggctctcgcagcctgcagcccctcccctccctctcacagcctccgctgcccccgggctcagggcccctgcctgtgccttctcctgaggcttctcctttttacctctcagggtcccagtgtggccagcccggcactaaacccatgcgaccctggctcactgacagtcgccaccagctccacatctctcagtaaaagttcccccaaaagagtgtgattgggagctagccagcggggcttaaggcagccccctgctccagtccccttggccatggagacagggcagggttagcaggaggcaaggcatgcgcaggacagctggccggcagaggtcccgtgtgctgtcatgggtgcagggtggacactgtgaccctgggtcccccacttggaaggggtgatctagagggacttttgtcagaaagacccccacccagccaatctgactgatggggccatcaccttgacaacaggcttggtggcaaagcaagagggtacaaccgaccagagccccgggtcccctgtgccctcctgcactgcctgacagggctgggccatggcccgtaccaaccgtgagctgagccaggaatccagtcaaaccgtgtgcctgagtgacacgtagctctcttccttctctggattcactgctgatcaaccccaacaagcagcaggactgtcttgctgtgaacccaccgcttgcggacccctccccaggcctccattcccgcctttctgaaggtcaaggcagcgccctccccaagaaacggtgggaacagaggagccaggtgttcgttcttcccagctccggaaacgctgcagattgcgcactcgagttcctgctgacataacagtggctgccagacaaaatgtggcgaaaagtttttctaggtgcctttgttcactcagagacttcctagagacttgtgtgaaaatcacaggatttgcaaccagtggggacgttgagattcgtggcaactgaaatgatacaaacttgaactttgtgtcaaaccagtagtgttttgtgtaattcttttcaaacctgtcatttcacttactgcttctcacagccccaaggggcaggtggagttgatgccatcaaccctatttacagaatggtaaactgaggctcccactggttatgcgcttgcccacagggttgaaagagaagccatggacaaaaggagtcactggttacccaaagggcttcctgttctcaaatccactgctccttccattacgtggtgtctagaaggaggctcttttggatatagacattaaataatctgggagtcagtgtatgctgtgatcaagcatgtgcggtccgcagccgatggcccaggatgcagtcctgatgtacacttctggctgggtgcgtgggagccacacacatctctgtgtgccttggtttccgtgtgtaaacatcttagactagtgcttgcctgtggttggcacctggtaagtgtcagccttctctaatgtaggcagcttgagggctcccagacagtgatgttcccgctgacattcccaggtctcagctgattatgaagaggcatcaatttccagtgggggagccgccctctgtctcatcatttgtttctctcatcttgctttaatatcacagcactgccagtcaaaccacacaaaagggtttgtgatgacctgccgtgcattctcgtaagctccagccctgactcgcctgcaagccagaagccaacataaaactttcgtttttcccttaatcttgctgcctctgcatctcattttcaaatttcattttatcaactttttttgcactatttgtttctggataaaggatttgcaaaattcttcagcatgtggtcaggaagccctatggcctcctgacgaggcagcctaggggtcctcccgtggtctgaagctgcagccgggctggcctcccacagtcaggagcagcatcaggctgggtgcttctgacaccagcgaagagcgcggctgtccaagcccccatccctagggctcacgcctcatgcccaaactcgcacccactttggcgccgctggagactaatgaacagcaaaagctgaagtcatgactctcatccagatctaaaatgaccgtgtgtcaaacatttttactgaactgatgaatcgaatgggaactggtaagaaggtacgaccagttcaaaagagaaatccaagaaccctaaatgtataaggagtgaagcaatgttgaaatggacttacaaacggatgcagctatattctccagtggagacagccagtgccaacttttgtgcttattccaaatttcctgacagcctccccaccttttttccaacataatctcaaagagagattattctggatggcagaataaggctggtccccctaggtgtggcatccttgcttgcatagaggtggcaagagtgccaccataccaaacaggcctttttcagtttgttttgctggaagacctcagaagatatcagaagcaaaagcctctgttgtttgctatcctaaggttaggaagccaagcataaaaagctctcctccagatttcaccggcagtacttataaatttgatgaacccctctcttctcaaggcccccacgatattccaaaaccctggcctgccagagtagagccttttttcccatcttggaggctgtgaccctgagagcccctaccctcccccaggggactttgtgggcatggacgttgcacagtcaccctcggcccctcaagagcggtcacagcccagcaaatgagcgtcgttctcacgcacgtctctcaggcttaggctcggttgcataaaccttccccaattttatcctggcaaggaggaggacagatccttccggaacctttgcagatattgccaccaaaagtaaagccttcataaaagtttgcatttggggaggaaggagagcagatggtgaaaatcagatatcacttaagaattactcatttcagtttacaaaaaatctaggtcgttaaaggtgactgatagcttaagaagacagggaaagggcttcataacagagccggaaagtccaacagtacaacgacacgcatgatgccaaaaagtaaagcgttcctcactcattccactcagtgctccgtaactgattctccactggctcctgggctgcagcctcatgaagccagctgttcctcaactgaaaagagccctggaagccctgggcagcccactggcagggtctgaatatcatctgagcgaggccatcagaagctgtccccaggagtctgtgcttgggggtcagtcatcggaggtgcttactgcggtccttttccatggggctcgaagcttctgcattgaatcacgagctctggcctccagcctggtgcagaaccttccagggggcattggagtaaaagcttctgtagatgacagctaccccttttttggtccattttatagcagaggaaatttaggttcaaagaagttgagttgagagtcccaggagtaagaagcagtcaaggatccccccaggcctccggggccgcctgggctgcctggcctcacgacctggccccatgctcctgagatggagaagccccaggcccatgagcctgttgcccttggcaaagccacttcccttctgagtaaagtcagacgagcctgcccagtcccaagagactgcgattccgtaatcgccctcccctcgccttttgaggtcttgctggtaggtgcacccccttcaagccagcccaaggagccatgatttgagtcggtcttgccagatgtgtctggagagaatttaactccaagatcatcccccgtgcactctgaggggctgggacaggatgtggtgccctttgtgcccaggaggagaagcacccagtggggcggggtggggcgaggactttataaaggcgtcatttgctgcggccacccaggttggaacacagggaccacagggccccccgccttctgcaggaccaccccgctcatctgagggagacactgtagaaacacatctttgagcagtggcttctaatccaagaaacccaatagaagtcaaacgcagattcctagggcccaacccggacccactgcgtgggaatccctcagccggggccagaagcacgctttgaagacaccaacctcctcagcaagcctcttgcaaaccacatcctgcttctccagaagctgcagatccagaatgttcaaagaaagagccctccttgccttcctcttcttccacccctgccctctgcagactggggttctgtagacccccaaagtaagtccgccacaccggaaggaagtgagttacacaggggcccacatgggaaccgctttttgtcctgtcttggtgggaaaatggccacgaccccagcccaggctctgccacgccacaactccacgggcatagcctgggaggccgcagcgtgaactgtgactagggctgaggatggtgccatggtagaagtgagggcctggcacccggccaagtgcaggactcctcggcagtggggttgggagaagcagcctctgcaggcgaggccaggaaccaggacacaggaggagaagcacatctcagaggagggagctctgggaggagccagcagagtcctgcaaaggaggatgtgggggaaatggggtgaggccaaagtgggggctgctgaaggggctactgcacccgtgcgagcagggccaggaccaagctgcataggcagccagggacacagccgatgccacagacgtcaggaaccacgcaatgacacaggccacctttgaccgaccgttacccctggggcaaataccagtggggataacgggcaaggagaggtgctgtttactgtcttattgttgccagttcagcagcccacaggaaatggtgttagtcacagaaaaaaaaaatctgttttctatatttcactgtttccaagtaaagaaaaaagaaaactaatcttagcttaaaaaaaaaaaaaatggtgcgctgggcaccgaaaaataaccatcttcctaggcctgcgtttcccccacaccggggacttgtgctggaaagaaaagctgcgttggcagccaggagccggggaaactgtccagggaggcatcctctgcgatgaaggcggggcctcggcgtggcccgttccgcgctctgtccagccctggagaagccccaccctcaccgagctcgaaataccccctccctgagagccgagactcatggccgggaccccttggacagaagatgcggatgctaacccggcgcttccaccacagccccggcggcactggggagcgagcgcggccatcccgcgcgtaggtggtgtttctctgcaggcgccagtttcaccgcgggcgcccaggatcctcaacggttctgttgtgatgtgattcccctcttcgacttcgtcattcagcctcagtccctcagtccccaaataccgaaaggcagtcttttttttttttttttgagacggagtttcactcttgttgcccaggctggagtgcaatggtgcgatctcggttcactgcaacctccgtctccctggctcaagcgattctcccggctcagcctcccgagtagctgggattacaggcacctgccaccacgcccggctaattttttgtatttttagtagagacggggtttcaccatgttggccaggatggtctggaactcctgatctcaggtgatccacccgcctctgcctcccaaagtgctgggattacaggcgtgagccaccgcgcccggcctttttttcttttttcttttgaagttaatgaacttgaattttattttatttacagaatagcccccatgagatacttgaagacccggtgccaagcgacagtgttgaccccaggtggtcagtcctgcctggccccttccgagggatgcgccttcaccataaccatgtcacggacaggcgtgtgggcaagggggcatcgctgtatttttcacaactctttccactgaacacgacaatgacatttttcaccacccgtatgcatcaaccaaatgaaaagatgagcctgtgacattcccgtgcgtagagttacagcttttcttttcaaaacgaaccttcagtttggagccgaagcggaagcacgtggcgtctgacgtctccagggagacccgccgccctcgctgccgcctcaccgcgcttctgttttgcaggtaatcttcagcaagtactgcaactccagcgacatcatggacctgttctgcatcgccaccggcctgcctcggtgagtgcgcgctgcgggctctgcccggtgacgccacgcggcctcctcgccttttcgggatggctgggaggggcgggaagaggcgctgaagggcccgaggcaccggccttctacaaggggctcttcgaaatcaatcaatgcgcagaatcccgagggaggctcagccgccctccgggcctctctgcctccacaggtgatggctgtgtccacaaggaggaaaccgtcgggctgaattaaacagaaccgccctcctaagagtgtgggtttttctgccgggcgtggtgtctcacacctgtaatcccaacactttgagaggccgaggtgggcagatcacctgaggtcaggagttcgagaccagcctggccaacatggtgaaatcttgtctctactaaaaatacaaaaattagccgggcgtggtggcgagcacctgtcatcccagctgcttgggaggctgaggcaggagaatggcttgaaccctggaggcagaggttgtagtgagctgagatcatgccattgcactccagcctgggcaacagagcgagactccgcctcaaaataaataaataaataaaaaagagtgtgggttttttcctctcacttcttcattcacttttggagaaagcggggtggttgtgtgtgtttggtccccagccccacatcaccccataggtgccttttctacccagggggcttgacccagatcaacactgggtgaaaggctgacttcagaaatgggttgaaaagaccagtgatctgccttatcgagtcctcagagtcccacaggagttaatgtcctaaatcaacagtgtgttcgagccagtgaattttctaattatcagcaaactttccaaatgtaaagggtgagcaggagtagctttggctcaaggattaactttaaagttaggacggaggtggagaagggcaattgaagtttctcacagacaggtgagaaaagggagatgaaagtacacgtctgaaagtgcagcaaatggcagttttagccgcaaaaatagcccatggtctggggcatctttgggcaccatatatgaagcaatgtgccaataaataaatatatatacacagtattccgtatagcagccctgggatttgagtatcacctctatttcacagattttaacaatttacaactgaagatcagagattaacttggtcgaggtaacacatcttgcaagaggccccaaaacatgtgaggttggaggaagactcatcctaagcatttaaaactattttgtaggagagacttgcgcagttcagacggactcccaaaggcactggaagcggaaagacaaactatgagttcgtcatctgctgatataaatgttagttcctattttaccacagttttttaaaaaaaatctcccaactcaataaagtagacttgctccaattcccattttaaagtatttcagcatctacacgcacttaggattatacgcagctgtttaatttcatttacaatcggagtctcaatgccctggggacggcctcccacccttcccatcccaccacaccttggtcaggctggtcctgggactgtcctggttgtctcagggctctggccccatgtgtacattcaagtgtacatcccagagcacactatgggcgaaaacacgggcttgggtgtgttttccaggaacacgaccatctccctgctgaccaccgacgacgccatggtctccatcgaccccaccatgcccgcgaattcagaacggtaagaggctccggccgcgctcctcggggtgtgcctggcacttctctccatgacatgggaggctttctgtgattttgtaaatgtgctactgcagaaaggtgtgaattgacagcagagatggagagcgagggtaggagccagtgtgaaggaagcttgactcgtcgtgttcccctgcagaggagctgggcacgttccaagataacaattgcagccgtggctctgcacctgcttctcaacgggaggaggcattgtacagaggggaaactgaggcccaggagggtgagccaagagctgcagagccaggccccgggatccccacattaaccccaggaaggacctcgggagattccctacagagcccctggggacatttcgtgtttacccacttagggccggtctctgtgttcataaagtgatgcctgtgggagattctaagcacagaagggccagggacaagggaggcccaggaagtcaagaggagaggccggtgaaagcctccgtgaatgtctgtgaactaggtcaagccagcggtgtatggcccaggaaggacgcggagcaggggccctcaggtcagtgacctgcccctgttcctggtgacctggggagaccccagcagcctccactgctctttgtggttgggcaaagtggaacttagatttcctcatgaggcgagggagcaggtgagctgggggcggggcgtgcgacctcaggacccctctctggcgtcctctgttcctcccagagtggggctcactgtgcctccaagggactcagtagatgcgatggtacacttgtcaatctggtcatcagggtgtcctgcccaactgacccatggccagctctgagcccacaggagaaagtgcatgtcaggcagacccttgtgtcagtgaggtcccagtgggcgtggccagcaccgtccccctcagtgaggccccccagtggacgtggccagtgctgcctccctcagtgaggtctcagtggacatggccagagccgtccccctcagtgagcgctcagtagacatggccagtgccgtcctcagcgaggtccccgtgggtgtggccagcgccatccccctcagcgaggtcctcgtgggtgtggccagcaccatcccactcagcgaggtcccagtggacatggccagcgccgcccccctcagtgaggcttcagtgggcatggccagtgccgtccccctcagcgaggtcccagtggacgtgtccagagctgtcctggtcagccgtcctccctgtcaccttgaggcctcagccgagctcctctcatctggctgtgcccgtcagtctcccctcctgccctagccaggatgcccgtctcctgccccacacagtctggctctgactcttggcttccagactccccggaaggtgcagtgctaattggctccccagagactccagtaagcatcttgtcagcctcagcaccagctccagcctggggggtctcgctcagaagcaaagtcactgagtgacctgtcctcctgacacccacaagactaaaatgatctctcagaggggacctcacagaaaccagcaccttgtccatgccagctgggtatctgagagaaactgctttgttttcctgaagtcatttgaaacagcgtgcagagacatttaaactcggcgggaaataggagaagcccaccttgacccttctaattctctggccccaggtgccttattaacaagagacagtatcagacacaccagacaaaagccctcctgagcccaaagagcccaaatgtctggaagctctctgctgagatgccaaaatgcatgcctttctgataaagagacagagacagatgaggtaccatgatatggacatggcagtggacgtggacaggggagcagtggagatggagaagatggagacacacgcagttgaggatacaggcgaagaagatggagacacacgcggatgaggatacaggcgaagaagatggagacacacgcggatgaggatacaggtgaagaagatggagacacacgcggatgaggatacaggtgaagaaggtggagacagacgcggatgaggatacagatggagaagatggaggtagacgcgggtgaggatacaggtggagaagatggaggtagacgcgggtgaggatacaggtggagaagatggaggtagacgcggatgaggatacaggtggagaagatggaggtagacgcggatgaggacacaggtggagaagatggaggtagacgcggatgaggatacaggtggagaagatggggttagacgcggatgaggacacaggtggagaagaggaagttagacgcggatgaggatatagatagatgcatagggtgtggatctaaccgggtacaggtgatgcggaaacggatctagacagcgatgtggaaatggatctagacagcgatgtggatgtgatctagataatgtggctctggacgtagaaagagcttcagatgctctatctatgatcgtgggtgtggatataggcatagacatggtgaagaggagagaatagactctcctctctcatgacaaactgatcgtggctgggggcggcacgtgctgagatgtggctgtatttgtcccccaggctggtgcctgcgcctcctgcacccccgtctcctttgtgccttcttccattccctctgccactgttaggtccaggcctcactgagctctgacctccctgcctccagcctgcctctcccacacggctgccaggttcaacctggtaagacaccttcttctccatggtggcctcccaatctgggccctgccaacttatgcctcaccaacttctccaacttacccctgtacccacgcccgcaccatgcccagcccacaggatcctgccttcccagctctgcagaaccagcttctgcttatccgctaggtgccagcccagccacctgccttaagcaccatccacagtcacccagcccatcaccatcactagcaaagtcacccagacccatcaccatcaccatccagagtcacccagcccttcactatcaccatccaaagtcaccagccccatcaccatcactatccagagtcaccagccccatcaccatcaccattcaaagtcacccaccccgataccatcaccatccaaagtcacccagacctatcaccatcatcatccagagtcaccagccccttcaccatcaccatccaaagtcaccagcccctttaccatcaccatccagagtcacccagtcccatcgccatcaccatccagattcacccagacccatcaccatctccatctaaagtcacccagacccatcaccatcactatccaaagtcacgcatcctgtcactatcaccatccaaagtcaccaagccccttcaccatcaccatccaaagtcacccagtcctatcaccatcaccatcctaagttaccagcctttcaccatcaccatcaaagtcaccagccccatcatcgtcaccatcctatccaaagtcatccagtaccaccaccatccaaaatcacccagacacatcaccatcaccatccaaagccacctagcccatcaccatcactatccaaagtcatctagcaccatcaccatccaaagtcacccagacacatcaccatcaccatccaaagttaccagccccatcaccatcatcatccagagtcacccagatccatcaccatcaccatccaaagtcactcagcccatcaccatcactatccaaagtcaccagcctcttcaccatcactatcaccaggcccttcaccatcatccgaagtcacccagacccatgaccatcaccatccaaagtcttccagacccatcatcatcaccatttgaggtcacccagacccatcaccatcaccatccaaagtcacccagcccatcaccatcactatccaaagtgaccagcccctttaccatcactatccaaagtcacccagacccatcaccatcaccacccaaagtcacccagccccttcaccatctccatccaaagtcacccaacctgtcaccatcagcacatcactggcttcctcccctcagtgtgcgcctcagtctgaagtgatctcacttacttgtttgaggttctcactgctgctggccccgctggacggtcttctctcataggaaggaaatttcaccttgctctctgctggatttccagcccctaaacgaggcggggcatgctgggtgcaggatggaatgagttggggacggagtgaaccagtccagctcgtgcgtgcctccccctctgcactgcccagagcagttttttcttctggggacgcagggcaacgtctggagacatttctggatgtcaccaggggtaagggcctgctacttgtatctgatgggtggagacccgggatgccaatggcatcctacagcgcacaggacaggcccacaacaatgacacacgtggccggagacatcagcggtgctgaggcggagcacctggtgtctgaggtctcccctgtgctctgtcgctgtcctctcaccctcccccaatcttccaacctagtagttctcagacaactgcgtcagaatccgcagggggcttggtggagcacagagctcccctcagtctctggtttgtgacggaggtgggccccgagaatctttctgcagcagaaagccaggctttctgcaggttcccagtgaggaggacgaggctggcccgggacacgccactgatgctcttctgacccaggggcttttctctcccgcttccgtccctcttccctcgccggcaggtgacgttactggccttttcttttttggccctgcctcccccttggcttctcccctcttcctctcctccactcggtgcctggtgacatgcggccatcctcagagatgtgcttcggggcccgcacgccttgctcctcgcactcttcctgcaccggagccgcggtgcgaggcctcgggaatgctcaccgtttctctcccgccccccggccgcatgctgcagccattccctcaccacatgtccaggagggagccggcatcctttgctgactttcttgctgtgactatggtgctgcgtggaaaaggggccgtgggaaggctgggcaggtggctgctcagagccccacctgacacggtgacccacggggcctggaaattcactgccccgatttccacacaggtgcctgagctcctgcagagaatgcctgagagcgagacgcatgcccgtcaatttgtgctttcaggcgtcctaagcacacacgcctgctcttatttgaaccactccctgtaagctagttccactaaagagtggctttccaccctggctgcagattgcaaccacccaggaatctttttttttttttttttgagacggagtctggctctgtcgcccaggctggagtgcagtggcgcgatctcggctcactgcaagctctgccttccgggttcacgccattctcctgcctcagcctcccgagtagctgggactacaggcgcccgccaccacgcccagctaattttttgtgtttttagtagagacgggatgttagccaggatgatcacgatctcctgacctcgtgatccacctgcctcggccccccagagtgctgcgattacaggcgtgagccaccgcgtcctactttttttttttttttttttttgagacagagtttcactcttattgcccaggctgcagtgcaatggtgtgatctcagctcactgcaacctctgcctcccaggttccagggattctcctgcctcagcctcccaagtagctgggatcacaggcatgcacgaccacacctggctaattttgtatttttagtaaagatggggtttctccatgttggtcaggctggtctcaaactcctgacctcaggtgatccgcccacctcagcctcccaaagtgctgagattacaggcgtgagccaccatgcccagcccacccaggaatcttttaaaaggtaccagttgatgcccagacccctcaattaagtccagatttttaagagattttttttttttaaagctctgcaagtgattccagcacacagtctggggactaaccgctgatataaggtctggaaaatctaagaaaccactctaccccaccctctggtgaccagaagcttatgtctaccagacccagggccttcccttgctgaaacatgctgggtaaactctttgtttcttcctagcagacagcagccctctccctctagctcagaagctacgtcagcagttggttggttggttggttggtgggttggttgggttgtgtctctctttaacttcctccacttctgaagtcacctgcagtgacttggtgtggacttggtcacctcactgtccccccagcctcaggcccaggaaccatgtctttggaggaggctctcctgctggcagctggttgcatctggcatgcttggattcctgcaggtggctggttgcacctagcttgcttggattcttcccagattcacagccatagggtgggcgtttcatgaaatctccaaattccaagggctcttgacagaccacctccatcctgatcagaaggggtgatgccggttgcacggtctcttagagcttaaaactctagcttcttctctgctcctcattccaaactaaacaaattgttgcattggattattctttcaaaatactccttgccttaatgccatcctttagattttggtggctggctcctgttgtggaccgcatctcacaggtggacttcctggtttctgcctcctgttacccctcacagttatctctcccttgagtcctgctaccttccagaaaaataggctccaaacacactttcatcccatcactcccagcatggagttctccagtggcctgttggctacaggacactctccagccccccgcattgggatgtctggccccaatccaccataatgtacttgtctccaatctgctgagctgcatgaatgcccaccccagcccagcgggcactccccttctgcaaacctccaagcacattccccctctgcacactgccaatcttcctgtccccgccccaaatccaaaggcccctcctatggctggggatccactggcagctgcctaacccttcctatgctcctggacgtttggtgcaatctggagcacgctcaagccggcatttgaaataacctggaacacgtttacatcatggaaaatatggaaaataggctgattggcttccactcccttttagagctggcaagaaaaataattgatgactaaacaacctaacgaccaacaaatataaaaagtcatagcccaaccatgatcaaataaggctccagcattcctccttggagggactctgagccatctggtgtcattttcctttccaatccgggaacattctggagatcctgacatccagctaacatgggcgttgcttcctgacaaccctaccccttccattccccagtcactactgcttcaagatgcagtggaaggagataaatcagacacctcagtagcgtgagtgaaagtggggtgtgtggtgagacacatacagaggggagagggccagaggacggcgccgtgcgacacacaccattgctccttttgttcccggtttcggccaagttgtgccgcaggtgactctccaccggctgagctctgtgcatgcagggccagtattctcggccattctggcttagagaaaagctttctatattccagaatggctccaggcctcctcctcctcctattaaatgtgttttaaaagaggtcttagagcccaggcagttagatcttagaaaaagacaaatacagtagaagctggaggcaagcttatcctttccaaagagggagtgcttcctgtgttaatttgttattgagcatgatgaagattcagctccattgagactgagccaagagttgactcattcatgggagcaacataacgggttgtgagaagccaaaggattaagcatctgggagccaagactgatcttgagtggcccagaaatgcaacccaaggatcttgggcccaagggccaggaaggtttctgcagcctcctggagcattcacagaggctccctgtccgtccacttttccctctgttgctgatgtgatggctcctgccctcagcttaccagactcctcggagaggctggcctctgaattggttgaatgggcttgaagggggctggactccatttgggtggatgagcaggcccagtgcccctgtatgaggggaagttgtcttggtaagcctgtttttgtgtcaggtccccaggacaccttcctctgagtctcttgcgtgggagaagttgctggacacgcctctctggctctgtccccgccggcactgtgtgggatccatgctgttctccctccagcccttgccccacctcctggagcccttctctgcgcctggtcactacccgccccccacctccagcattaattttctagggacaaggggcaggggaaggaggagaagaaagagtccttgctgctcctcagagaagacacaggagaagaaagtcggagaggagtggggagccagggtggcaaagccccttcctgctgcccacgcaggtcctggctttctctccacccactgcaccatttccagggctgctctcatggtgggagccggagagacactgagaagaggaaggaaggaggatccaagaggagcccagcacacccggcttctctgctgcccaccctccactctgtcctcccagcccaggcccttcctaggcaaccctggcacgggtcctcactggccacactgaggccatcagcaaagcacctggcctcttcacgccttgggctctgggtctgtaaggcagtgaggctgaggttcctgggacagctgggcactgtggacttgcccagctgagcacaggcatcaggggctagaggggccctagtcccgatgacgaccgagtgccctctccacctggggagcttggaggactttgctctgcacttagggccacgcttcaagcccagtgcctcttatgaccaagtctctggggagaaatgagccctccagtgccaaatgacccaccactaaaaggccttttgaggcagggcctctcctgagcccacgcaggcacgtggtgggagatgagagggtgtgggctcacttcttgacattctgtgtgagtgaggtcattcatagggtgaggggagaatcaaggggacagagggccctctagtccccagcacttgggctcagctggcaagtccacagtgcccggctctcccgagaacctcagcctcaccgccctacagacaaagggcccaaagtgcagggaggtcagtgccacacaggttttattttttcacattattggtgtttaaaattgtaaagattttccacgttacctgtaaccatcaaaccacatgtattgcccccagttaatcaccatgaacagcttggtgtgtatacccctccatattcactgtgtttcttcttccaggaatgagctcattctctatacatcactccgtaacttgttgtttttacctagtaaggagtcatgggcgtcccaccaggtgaatacttgcatgtttgtcttcatcttcttaacaactacctgacactgcagtgtctcagtctgtctgaacttaaacagctagacattgagttctcagagtctggaggctgaaatccaagatgagggtgtgggcaggttctgttcctggggaggcctctcttcctggcttgcatacagctgccttctggctgtgccctcatgaggcagagcaagagacagctctggtgtctttggcccttgtaaggacaccaaccccatcccatgggccccaccctcaggaactcctccaaacccaatcacctcccaaggccctacctcctaatcttacccactggggatgagggcttcattatatgaatttggggtgggggtgcctcaacattcagaccccagcaccatgggaccactaatgtggcatcctgcctgtggagagatgcacagactgacccatccagacagcacagtggagcacgctctttcaacccacctgcacctgaccacagtgggcactcaggaagaaatgggtagagcgagtgaatgaatgaatgagcaagtcaaagacatgaacacatgacatctgactgtctccctgtgtgcttgtgtttcattctgatacatccctccctaaattcatctgctgagacaaaggattttaactggtgtttctacactgctttccccaagatgtggcaacccacaccccaccagcaacacctgtgatgtctgccgccctgtgtccttgtagcacctctcttaccaggtttccaaatgttgctaaactgctgggtcaaggaatagcatctgcctggggttagcctcacttgtgtggattttttcttactcctcttggccactgactgctcctggtctatgcctgttccattggctgcactgtccttccctgcctcttggccagaggctgtcgtgtgtcagcgacagaaacgttttggctgtcgtctgcacagccagtattctctccccatcacgctgggcctcgtgatgatggggggaggggggttgacatcacagagatcccagtgcattttcgacttcatcactgtcaccatcctctcttgttcatttgggggatacagccgccatcagctcaacagagcaaaagagagggaggccacctgcatccgccaggtgctgaaatgggtccaggcagctgccagagtctgacatttccaacttgatacagcacctgtgatcggcagtagtacccatgacaacatttatttaattgaccaaacacgaacattatagaggaaggtgatcatttaaatgatatacttgaaattcatctgagtaaggaagctgagaacagtcaaagaagctaatttaaaaaataaaaataaataaaaagaaccacctaatccgctgatttctaatcatgccgagtgcttatctctcctgccaggcatacagcgagcgccttgcagagtctcacagcggcactgtcttctcttttgcagcactccgtacaaagtgagacctgtggccatcaagcaactctccggtaaggccctgctgtcgttttttaaactaaaagaaggaaaaagaaatcttgagcttgcccctgtgataaaatatatactagttaagcatttgaatctaagcatttgaaatatatatgagttacctttgaagcatttaactatatgttagttaagcatttgaatctgcatttgaagccgatacaactgcagaatctgaaaccttgtactactgtaagggctctgcctttctaaccccagggagaatagcatctgcctggggttagcctcccttgtgtggattttttcttactccttttggccactgcctgttcctggtctatggccgttccattggctgcactgtctgtccctgcccctcggccagaggccatcccaaggactttgcagttgcagggcggcatccactctggtcttcctggcccagcacctgtcctccccgctccactgtgagttgccaaggcaggcatttgtggcccctgggatgccttggggtgcctcatacagttacttgggccgctgtgttacaatcctttttctttttctttttttttttttaaaaaaaaacggagtctggtcctgtcacccagggctggaatgcagtggcacgatctcggctcactgcaacctctgcctcccaagttcaagtgattctcctgcctcaccctcccaggtagctgggattacaggcgtgcaccaccaagcctgggtaattttttttgtatttttggtagagacgggattttgccatgttagccaggctggtctcgaactcctgacctcaggtgatccacctgtcttagcctcccaaagtgctaggattacaggcgtgagccacagcacccagcctagaatgccttttccatttgatttttatcacttttatttatgtgtgatttatacatcataaaatgccatttaagtgcctattttgatgacttttgaaaaatgtgtacacccttgtaaccatcaccaaaatcaagacatttgcaccacctagaaaagctctctcttgccccctccagtgtgtctcagtccacaacggacctgctttctgacatcatccatgagatttctttttgagagtttcatatataagaaattacatggtatatgtactctttttgactcaacataatgtttttgagatccatccatgtgctgtgtgtagagacagttcatgctttgtattgctaagtggtatcccatggtgtaggttgtaccacagggcgtcttccattcactgtggatggacatttgggttgttaccagtctgggggcttttaagaataaggctgctgtgagcattaaagtacaagtattggtggaaacgtatatttttatatatttcatttcacttggctaaatacctatgatacctataaccttgccaacttttttatacagttaaacatatacttaaccgtcttccctaagagtggatataagagtctgtagagtgttccccagtctgggtttgtctgacgtttctctcacgaccagcctgggtgtggtgggttttggaaggaatacgtggggcgcatgacagccaggtaggaccacgagcttctccactgcagagttactgttgatctccttccctgctcttctttgaaagcaagtcacgaagtccagcccacccaaacacaggagagaaaaaccgaggttcgttttctctacacagatattcatttctccagcaccatttgttgaaaagatgatcttttctcccactgaattaccatgacacctttgtggaaaatcgatgggccatgtatgtgtgagtctttttctggactccagatcctgtcgtgtgaatttacatgtcttaaaacaacagcacaccatcttgactaccgtagataaatagtaggtcttgaaatcaggtactctaagttatctctggtttcttttttctttttcaaaaatgttattgcttttattttcaaataaattttagaatcagtctatgaattgcttccaaaaaaacagtctgctaggattttgactgaagttgcattaaatatacagaccaatgtgggaagaattaatatcttaagaatgttgagtcttctggttcataaatatggtctatctccccattcatttgggtttcctttaatgtttctcaataatgtgttaccattgttaatatgaagtacttaataaatactgataaatacatcactatttcatgtatttaatggtactgcaaatggacttttttttcatttcaatttccggtagtttttagtttataggaattggcttctgtatgggaccttgctaaactcatttattaggtctagtacctttttgcagatttcctgtgattctatagatgattttcttatagtgctggtcttctgacaacaaattccttctgcttttgtctgaaaaagcttttctttgctgttttgcttttttttttttcaaagagagagagagataaagtctttgtctgttgcccaggctggagtgcagtgatgcggtcatagctcacgacagccttgacctcctaggctgaagcaatcctccctcctcagcctcccaagtagctgggactataggcacacaccaccatgcccggcgaattttttaagtttttatagggacaaggtcttacagtattgcccaggctggtctcaaactcctaaactcaagtaatcctccctccctgagattacagacgtgagccaccatgcccgactgacagtgtttttatttcatcttcattttgaaagggtattttcttgccatagagaattttagtttcacagttttccagcactgtgaatatgtcttctcattgtgttttagctagtacagcttctaatgagaagtctgtgatgtcttatctttgttcctctgtgtgcaatgtgtctttttccctctggcaacttaagatgttttctttatcactggtttgcaggaatttgattatgatggccttggtgtggttttcttttggtttaacctgcttggtgttcattgatcttcttggaactttgggatcatatttttcatgaaatttggaattttttctgctctcctctgtctctctcctttcccctgggaccctaactacctgaatgatagacagcctgagagcgtcccctgactcactcacactgtttctttctttccagacctttttttctgtttgctttatttttcttagacttttccgtgacgtcttccattgcactggtcttccctcctgcagtatctagtctgctgttaatctcgttcagtgaaattttcatttcagatattgcattcttcatccctaggaattatgtttccctcctttttcgtatctcccatttttacatctcccatttatgcctcattatgtttatatttcctgtaaatgcttatacctcattataattctgtttcatgccattgtctgctggtttcctcctctctgccatatccgagtctgtctctgttgattgatttatctcctgggtatgggtcatatttttctgattctcgtgaatctagtagatcttgatggaatgctgatcacaggaatgcacgctggttcatcatctggttttgtttctcccagttaagagtgttgggctttgccttggcaagcagttaagttacttgcacatcagtttgatgcctttgagccccacctttaagctttgtgagaatggctctagagggcccttaccccagggatagctcagtcctactaagacttgatccctttggggtctcccccaaactcctggctgatcaccaaattccactctggctgtttagagtgcaaatgtttggagatgagaatgaaagcgccagggccttgaaggtcgttgcaaggatgctggcttttatgctgagtggcgtgggcagctattagaaggctttcaggagaggagtgacatcatcacatttgtgttttaaatcttgctcagggcgctgggtcgagatcacgaaagggaagtggcagcaaaggtggaggcagagaaatccaagaggaagctatttttttgggaggaggcggaggcctaggccggggtgggggccatggaggtgatgaggagcgcaggttccagcaggttctaaaggaagagacaagctttttcctaagtggaagcgggatatagagacccatccggggcttctttgacctgagcactgagcgccacggcccagggagggggttgctgcgggtgggcttggtctgctcatcagacatcaggtgcatgaggagcaggcagagtcagggcaggcggcctctcggctgtcggctcccaatggatggtgttgaagtctgggacttggtgaggccagcagggagtgagtgagcaccagcaggaggggccaggcctgagccggacggagaccgaacccatccgtgggagaaggacgctggtgacaggacaccatcgggagcagaggggaagccataaagccctggaggcaggaagaggcaaaggctggccgggtgtgggtgaggtgctgcagggctctcgcaggccagcgaagacaggcgagatggctgtgctcagagttagaagagcatcgctgggagcagaggaaagagggatttctgtgtcacctggggacccatccaggaccagtgggagatggagttgggctcattgagggaaagaggtgaatggaaggaagttggaaccagctgtcctaaggccggagctgctcctccctggaggactccggcaaaggctgctggccttgggctgtgcgggcacccagtggctgagagatcgttgccctctgcagccctcctgcaacttggatcctaggagccacaaagaggcttgaaaaataatccatcctgagaaacacaaaggctcacattaaacttcgcatcgtaaagttttgagtaaaagaacaataaggggcatttctgctaaaggtgccaggatgagaaaaagcaggaaacagtgctgcaccgccaggctctgcaccgtctctacagagggctggggttggttcaggagcattcggcccaggctgtgatctcgagaaggtggtcagggcccaggctcccgccagccctcacggcagcacgaggctggtacgagacaggtgcttcaggtgtttgttgagagctgcacacacttctgctgggctgggcaagacttccctcttcagagaggatgagcggccacacggaaggccaggctgggtgtccctccgggccagccgaggagcgctgcgcttattccgcagtgaggagtcgctggctgtccaggggagctgcattttcctagcagcgacaacccctcccacatctccatagtcacatcctggctgggctaacaccacctttccccgcctctgggtgcgtggggaccccgctctccaaataggccagtgttccaggcttttctttaggagacaaagtcggtgtcaggtagaccccccccaccccaccaaacacacacacacacacacacacacacacacacacacagctttcctgagaaatgtgtttacagaacattttttccatttggggtttgtccttaggaattcttcactctctctatggcaacaaccttccctctcccgtccatcggccttgggtcccagagccactgagccgtggcccaaggtcaggagttagctctagcgacgccgccctgagttctggcctgtaagcaaccccaggtgcccttgtgaatcaacagaccacatttccagtggcagaaaaggaaatgggagctgtttctagactagcacaaggctcagggggtggggggtgggggcagggtgcagggaggccaacgccacacagccccacacccagcctttcccaaggccctgggttcctcactgattctcagcaggtttcagtaaatgcctctaacgggcccggtggaactgtgcaatgcagaaacaccccagggttttgctgttttgctacttaaatattcaggaaatagtaaagagaagagtattatcaaaaacgtgacttttcatagaaaagggagaataggccagccctggcctgggtccacaaccccagtgtgagctgcagagacttctctggagcggtgaacagctcctgccaggaaagagcatggcacagcctcgttctccagcgtagagtagaaggaatggccccgtccacgcgaaggtctgtgttcaccaagcatcttctgtagaaaaatgctctcttcgcctgatcatgggagggaatcaaatggatagagcatttatcccttttgtgactaaaataaaggtaatagcaactacaaaaaccacgacacaggcttctcagcatctttttataacgatagtgctgattttttggaaaatccttgagcctcaatcacttttatttgatgtaagccgctcaaactcaaagagtgttgttttccagattataaaacacagatctcagctgatggcggttgacgggtgtcccccgagtgccctcggctgccaggagctggcaggggagatgcctgtgatgaggattgggtgctgtgatcacagcacgcgggaaaaggacagggcctccctcagcgtggcagatcgcgtgggtccatgggtccgtgtgatctcatgaccgtatcaaggggattgtgtctttttgaccagagcgttagggaaagcgtgctgcagtcacacgccaggacggccccccacggcccaagtcctataggagagccaggggccatcacgattttcttaggcacagcagcagttgaaccgtgctgtcacacttaacccaagtgatgacagcctcttcaactaggacagtgctgtaggggtctggttctgcttgttctcccccacattcctgcctgccctaggacccaggacctgtctctagtcacacacaccctgttcagcctctgcatctggcccccgcggagacccacaccacattctactcccctggccagagaccgagggtgactcggaggcttccagttcccagcagctttattggcgttgctgtttccatagaaggacaataaaagggggccataaggaggcgcatccgcagagtgcgtgcttgagcttctgcaagccagaggaggccggcggccggcagggtgggcaggctggctggctgtgccccacaacatgcatgtggagaggttttgggggcagccatggaaccccggagctgcccccacatgagagttcccccaggtggtgaccaaatgcatttacagtccagccgcagtccagatgcagatgcgctgtaactgtagaacacacagcaaattctgaaggcttagtatgaaaaagaatataaaaatctcagtcatttttatattgatttcatgtttcctggttgagatgtcattgatataacataaagcccaccattttaaagtgtacaacctcagccaggcatggtggctcacgcctgtaatcccagcactctgggaggctgaggcgggcagatcacctgaggtcaggagtttgagaccagactggccaacatggtgaaaccctgtctctactaaaaatacaaaaattagccgggtgtggtggtgcacatctgtaatcctagctacttggaaggctgaggcaggagaatcgcttgaacctgggggtagaggttgcagcaagccgagatcacaccactgcactctagcctgggtgacacagtgagactctatctcaaaaaaaaaaaaattgtacaacctcagtcttttttagtgtcttcattttgttgtgcaaccatcaccactatttaattccagaacatttccatcaacccaaaaagaatccctgtacctgtgagcagtcccccctccatccccttcaccccccagcccctggcaggccctgttctctgtcctgtgcattctgacctttcacataacagaatccgtggcctttccagcctggcttcttccactttgcacacggtgttgcaggctccccgcgttgtggcatatgacagctctttgttcctttatggctggatgacgttccgttgcgtggctgcgtcctgtggctgcattgtgtggctgtgtcacgtggctacgtcacgtttggttgatccgttcatcagctgatggacatttgggctgtttccacaaaggctcttgtgaatgatgctgctgcaaacgtttgtgtgcaaatttttgtatgaaagatacatggtgaaatgaggtattttgaggtacattggattaaatgagatattaaaaatttttttaaagtctagccgtcttgaaggggagggcctgagagaagtgctgaaagttcacagcagaggataccggatgctgcgggtgtgccaggctggcctgtccaggaggtccctgcagcctgggtgggaggtcccttacccactaatgggtgcctcctccaacccctgagtccccctacctgaggacttcctctgtgtgtggcatacgcggctgccccgaggtcagtcctccccagtgaaagggagctgaaggacaggtgcccagcttctttgctccacagtgggaccaatctctgacatcatcaatgcagttgctcaaagggagctcagagcgaggagtcacctgtacatcaactcaccctctgggagctctcttcccttccatgcctcaatcccccactccctcccagggcttcctgggctggcctccaaatgcaccactagcccccagctccttgtctccggtgggcttttgaggatttccaactaagaaccttagactccaagacaggtcaagccccctggcatactcatttgtcatttggatgaaatagccttaggagagctacttaaccccactgaacttccatttccctgacaaaataggaattctaatgcataccttgcatggttcttggaggataaatgaagtaatttatgcaaaatgctgagcacagtgcctgccacttggtaagcgcccagtaaatggttgttatcattgaaaatgacttagggggcatttttgaatggctaaagttatgtctctctggaattgctgaattttaatagaacaggaatgcttcctaaggtctaaaacaaaaggcggaggactggctgtgtctgccctggaagccaagttaatgctggatgtctgcgcatagacatgttgctcatgagaaataataatgctccttaataatattgtctatttcagtgcaatttcagtctagaaggctttataagcaaagccacagtcatccttacttgcatttttttgaaacaaaaagactgcagtgtataaatgaaaaataaccatttctggaatggtgtgttcagacggattccccttagagtagcctagccaacaaagacagcagcagcccttagcgtgccactgtcagagatattgatggcaaacagtaatacggaagcctgcggaatggaagtgtcctgacggcagatttgagtaaaatggagatgatgacagctgaacattgctgcacggacctcaagactgcaaacgttaggactgccctccctgctcctaggcatttgtgagaaccaggccaacccatacccacccactgctgtgtcctgcctgactgcactgaaatgcacagatcctgtgggtgcagtttgatgagttttgttttgttttttgttgtttttgtttttgaggagtttcgctcttgttgccgaggctggagtgcagtggcgcgatctcggctcactgcaacttctgcctcctgggttcaagcaattatcctgcctcagcctcccgtgtagctgagattacaggcgcatgccaccatgcccagctaattttttgtatttttagtagagacaaggtttcaccatgttggccaggctgatctcgaactcctgacctcaggtgatccacctgcctcagcctcccaaagtgctgggattacaggcatgagccactgtgcccagccacagtttgatgagttttgatagaagtgcatgtgttagatctttcaggaatcaccacccaaaccagaaataccatttgacccagcaatgacgtttatatatatacccaaaggaatataaatcattctattataaagatatatctacatgtatgttcattgtagcactattcacaatagcaaagagatagtatcaatccaaatgcccatcaatgatagattggataaagaaaatgtggtacatatacaccatggaatactatgcagccataaaaaggaacaagatcatgtcctttgcagtgacatagacagagctggaagccattatcctcagcaaattaatgcaggaacagaaaaccaaacaccacatgttctcacttataagtgggagctggacaatgagaacacatggacacagggaggggaataacacacactggggcctgttgggagggttgggggagggagagcatcaggataaatagctaatgcatgctgggcttaatacctaggtgatgggttgacaggtgcagcaaaccaccatgacacacgtttacctgtgtaacatccctgcatgtcctgcacatgtatcccagaacttaaaattaaattaaattttttaaaagtgcacgtgcatgtaaccgccaccacaatcaagacagaggacatttccatcaccctagaaaaatgtccccgtacccccttcaaggcagtcctcactgtggagtgctctgcctatttttgagtttcacggagttgaaatcatacagcacgagctctttgtgtctggactctttcactcaacatcatttttgtttgtttgtttgtgtgtgtgtgcgtttgttttttgagacagggtctcacgcctgttgcccaggctggggtgtgaggcacaatcatggctcactgcagcctcgacctcctgggctcaggtgatcctcccacctcagcctccgagtagagacatgttgcccacgctggtgtcgaactcctgggctaaagcaatccgcatcatgatgtttgtaagatccattcgtgcagttatttccttttgcactgctgagcactgcatgcctcgctcattcattcttctgtggagggacatttgggtcatttccagtttagggttcggctactagaattattgtacaagtcttattgtgggcatccttgtccatgatcttgggtccacctaggagttaaatggctggctcatatgctgtgtttgtttaacttaagacttacttgttaagtgtaagaaactgccaagctgggccgggcacagtggctcacgcctgtaatcccagcactttgggaggccgaggcgggcggatcacttgaggtcaggagttcgagaccagcctggccaacatggcaaaaccccatctctacaaaaagtgcaaaaaattagcagggtgtggtggtgtgtgcctgtagtcccagctactcaggaggctgaggcaggagaatctcttgaacctgggaggaggaggttgcagtgagcagaggttgcgccactgcactccagtctgggcgacagagcgagactccatctcaaaaaaaaaaaaaaaagaaagaaaaaaagaaactgccaagctgttctaccaagaggttgtaccattccacattcccaccagcagcatctgagtgatccagctgttccacatccctgcaacactaagcattctctgcttacattttagacattcgagtaggtgtaagagcaatcctatcttcttatagttttaatttgcatttccaagtaacttaatgatgttgaacatgttgctatgtcttattgactatttgaatgtcatattttgtgtagtgtctgttcaacaatactttgctcaggccaggtccggtggctcacgcctgtaatcctagctctttggaaggccaaggtgggtggattacctgcggtcaagagttcgagaccagcctgaccaacatggtgaaacctcctctctactaaaaatacaaaaattagctgggtgtggtggcaggtgcctgtaatcccaggtactcgagaggctgaggcaggagaatcgcttgaacccaggaggtggatgttgcagtaagctgagatcgcgccttgcactccagcctgggtgacagagcaaaagctgcatctcaaaaaaaatatgtaaaaaggattttgctcattttttaagctggcttgtattatttttgtcactggtttgtaggaaactctacataagctaggatataattcatttgtcagatatatgtggcaaacatttttcccaatttgtgatttgcctttttcgttttcttaatgaggtcatttgatgagcagaggtttttaatttggtgaattccatccaatgtaacaagtttttctgttgtggtcagtacttcttgtgtcttctctaataagttttgtttttttttttttttgagacaaggtttcttgttgcccaggctggggtgcagctgtgcgataagctcactgcaacctccgcctcccgggttcaagtgattctcctgcctcaggctcccgagtaactaggattacaggcgtttgccaccacgcctggctaatttttttgtatttttagtagagatggggtttcaccatgttggccaggctggtcttgaactcctgacctcatgatccacccacctcggcctcccaaagtgctgagccaccgcaccaggccccccaaattgctaggattacaggagtgagccaccatgcctggccctaataattttttttatcccaaggtcatggagatacattttagaagatttagagttatagctgttatgttttttcttaatttaaagaaaatttttaacaacccaatctgttgagatgttatgttttaatctgtcattcatttcaagttaatgttgtgtgtgttgtgaagtagagactgccattcattttcttccccacgctgacacccagctgttactgcaccacttgttaaaaagactccttttcccgctgaatccatggctcctttgttgaaagttaatggtatctctgtgtttgggcctctcgctgaactctgttctgcttcattgatctatttgtctatcctcacaccaacaccacactggctacgttactgtgccctggaatcaggtactctaagttctccatgtgttcttcctctgcatttgttttgactgtataggttcttttcttttccctacaaattttaggatcaacttgtcaatttcaaaaaaaaaagccatctatgactttgattactattttatttactatataatttggggagggtagtgtcttaaccatactgagtcttccaacccatgaacatgatacatccctccacttatttaggtctcatttaacttctcaaaaggttatggctttcaagataaaggtccttcatgtcttcggttaactttactccaaagtgttttctgttttctggttttattgtgaataagatttcattaattttccaattgtttgctgctagtttataaaaatataatagatttttggatgttggcgttggatcctgtgaatttgcttaattcattggttagttctagttgttgttttataggttcctataattgtccacagagacaatcatgacatctaagaataatgacagttttaattattgcattccaatttttggcttttatttcttttacttgtcttgttgtactagttgaaactgcaatacagttaaataaaagtgagagcagacgtcctcgccttgttcccaatcttagaggagatgccttcggtctctcaccattacatacgatgttagccacagatttttttgtggatgcctttcataaggttggaagtccccgtctaatgttagttttctgagagttttttgtctcatgttctttgacaaaattctttgttaacttttatcaaatgttctctctacagctactgaggtgggttgaggaggtgtcctctttttccttgttttctaatggttttgtcccataaagaggtattggattttgttccagtacctttctgcatctatgggatgagcatacatatggtttttctgctttattctattaagataatgaataatactgattgattttcaaatgttaaaaccactttgctttcctagggtaaatgcacttatatttccaggaaatgttcctaggaaatttcctggggtaaactcacttgtatttccaggaaatatttccaggaaaatacttgggaataaatgtaacaaagtatatgtaggccctctccctggtgtgtttgctttttatgtattgacttgtttttgtttttgtttttgttttgagacagtgtcgctctgtcacccaggctggagtgcagtgctgccatctcggctcactgcaacctccgcctccaggcttcaagtgattctcctgcctcagcctcccgggtagctgggattacaggtgtgcaccaccacaccagataatttttgtatttttagtagagacagggtttcaccatgttggtcagggtggtctcgaactcctgacctcaggtgatccacccgcctcagcctcccaaagtgctgggattacaggcgtgagccacagcacctggccgcttttcatgtattgctagatttgatttcctaacaattcgttaagaatgtggctgtctatgcttaaatgggatattgatttgtaattttttttcttgcagtgtctttgtcatgttttgatattggccctatagtggcctcataaaacacattgggaagtttactttcttctgtattttctgaaagattttatgtaattttggtattattttgtcctatgtccctttacacttaatgtatttgggttttttgtgtgtgtctttttaatagttaataacaatgtattttattcttgaaaatcactgagagtacattttgcattctcaccacaaaaaaaaactatgtggcataatgtgtatgttaattcacttgatttagccattctacaatgtatatatttcaaaacatcatcttgaccatgggaaatgtatctaatttttgtcaatttgttaaaactttttttttaattccaatttttttttttttgaggtggagtctcgctttgttgcccaggctggagtgcatgaccatgggaaatgtatctaatttttgtcaatttgttaaaactttttttttcattccaattttttttttttttttttttgagatggagtctcactttgtcgcccaggctggagtgcagtggtgcaatcttggctcactgcaagctccacctcccgggttcacgccattctcctgcctcagcctcccaagtagctgggactacaggcgcccaccaccgtgcctggctaacgtttgtatttttagtagagatggggtttcactgcattagccaggatggtctcgctctcctgacctcatgatccacctgccttgacctcccaaagtgctgggattacaggtgtgagccaccacgcccagccccaacttttattttacgtacagatctaaacgtatcacatgcaggtttgttatgtggtgtgtcgcacccagatggtgagcagagcccccaagtctttgttgatatggttggggttagctctcccagtctttgttcatatggttggggttggctctaccagtctttgttcatatggttggggttagctctaccagtctttattgatatggttgaggttagctctaccagtctttgtcgatatggttggggttagctctaccagtctttgttgatatggttggggttagctctaccagtctttgttgatatggttggggttagctctaccagtctttgttgattagctctcccagtctttgttgatatggttggggttagctctaccagtctttgttcatatggttggggttagctctaccagtctttgttgatatggttgaggttagctctaccagtctttgttgatatggttggggttagctctcccagtctttgttgatatggttggggttagctctaccagtctttgttcatatggttggggttagctctaccagtctttgttgatatggttgaggttagctctaccagtctttgttgatatggttggggttagctctacctgtctttgttcatatggttggggttagctctaccagcctttgttcatatggttggggttagctctaccacgttgctatttgctgtttcttgatcttgggttttgtttttctgttcctccttttctgccttctcctgtgttaattgaataaatttttgttttccattttattccttctgctgactctttagctgtctctttttgcattatttttcctcggctgttgtaagtgttacaatatgcatctttacttttttttttttttttttttacaattgatagactttgttttttagattcacggcaaaattgagtgaaaagtgtggagctcccacatgttccccccacacacagacattcagcctctgccaccgtcaacgtcctgcatcagattgtatattggttacagccgggcgcactggctcacgcctgtaatcacagcactttgagaggccaaggcaggcagatcactggaggtcaggagttcaagaccagactggccaacatggtgaaaccctgtctctactaaaaatataaaaattagccaggcgtcatggcgcacacctgtaatgccaactacttggcaggggaatcgcttgaatccggaaggcggaggttgcagtgagctgagattgcatcactgcactccagcctgggcgacagagagagactctgtctccagacaaaagaaaaaaaaaagactgtacattggttacaatcagtgaaccaacattgacatatccttatcagccaaagtctatattccacctcagaattcactctcagggctgtacattccctgggtttggacaaatatatgatgacctgtgtgtcccatcccagtctcagacagaatcggttctctcagggctgtacattccctgggtttggacaaatatatgatgacctgtgtgtcccatcccagtctcagacagaatcggttcactgccttcaaaaccccctgtgcgccacctattcatccctcccgccccaagccccagatctttttactgtctccatagtttggccttttccagaatgtcacatagttggagtcatacagaataaagcctcttcaggttttctttcacttactaatatgtctttaagattcttttatgccttttcccggcatcttagcattgaagcatattccatggtctgtatgtatcacagtttatttgcccactcacctattgaagagcatcttggttgcttccaggtttgggcagttatgaataaagctgccataaatatttgtgcacaagtttttgtgtgcacataagattttaacacatttggataaataccaagaagcacaattgctggatcttttggtaacagcatgtttagttttgtaagaagctgccaaacggtcttccaaagtgactgggccattttgcattcccagcagcaatgaacgagcattcctgccgctccacatcctccccagcttttgtgtttcagtgtcttggattttcaccactctgataggtgtattgcagtatcttcttcttgttttattttgcaattccctagtgacatatcatgataagcatcttctcatatgcctgcttgccatctgcatgtcttctttgaggtgtctgttcatatcttttggccacttttaatcatcctgaacttttcacaatctatttagaattaatactgtaccgcctcacataaaaaataaggacactgcagctatataagtctacttactcccctctcccaccacctttgagttattgtgtcatatgttttatatctgcatacattttaagccccataatacaatattataatttcctttttttttttttttttttttgagacggagtctcactctcttgcccaggctggagtgcagtagtgagatctcagctcactgcaacctccacctcctaggttcaagcgattctcctgcctcagcctcccgagtagctgggattacagatgtgtgccgccacgcccggctaattttttgtatttttagtagagacggggtttcatcatcttggtcagactggtctcgaactcctgacctcaagtgatccacccgcctcagcctcccaaagtgctgggattataggcgtgattataggccactgtgcctggcctataatttcttatttaaacagctagttgttttctgaagaaattatgaaaataaacttccagatagttttttaatagttgcctatatatttgccatttctgatgtttttatttcttctcaacttccaacttatattatatcccttcactctaaagcatttcttttttcttttaatgtttcttgcagtgcatatctgctagtaactaattctctcagcttttgctgattggaacatgccttttttttttttttttttttttgaaatgatgtcttgctctgtcgcccaggttggagtgtacaatcagttcactgcaacctccgcctcctaggttcaagcaattctcctgcctcagcctcccaagtacctgggattacaggcgcccaccaccatgcccacccaggcactccacccaggaggtggaggttgcagtgaactgagatctcactactgcactccagcctgggcaagagagtgagactccatctcaaaaaaaaaaaaatttttttgtatttttagtagagacgaggtttcaccatgttggccaggttggtctcgaactcctgacctcaggtgatccacccacctcggcctcccaaagtgctgggattacaggcgtgaaccaccgtgcccaggcaaggaacatgcctttattttgccttcattgtgaaggatgagttttcatggtgtggaattctgcattcacagtttgttttcttcaagaagcttaaagatgttgactcactttctttctggcctccattgtttctgatgagaagtcagcttaatttgatcattattcctctgtatgaagtgtgtctttcttctctggctgctttctttggggtttgtttgtttgtttgtttgttttgttttgtttttgagatgaagtttttgctctgttgcccaggctagagtgcagtggtgcgatctcggctcactgcaacctccgcctcctgattctcctgcctcagcctccaagtagctgggattgcaggtgcccgccaccacgcccaactaatttttagtagagacaggatttcaccatgttggccaggctggtctcgaactcttgacctcaggtgatccacccacctcgggctcccaaagtgctaggattacaggcgtgagccactgtgcccaggcctctggctgttttcaagctgttgatttctttcctttatctttaggtttcagcagttggactatgatgtgcttcagtctcattttcttcttatttatccttcttcatgttcattgagcttccatggactatgaatttaccttttcagcaaatttgcaaaattgtcagccattacgtgttatatgtgccattctttctcactaatgacctgtatgttagaaagtttgctgttgtctttcaagtgactgcagctttgcggttttttataatcttttttttctttgcccttcaaattgggtaatttctgttgacctgtccttgatttccctgactcttccactgactccagacttctgtaagttgatccatgaagtttttttttgtttaggatattatattttaaaattctaaaatttgcacttgactcttgttcatagatttgtctctcgagactcccctctgtttacgatttactgacgccgcttttgtttcggtgtttgcacgtacctgcaattgctgcattaaagtctcgtttgctcattttggcatctgagccggcaagcgtccagggtgtctgagggatgattttctcttggccatgggtcacattttcctatttctttgcatgtctattttttattgtagactaagattatgaataacacctaggagagacattggattttgttatcatcctctgaagagtgttaattttgctccagcagtcagttccgttactcactgatcatctgaacttcgtgcagcctggttttatgctttgttggggtagatctctagactgacccttctgtggttttagtaggaagcctgaggtatttatcaagcctctctaactcgactacatttaaactccaaactttgtctcctccacagcaggagctgaaacctctgccacactaggcccacaaacatgcgtcattcagggatccaccaaggaacagggtagtttatacagaatttgggtcccactgccatggcttcctcctttgggaactctcctttccatttccatcctctctgacaacctaaaactgtgtcatctgacgcttcaacctggaactttctgcttaagttttagccatctacattataagggcactttatagcaagaaatagaatattattccattctaggccaagtacagtggctcacacctgacatctcagcactttgggaggccgaggtgggtggatcaactgaggtcaggagtttgaaaccagcctggccaacatggtgaaatcctgtctcttctaaaaaaaattttgaaaaaattagccgggtgtggtggtgcatacctgtaatcccagctactcaggagctgaggcaggagaatcccttgaacctgggagccagaggttgcagtgagccgagatggcgccactgccctccagcctgggtgacagagtgagagtctgtctcaaaaaaaaaaaaaaaaaaaaaagaaatattccttcgttcttttataggagcatagtacttcattttgtagatgtactattgtgtatcctactgatagatacttgtgttgcttccagtcttgtttttacagcgatcagatggttcttcttaatttctcttgctacaaatgttgctgctgtgtacaacctgttaaagtccacagatggaataaaagctttggtttgcaaaaatgactcaatctttacaaacattctgtcatttgtaccataatcaattagtttattggatcaccgaattgcctgacagaatccttcctggaactagtctatggggtcatttggcatagagtcaaagcctcagacacgatgagccagagttgatttcctttggcttcacataattaaactttcccagaggattatcaggttacagtgacacacacacaggctgtcagataatggacaaagtcccagcagcgtgtacaaccagctggtggctcccaaattcaaattcccccagcggcatccgttcggttattcgtacccacaccctcccttagaagtttacccctccgccaggcgcagtgactcacgcctgtaatcccagcactttgggaggccaaggcgggcggatcacctgaggttgggagttcgagaccagcctgaccaacatggagaaaccccgtctctactaaaaatacaaaaattagccgggcatggtcacgcatgcctgtaatcccagctactcgggaggctgaggcaggagaatcgcttgaacctgggaggcggaggttgcggtgagccgagatcatgccattgcactccagcctgggcaacaagagcaaaactccatctcaataaataaataaataagttcaccccactacgggcaagaagccacacagaaagaaaaataaaataggtatctctggggttttctgaagggaaagtaagtgcagctctgtcccgtctttgcagctctaaataggaacatggtggagtagggcaggtcgggcttgacgatgtcatgacttggcctctctcagtgtcacgcagcccctgcaggttataaggaggattgagctggccaggcacagtggctcatacctgtaatcccagcactttgggaggccgaggtgggcggatcacctgaggtcgggagttcgagaccagcctggccaacgtggagaaaccccatgtctactaaaaatacaaaattagcccggcgtggtggtgcatgtctgttaacccagctgctcgggaggctgaggcaggagaattgcttgaacccgggaggcggaggttgcagtgagctgagatttcgccattgcattccagcctgggtaacaagagcgaaactccgtctcaaaaaaaaaaagaaggatagagctaacatgcatgaaccacctagaacagcacccagagcatagtaacagctccttgcagatgttacagtaccttgatctatacaacagtaaagggaaatgcatgctagctgccccagatgctgccagcttcacaggcatttttctgcctgcaaactaatcctaaggaagagaggagggcagggggagaaattgcacccagtcaaatgtaaacgatacaaaatgtgaaattcccctctctgaaaatgaaagggaaaaaactcgattcaatgcctgcccctgaggtgaacctgaaatgacaaggcagacactctctagaacttcacgtttggccaccagggtcttcggttgattttcctttcttcgtcatatctgagtggctgaaacgccagtgatctgggatagtcctttggctgctgatagacttatgcaatcccttggcaggcaggacaggccagaggaagggctcctgtgcctttaaggtcactgttaatcatgtaactttattgtgttcctgggctataaaggaaatgtcgtccttgatctgaatgtctgttttatgatgtccataaacagtgaattgccagtgactgtaccctgagtgagaacatcctcagccagttgaatagttcaagggcagttgcaggggtcaggagagagcaaaagtgggacagaagatgagtttgcttcccaggaagagagacagtgccaccccacccctcgctgacagggaagccttccagcccttcctccaaagagccttggctctcaggggttggaggttggacaagagcagaaataaaggcaccctgctcccaccccccacaatcttccggacgtctagagtgcttatctctttgggggcaagtaatgtgaattattttccctaatgcaaaaataaaaaataagagaccccttttacccttttctgaaaggatagcagaggtatttttcttttcttttttttttttgagatggaatcttgctctgtcaccaggctggagtgcagtggcacaatctcagctcactgcaacctccgactccctggttcaagtgattctcctgcctcagcctcccgagtagctgggattacaggcacgtaccaccatgcccagctaatttttttgtatttttagtagagacggagtttcaccatgttggccaggatggtcttgaacttctgacctcatgatccgcccacctcagcctccagaagtgctgagattacaggcgtgagccaccatgcccgtccagcagaggtattttttctaatacttgagaagtgtctgctaagtatgtattcaccggagggtgctcagcacctcgccctgttgctctgggttgggactaacaaggtgaaacatggctcattgcatcatattaatagcatgcaaatctaagcccagtgatgccgtgcaatggctacgatcaagggcaatagaatggatcgtgcatgagctcccaggccacacacacacgcccttgtgatgtattattccctctactcttgcaggtcggtgcttgggatgctagtgcccaagctgatgttcctaggtcacctccctcaatgcatgggtctaggggccagcatgttctattgctagggccatgtgtgcattcgtttgcctaggggagaaaagtacacattcccatcagctcaggtgcgtggaggacggaagaactgctgttgctgctagtattctcttcagcacaagataaaaaggagataggcaaatcagctggctggccaatcaaattaacttattgttacactaatttttagaatcagaattatgggtcaggctgtgctagcaatcagtgaaatcaaatttcatgtcattctgcactgggtagactcaggatttgcctgaaacaagtaaacaattcctggaagaagtgggcgaggcagaggcttgaactatccactcagaccaaggaggagtcaggcaatggcttctgggcatcgtgtggggtgggggcagcccctgccctggacacccgtgaacacggaggcagccgtgtgaacaccatgaggcagggtgtccatcctgccacccacacagctgcgtcctgcccaggaatgaggctggcagcccataggcccctccttggtccctctagaggtttgcttcattccagtacccttggttctgtcaagtgggcagggcctgggcccctctgctgcaaacccatggcccaaagcggacctgatccggcagcatctaaaaacaggacccggagaatctgctggactccaggattgccctggaacaaacctaaagtctcctatgacatgcaaacaattctgccagccccggccagcattccctgcatgtgcttatcaagtgaggaggccagcaggacttagcacccaggtgagcacacttcattgagtccaggtgtgtgcagatgagaagcagccaggagttgaggctgaagaggagcctacctaaacctgtcattacaactgattgatccttggtgtagtcaaatcttctgcctttatgaaagtcatggtatctagaggtaaatccccatcagcttggagcagcaccatgaaatccactctagcatgcagactcgggggcacttttagatattctattggttgttcttgggggacagcttcctttggagaacatgtgagttgtctgtgaatatcagcttgctctccctaggtttccatcacatggatcagcgagagttaatgctgactccccctccctcgggggcttatttgcaatctcccgatttgctcaaaaacttccaggtccagagggaccctaaagaccctgtcatgtccccctgtgaattaccagcatcccaggccattgctgggttttcttaaaactattaagacactatcaacgtgaaatgacttgaataggctttaatttttaaaattcattatacgtcctgcagcatttaggaaaaagagggaggtgtcacacataatatcaaatttggctgacacaaggtgattttgccacgaaggttgggaaggatgaacatttgcaattgaaaactgtttgttgcccccagaatccagcggtttcaggctctctgaggattccagaggtgctagagggggtaaggccacattcaggtggtgcaggtgggattcaccccttcacagcctggaggtggtgcccggagcgcaccctgtcaccccaaggatgatgacaccccagggaaggtggtggaagcaggaaggggaggtcagaggaaaactggggccctcagtgggcatccgtgatgcggaaacactaataatgccaacagcaatagcagaggcaggcagggcttacgtggccagggctgggctggtgctgtcctgagcacttgacatgcatgaaatcacagttgttttaagttctgaactcccctgggaggaaactgtggccacagcaggaattccaatgattctagggtcaggagaggaggcacccacttcctgatcagggctctgtttgtggatgcgtgggtgtggttggcctttgtgcacactggtggttttgcttctttcccccagcaaaagaatgcagattttgcattatctaaagaggcggttccgtgagcccactgtgctgagtcacatatattccatcggtgtaagtaccaccacctgggcagtgcccctggagtgttctcactgggagcgcagctttgtgtctgtacccttcctgagaatagctgacatgctggcctgggtggcgcattggccgaggtgtggctatgacagaccaggataccagcatctgccccagcactgaactgagcacaccacagaaggtgtggacagagtggcatgaaacatgacagctgcttgtgctcgaaattagatgtagccacacaaatcctgtcgtgctcaaagggttccatctccaaagtccaaaggaaaactcttccttaactgttattccattctgtctatacatttcttattttgaagcaaggataggttcacacgctgctgtaatgatgcatgcagagaaagcccactcatggcccggtttctcccagtggtgacatcttgcaaaactctagcacaatgtcacagcctggcattgaccgtgacacggtccagatccggaacatggcgtcccccacaaggatcccacctgccgctctttaatagccacgctgcttcccttccattccccactggatccctgtcccctggcaaccaagaggtctctctcttttttgtttttgtttttgttttttttttgagacagagtttcgctcttgttgcccaggctggagtgcaatggcacaatctcggctcaccccacaacctccgcctccagggttcaagcgattctcctgcctcagtctcctgagtaggtgtgattacaggcatgcaccatcatgcctggctaattttgtattttcagtacagacggggtttctccatgttggtcaggctggtctcgaactcctgacctctggtgatccacccacctcagcctcccatagtgctgggattacaggcatgatccaccatgcccggcctctggtctctatttgtatgatgttgtcaattctgtaacgttctacacatgtaatcatgcagtaggtgactttgggattggcgccttccacccagcacaaccccctggcatccatccgggttgtcgcctatatccgtggttcattcccttctttctgagtcatactccgcggtatggatggaccacggttggttcaaccattctcccttgaaaggcatctgcatcgtttgcatttgggactactacaaatacatccgccaggaacatgtggacaggcctttgtgtgaacatcagttctccgcgtacatcatctctctgccctggtgcttgcatctttagttggttttttctgtcttttgaagaacctaccagactgttttcagaatgactgtaccatttttcattcccaccagccacgagtgagtgagccgtgtttccacgggggttggcattattttgtatcccagccattttgataggtgtgcagtggtgtctcactgtggttgtaactggcatttcctaatggccgagtggctctcagcatctcttcatgggcttctttccatctgtgactttctccagtacccatctgctcatctcttgcccgctttcaagttggctggttttgttttctaccattgagttttgaccattctttatacatgctatctgcaagtctttgtcagatacgtgtcttgcaaatattttctgccacaccgtagcttgtcttgtcatcctcttaccaggatctttctctgagcgaaaattttcattttgatgaagtccagtctatccatttttctttttctggtttgtgtttttgctgtcaagtctaagaactccccaccttaccgaagaccctgaagatttctcctatcttctctctgtgttttatagtttcatgttttacatctgtggtccactttgcattgatttttatataaactgaattctaggtcaaggctctttttcttgttggcctgcggatatctaatttttccaacactactgaaacactatttccaacactattactgaatgccaccacgcctggccatatatatatatatatatatatatatatatatttttttttttttttttgtagagatggagatctctctttgttccccggctggtctcaaactcctgggctcaagcaatcctccaacctcgacctcccaaagtgctgggattacaggcatgcgccactgtgtgtggctggtattttatttataatttcagtgtctacatggtcattgctaagctttcttttctctgttgaattgcttttacatctgggtcaaaaatcagttgggcgtatttgtatggacatggtcataggccctctgtttctttccattgctctacctgtctgtctttctgccagtacctcacagtcttgattaccgaaattatgtcataagtctcaaaaataagataggctgattcctctcattttgtctgttgtttttcaaaattgtttttattcttgtgaatcctttccctatctaaatgttagaataatctctatttctacaaaaaaaaaaaaaaaaaaaaaaagtcttgctaggctttcaatgggaattgtgtaaaacttgtttacctatgtggggagaatttactatgttgagtcttccaacccattaacatggtcagtcttgccatttgtttatatcttctttgatttctttcatgaatgttttgtagttttcaacatacaacttctgcatatgttttgtcagtttgacacctaggggcatttttgagtgactgtaaatggtactggtgtttgtttgtttgtttttgagacagggtctttgtccctgaggctggagtgcagtggcatgatcgtggctcactacagcctcaacctcccaagctcaagcaatcctcccacctcagcctcctgagtagctggaaccacaggcacatgccaccacgcctggctattttttttttttttttttttttttgtagagatggagatctctctttgttccccaggctggtctcaaactcctgggctcaagcaaccctccaacctcgacctcccaaagtgctgggattacaggcatgtgccactatgtgtggctggtattttatttataatttcagtgtctacatgatcattgctagtatatacaattgtagtaaatacaattgaattttgtatgctttccaccctgcaaacttgctaaactcgcttcttagttctaggagggttgtgtttttttgttgttgttgtttgtagattcattggggttttctatgtagacaacatgtcattggcaaacaaggacagttttctttcttcctttctaatctgtttgccttttatttccttctcttgcctattgcactggctaggactcccagcactatgttaattagcagcagtgagagcagacagctttgccttgtgacagtcttagacaccaagcactgagtttttcaccattaagtacagttggctcttctgtatctgtgtgttccatatccatatatccaaccaaccgctgatcagaaatgttttaaaaacaagaaaaacaatacaaattagtaaacagtacagtatagcaactctttacataacatttacattgtattaggtattctaagtaatctagagatgatgtagcgtgtacgggaggatgtgcataggttatatgcaaatactataccatcttatataaggaatttgagcatccttggattttggcatccttgtggggagtcctggaaccaatccctcagagacaccaaggaacaactgtataatattggctgtaaggttatggttgatgcttttaatcaacttgaagaagttctcctccattcctaattttatgagagttttctcatgaacatgtgttgaattttgtcagatgttttttatgaattagttaatatgatcatgtaatttttcttctttagcctgttgattggagactacattgattggttcccaaatattgagccaaccttatatccccagaataaaccccactaaatcttgatatgcaattatttttatctattactgaattctacttgctatttcattagtgatttttgtatctatattcatgagggatgttggcatgtagttttctttttgttgtttttccttgtctgcatttggtatcagggtaataccaacttcataaaatgaatggggcccaggtgcagtggctcacacctgtaatcccagcactttgggaggccaaggcaggcagatcacttgaggccaggagttcaagaccagcctggctaacatgctaaaaccccggctctactaaaaatacaaaaaattagcctggcttagtggcgggcacctataatcccagctactcaggaggctgaggcagagaatcacttgagcccaggaggcggaggctgcagagagctgggatcataccactgcactccagcttgggggacagagtgagactcagtctcaaaaaaaaaaaaaaaaaagaatggtagtgttccctcctcttctgttttcttgaagatattgttagaatcatgttgactttttaaacatttggtagaattctctataaatgtttagaaccatcttggcctggacatttcgttttggggagtttttaaattacaaattgacttttgctataggttgtttaaattacctgtttgatattgaatgagttgtagtacctcatgcttctctaggagttggtccattttattgaagatgtcagagttatgtgtgtagaggcatttgtagtgttcccgtattatccttttgatgtctgcagggtctgtagtgatgttccctctttcattcctgatattgacagtctgtgtcttccctctaattgtttctttgtcagtcttgctagaagtttgacaatttcttattttcaaatacctagctctgttttgttgattttctgcattgtttttctgttttctgttaccgggatttctattcccctatctttgtgatttccctccttccttcctttgctatcattgtgggtttactttgctcttcttttcctgggtgctcatggtgggatcttggcttattgagttgagatttttcctctcttcaaatgaaagcccatagtgctataaatttccctctcagcattgctttagtcatgtcccacagctaagttttgtgttgtattttcatttttattgagttcaatgtctttttaattttcccttgagacttcctctttgacccttaagttatttagaagtgtgttgttaagtttccacgtgtttggagatttgtctgctatctttctgttattgatttctactttgatcctcgtgtggtcagaggacatgctctgtatagcctcagttcctttagattgggtgagatttcctgtatagcccaggatatggtcaatcttggtacatgctctgtaggtgcctgaaatgaacatagcactctgctgctgttgggtgaagtggtctgtaaatattcatcatttgatggacttctaaatttatctcaagactctgagatcatttactctcaaaggttatgtgatacgctaccttttccagacaattcctaagtgatctaaacccctgctgagttcaccaagtggcctgtaaaaccctatgatgattcttgttgatgggagccatcttcccccactagtaggtgtgggcctttcttaaggtgagggccttgagctcgcaccagttcaacctatggctgtatgaaaattttctggctgacatttttacgcttgtaccttcaagaaatataacaaaacatcatttttcttcttcttatcaagtcatagaatgctaaaggcagcgggaatctagggtgatctggtctaccctctcgtttgacaggtgaagcaatgaggtgttgcgaagttaaactgattagttttttttaattttttaaatgaaattaatatacgttaattatagaaaatgcataagaaaaaggggaaatgcataagatagagggaagcaaacatttttaaataaaatttatataaaacttataaccaaagatgactactatttttattttggagtatactctcccaatatgttttcaaaagcaggatcactctctatgactgctttaaaatcttttttttgtactttaacaacagacatgaacatttttcaaaatattatttctaatagcaaaatatcattccagatatatgtctgatgatacagttttctcatcatttatttaatgagtctccattgggtgggcgtgcaggttgtgacagttttctctgtgttaaataacactgtgatgaatatcttttgtgtacatgcatgatgatttcctagaaatgggaccctgggtcagtgcttgtgaacatttttagcttctgagccccattgccaagttggattcttgaaattttttgtttgtttgggcagctttggttttgtttttttgttttcttttgagatggagtttcgctcttgttccccaggctggagtgcaatggcacgatctcagctcaccgcaacctctgcctcccaggttcaagtgattctcctgcctcagcctcccgagtacctgggattacaggcatgcaccaccatgcctggctaattttgtattttttagtagagacggggtttctccatgttggtcaggctggtctcgaactcccgacctcaggtgatctgcctgcctcggcctcccaaagtgctgggattacaggcgtgagccactgcgcccagcgcagctttggttttatttgttttgtttatagtggagggttagacatgaaatcaacatagaagatgacgtaaacttatgactaagcctggtgtgggctctcggtgttctggggcatgagctagaggatggctggagccaggtagagaccgctcccttccttagaatgtcaccttgctgacaaggacagcgctgtgagcatccacaccttcctgtgaggtatctggcattgagcctggtcaggaaacaggaagacaagcaggttccattgagcctgggacctggaccttgtaaagccagccacccagcccagttttacaggccaggcaacaaagggagcaaccggctggacccaggcctgcctcccccgtgcagacccgccgtgagaacaccgtgttctgaattgagacgtgccttgcactcactttgtcccagtaattgcccccataaaatagacctggacactaagaggaaacttcccatatttggaaacccagtcctgcctgctttttatagctggtgtcgaggacaagagaaccacaagccgtggccagtctgctgagagaccactgagggacagacgggttgtgggcctggagcagccccggagggaaggagcatttgaaagtggacaggtagagcccaggcccagagagccccagggctgctaccaggaaggccagcgcatccctccaggtaacgggcagctcctcggccacagcctccaccccccaacacgtgggattcgggctgcaatggcctacacatcttttcctcttgtccgtgttccatctgtctttcttctttggtttgtagagagagaagaattaatccagagcgtgctggcgcaggttgcagagcagttctcaaggtacagagtcttctaaacttacaaccagccagagatgggcacatctttctctaagagcgagggcaggccccaggctctgaggctggccttggccggcaagcgtggctgtctcacctgcctggaggagctgcccgcacggtggaagccttctgtggcttctgtaactaagccagcttggatggggcccaggaaacgctcaccttagaccaaagaccatgttgagtgggtgcattagaatgtgagctcgtgaggtcgagaatgttctccaccggctcttctgggatgggagaacaagctataagaattggctccactggaaaataagcttcctcgctgagcttctgtgtagttaggagacttccttttcatcggagtcatcccaacaatcctgacctggataccgtattttccatttctcaaactgacttctctgtggcgtcttactgcccaggttaattaaaatagtgaaaagcacagacgggtgggattttttaaaaacctttgaattggccgggtgcggtggctcacgcctgtaatcccagcactttgggaggcggaggcgggcagatcacctgaggtcgggagttcaagaccagcctgaccaacatggagaaaccccgtctctacgaaaaatacaaaattagccgggcgtggtggcacatgcctgtaatcccagctacccgggaggctgaggcaggagaatcacttgaacccgggaggtggaggttgccgtgagccgagatcacgccactgcactccagcctgggcaagagtgacactctgtctcaaaaaacaaaacaaaacaaaaaaacctttgaattgtttaactgactgggttggagcctccagagagcacaacaggtcctccgaaggtgtctgtgcccatcaggggaaggtgcggggactggaccatctcaactgcatgagcagagagagggccatgtgtccaccccagagagcttgggtccactgctcaggcccgaagaagtaaatatgcccaaccagcccagaaaatacacctcatgatactttggtgattctttcctccccatgggacatgatgatttctgaaaagcaagtcctagcatgttggcacctcagaccctcaccagcccacctagaggccttgcccatgcccacagcagggactcagtaggtgtttgcttaaccggttttggctctgagaattttaagggtcatatttactctctcttttctttttcattcctagagcattcaaaatcaatgaactgaaagctgaagttgcaaatcacttggctgtcctagagaaacgcgtggaatgtgagtgacgtttctgtttcctttttgcttctctgtcctttaacctctattcaaattaaccacttggaacggggaggagttcagtgccgaaggtaaatacaaataaatgtcttttctttgtgaaatacttgaaaattacctttgatgttaacaaaggctagcacagtgactaactaagcattttatttctattttaaaagaagcacagctcatggtataaagcattctttcagccccaaagaataaaaatgaacacacgaagccttccgcacttagcccctctgagaacctctgctgagtgtcttgtctgtgtctttttgtgtgtaaatgaagacattctctgcacactgatcggcaccctgtgggtcataattttttggaatatgtctactaagttgttatctcttggtttctgatacagtctggatgtcccctccacatctcacgttgaaatgtcattcgcaatgttggaggtggggctggtgggaggtgtttgggtcaccaggcagatgcctcctaaatggcttggtgctctccttgagatagtgagttctcgcaagatctggttgtttaaaagcacgtggcatctctctaccctcctgcttctccgttgccttccaccatgattggaggcttctcgaggcctccccaagagccaagcagatgccggcaccaggcttcctgtaaagcccacagaactgggagccaatcaaacctcttttgcttataaattgcccagcctcaggtatctctttatagcaacagaagaacagcctactacagcctccaatcaccaccaaaggaaaagcagaaaaaggactagggagccaaggagtgtcgattcaagtcctgattcaatgatcacaaagctcaaattctgggaagaaaacagcttcaagtcacccaccctttttgtcctcatccataatatcaagatcaatgcttgaattccataggcctcacaattctgtgttccactcacagcttgacaagtgaactctttgtcaatgacaaggcaaaggttaatgattaacaggcactgtatttaccaacttaggaactaaataaacagaatccagacaggataccattaagagttgcagcatcaccaaaaatatctggctgattgactgaatgtcgtcgcttttctttttctttttttgagagacagagtcttgctctgttgtccaggctggagtgcaatagcacaatcttggctcaatgcaaccttcgcctcctgggttcaagtgattctcctgaaacatgatttacatagtcagatttatacttttcaaagtgtgttgacatttctaaaaatgtatgtggtcactggatcttcaagacagtttcattttccccattgtcaacgaggaagccacagagaggttaggtaacctcaagttcactcagcaaattagaaaaataaataaagctgggactggcacccagggtcctggccgggctgctgtcacggcctgctacctgcccttctggaacgagtcacttccctgcacacctggctgaagaggaccaggcactccatgaggattccttgataacgcaggttagaaagctaaagctgcaagcaacagaaactgatcgtggctgctttcaacagaaaaggagtttttccctaaaggattttgggaagcttccccagatccccaggaaggcttgggaacagggctcagaggttgtgcagcagcaacaattccccaaatcccgtgcagagctgatgctgtgcggatgcctgtgctgccgtctctgagccccagatgcggcaccagctcccctgtactcctcactctggacctaggtcccccggaggctccacaaccacttatgcagatatcaggctgcttctccatgtcactggctacaggttcaaaatctagacagagccaggccgcgcacccaaggtctagctgcaaggcaggccccacgaagggaggctgtgagtatcctgaagctgcctcacaaagcaccacagactgggaggcttaagcatcaaaaactgactctttcacagctctgcaggccagaagtcagaaatcaaggcatgagcatgactggctatttctggaggctctgaggggccctggttccatgcctgtctcctagaaccttgtggttcccagcaatccttaccgttcctgagcttggaaggctacattgctataatctctgcctgtgtctacacgtgatgacattctcccaggatgtctccatgtcaacagtctctctcagctaggtcttataaagatgcctctctttgaatttagggcccaacctaaatccaggatgggcccatctccagatccctaatggattatatctgccaaggacctttttctacataaggtcccattcacaagttccagggagtaggttgtgaacagatctttctggaggacacaattcaacccaccacagcgagtgtttgcatttccatattctgcactgggaggctggctcagctctccaccaagccccatgtcgcagggaattctccaaacttgggtaggggtttgagccaaagcatgcaaaaaaggcttgctgcagagtccccacccctctttacggacacaaaaagccacgcagtcactacggggcgagtgtgcagatgcccgcgggcagcaggtgcctcccacctctcctcctctctccagcacctgggtttttcctcagccttccccatctcctacgccccacctggaagccagtgccagctccccccatgctcttcccggaaagtgcaaacaggcaagttgaagaggccatgtcgtaactctcaaaactcttacagagaattatgtcgcccacaacaagatgaatagtaaccctgtgtgtctttgaataactgaccctggaaaataaccatcaagccagaagaaaagtgttcctattttacctgcaagtggcaggtgagtcgaagaccactgaaggaaatggcccataggaccttcccccctagcctgttctggctgcggaattctccaaaatttctcacttctcagagggaagcatcttcccataaaaccctcagtaaatgcacatagatggcctggaaaaggacaccgctcttgacccaccgagctcaggctcactgcactgaccaaaattcctggcgcttctatgggtaaaaccggttgtgactagttgtactgatttctagcaccagagacctaggactgcagaaatgggattgagggagctcacctctctaaggagtagagaaggaggaacagtctaggagttgtggagggtaagggaggggcttgggtgaggtcaggggggactctcctcagtcctcctggctgccctcctcccctggcatgcaactcacacccccaccccaggaggcagccatgtccagacaggctgtcctcctcctgaactccacctggctttgggctcatcctccccgggcacttctggctgatggctccccactctccagcggatgtgctttagcgggaggtggccaggatgctgcacctgtgctgagccccagagattctgagttccagagacactacaagggcagcagagccttaacccaaagatgcaagagcccagacattttaggaagcttggagggcagaaacggaaagtccttttgaggagagggcctgcagctgaacctctcacgcaggccactgggtaggtgcgcgcccagcttctcagaaggtcagtcccaaccctgcacggctgccagaagctagccagatggggaaggcggccaggagcctggtccgacaccccgatgcacagggcctgggccagaggcagatgctcccatctacatatgcacacacacatataaacacaaacagagaaaggtgcacatgcactcacatatacacatgtgaaatcacacaggcatgtcaggatgtcacatatacatgcacacgtgtaagcacccaggcacgtgcagatacattcatatatatgatcacatacccacacatgcgcacacacagctgcttctgctatacatgagctgctgtgagctgttttgttttgtcttgtcttgtttttgttgttgtttgagacggagttttgctctttggcccaggctagagagaagtggcgtgatcttggctcactgcaacctctgccccccgaagacaggacacttctgtctcagcctcccaagtagctgggattatagctgcccgccaccatgtccggctaatttttgtatttttagtagagatggggttccgccatgttggccaggctggtctcgaactcctgacctcaggtgatcgacccgcctcggcctcccaaagtgctgagattacaggcgtgagccattgtgcccggccaagctgttttctgcctcttgagttaaaggattcatccactagaactggccaccttaaggccatattatattgtggtggacttgtcttaaatggaatttcctgcttcttcttaaatgtataattcctctgaattgaatataaatttcttcatttctcctcattgactttcaaagctcttcttccttttgatatacaaagtttagccttgttcgagagatctgggatttcccttacgttacggattattttgtaaacagaacacccaggctcctcccctcatgtcctggctggaggtgaaacattaaaaagagattttaaagcagggccctttactcccttccttcctggtttgtggccagggcacagggcagctctgctccatccaccctttgtccctgtgctctgggcttggaccaaaacctaaacacagcgtgggccgtggcaggagctgaccggctggggcaaagtttaacacaggccatacaaacagcccagagcctggatgctagaaccaagccttgcttttctctgtcactccggaagtgtgctctacgcgggctctttagtgaggctcctggaggaagtgttgaaacacaactctattcatacatgtctttaaacagctttcactagctctgtagccaaaggactgggcctgccaggttcccggcctcttgctggagcacagtgaggctggggaaggagcacagcacagagcctcctgagcctcggctcagctctccccgacccccagctcggctctccccaccctccggctcggctctctctgacccccagctcagctcttccccacctgccaggacgatttccccaaagccagcgtctgtcagaaaatcacccttagtttttcctgcaggtggcctgtgacttgtagaagctcacaaaaatctctttcaaagcccttttttgttgctgttttgttttgttttgagacagagtctcactttaatgcagtggagtgcagtggtgtgatcttggcccactgcaacctccacctcccgggttcaagtgattctcccgcctcagcccccagagtagctggaattacaggcagcctgtgaccacgcctggctaatttttgtatttttagtggagacggggtttcattatgttggctggacaagctggtctcaaactcctgacctcaggtgatccacctgccttggcctcccaaagtgctgggattataggcatgagccactgcgcccggcctacagtccttttaagaggacagcccggggtttccagataatactagccccacacacaggcatgtcctagggtccacacctggtcagcgggaataacaggcagccgtgggctgggctcccagccccctagcagggtccagtgggccagggagcctctgctttggtttgtggtgcgtggtctgtgcccgcctgtgttcagcgtttgaaggcagaggagcgggccatgatgggcagagccgacgtccaggctccacggtagggccgtcctgctgctgtctgcagacctctcaggcttgaggccccccgccccacaggactggcccgctcctccctctggattgaggtggagcagggctggcagtgggtcgaagaggggagctgtggaatcttccccaaagcagccgggtgtcctggaaaggccagggagtgaggaggcaggacccccggggacacaggcacacacatccaccacatgctcacctctgcctcctcctgcagacctccccgccagccccgtcatttcatggcatcttgctttctcttcattgaggaatgcacttttgcaatgttgttactcactatccatctacttggccaacagcctcttcataaacttaattgccacaaattctgcatctctgggatgcaaactagtgaagctgtgctgtgtcacccaggaggcttaattttaacatcacctcaataggtagccagggaagcggatctcggtggactctgcactgtcaatacaaacgctatgcacccatcaaaaaccatgagctggcttaaaacagagccttgtatggacatgggaaaaaaattataggtttgttgcaaactcatttagcagcaaaaatgtgatctgaactgacatgaagcccttggtatttatttatcctgctcagtatgataaatagcattttcctcgggggataaaaagaaaaacgtgagctgcgacagcagccactaacatggggaagggccgtgacctcctgatgagtgaaaatagcaagttagaaaacaacaaattttatcttttaaaattaataatagatatatagatacatagacacacacaggatggatagaagctagatagatacatacatacatagatacatacatagatagatactatatagatatgtaaatagaaagataggtagaggctgggtgcagtggctcatgcctaaagtggttccccagcactttgggaggtgaaggcaggaggattgctttagcccaggagttcaagaccatcctgggcaacatggcaaaaccccatctctacaaaaaatacaaaaattagccaggtgtggcggtgcacccctttagaccctgttattcaggaggctgaagtggcaggatcacttgaacctaggaggtaaaggttgcagtgagctgtgattgttccactgcactccagcctgggtgacagggcaagcccctgtctcaaaaaaaaaaaaagaaaagaaaagaaagataggtagatacatagaatgggtggatagagagatagaacggatagaaaaataggatggataaatagaacataggtagatacataaatatgatgaatgcatagatggatgggtggatggatggatggatggatggatggatggatggatggatgaatggatacatagatgaatggatggatagatagtatataaatggatggatggatagatacacagtaggtaggtaggtagtagatagatagatagatagatagatagatagatagatagatagataaacaggatagatagatagatagatagatagatagatagatagatagataaacaggatgaatatttagaaggctgggagtgggcagaaagcctggaaggacacacattaatacaaataatattaactgagttgttttctgggcccataggatcctagacaagtttttaaatattattctttgaagtgctatttcctacacttcctacaatgataataggatattttatattcagaaaaatgacatttaagacatagtcaatggtccatggaccttggacagagggcccagctgccctgtttgcagtctacaccgcatgcccaacccttccccagatctactcactttcagaatgtgctgccttccacgtgtgaaccagactgagctcctttctgccactgatgttgaattgtccatttgctcacgtcagtgtccacgtggcaaatccacagggcatgggtgggatcctgcagtctagacaaagccaaggagcaccgctggaggccacgttgggcttcccaatccacatgcaaacccaaaatgtgttcttgggtaccttttctgagaagacagcctgtggcatgcatcagcttccttgaggggcccatgatgctggagaaaacggagacccggctccaaaggagaatgtggactcttagtggttggacaaagacgtcccgacctcagacctcaggtaccctgtgtttccccagcggcagctcatctggactcggccatcacgacagcgaccacactggctccagccacatgcacttccggaccccatgtcctctagctgttgggtagaagaggggtggagaaggtttctgtagcacagaaacacatcagcaggaccagatccaaatattgcactctccagattcttcgtccttctggcagaaagaagcagtgtcccgggaacatgcccctacttgacccctgaccctggaaacgcctcgaaacccacccgggaggctgattccagctagtctgccctgggccactgtactgggagagtttctttccggagctgcagtacttcctttggggtgggaaggagttgttacaaactagccaaaggctctgagttgcttggtttttcctttagaaaacatttgctttttatttttagcagttattcagagccaaacttcatgaaaaggggaatagagtggtatcgtgggagtatccttttgcataaaaactaaggtgtgattacaaagtaacaaagctaatcttttttatttcaattggtttatgaaccaactctaattgaaaagccgtgcaaagctgcttgcttcatggcagcttttctggggtaaacgtgcagtcagccaagggtaaatatcttgaagtttaacgctcgctcggaggcataagctccagtttgtttttggttgaaaaatagtatcctaactgttgaggtacacctttgcagtgggactctgtaactgcccaaggggttcaccctgcctgctacctaaacagagctcattcatcaagacaggggaactgcaatggagaaagagccattcacccagtgccggctgtgcgggagaccagagttttattattcctcaaatcagtctccccgagcattcggggcgcagagtttttaaggataacttagtgggtggtgggaagccagtgagccaggaatgctgattgattggtcagggaggaaatcatagggagttgaagctgtctgcttttttttttttttttttttttttttgagacagagtctcactctgtcccccaggccagagtacagtggcgtgatctcggctcactgcaacctccgcctcccgggttcaagctattctcctgcctcagcctcccgagtagctgggactacaggcactggcacaccatgcccggctaatttttgtatttttagtagagacagggtttcactatattggccaggctggtcttgaactcctgacctcgtgatctgcccacctcagcctcccaaagtgctgggattacaggcgtgagccactgtgcctggctgcagctgtcttcttgcactgagtcagttcctgactggggccagaagaccagacgagccagtttatctatctgggtggtgccagctgatccatcaactgcagggtctccaaaatatctcaagcgctgatcttaggagcaatttagggagggtcagaatctcgtagtctccagctgcgtgactcttaaactgtaatttctaatcctgtggctgttagtctcgtccccaggcaagaagcaggtctgctttgggaaagggctgttacagtctttgtctaaactataaactacaaatgaagtttctcccaaagttagttcagccaaggaatgaacacagacagcttggaggttcgaagcaagatggagcccgctaagttagatctctttcactgtctcagtcataatttggccaaggcagtttcaactccaggaatgtgatcaagtccaagttctgctgatcctcaactttgcctatttatttctcttctgttttaagtcaacactttctcctggtgaaactgctctggaaggacgttccaatgaaaagcttttcccataatgagatcgtaatccttgctgaaaacgctttgccgttcactgcattttaatgctctggcaccacatgtgcccccttttctttttgggataaaagacgcctttgtcccatgtcctcagctggtgcttaggggtatggagcaaaaagtgggtgccagagttgagattcagggagtggagagtggggaggagcttctgccttctgaaaactgcccggatggatgcggtagtgcagcggtggccacggcacatgcctgcgaggatagagtcagttgtggctgagctaagcgcggaagtgcaggcaaaacctgagtatcggcagccagggcaggtgtggggacctctgcactgaggtatattcctccctgggagccacagggagcccttagttaccagccttgagagatcctccacattcgtccgtggtaacccccttgctgtctctctctctgtcaccagtggaaggactaaaagtggtggagattgagaaatgcaagagtgacattaagaagatgagggaggagctggcggccagaagcagcaggtagggtctgcgctggggccacgggcggccgggcctggggagggctccccgtaccagttgggctggggctgtgggctttgtttgcctaaaagaaaggctggtgcagttcggtacagttcaggcttgggagagtgcagtctggaggcagccaccctgcttgcgacctgcttgtcagtggtgtgactttcttctaacaaaagagcacgcatgggccgggtgtggtggctcacgcctgtaatcccagcactttgggaggccgaggtgggaggatcacctgaggacaggagttcaataccggcttggccaacatggtgaaaccccgtctctactaaaaatacaaacggtagccaggcatggtggcacatgcctgtaaccccagctacttgggaagctgaggcgggagaatcgcttgaacccaggaggtggaggttgcagtgagccgagatcgcgccactgcactccagcctgggctcgacagagcaagactctgtctcaagaaaaaaagagcacatattggagataggggctgggaagacgatttcacagaagaagagtcctcctcctgcagatccaagccttaggagcaatgtgtccagcttggaataagttgatatccacttttaaagacagaacaagaagaggaaaagcattaggggaggagcctcctgttgcccccagggacccggttccttgtgtgatgttcccactgggttgcattccagcgagggcttcagcactggggacacagaagtcattctcctgggaacaggcatccttcacaggcgcttcggggggcccagtgagctgtgactcgtggggaaaatgccccagtctccacgatgccacctccaaagtcagttttgtgtacagcaggactctttactggagccagggtcaggacacgtgtggatgaaccacgaccaaactggggatggaaatgccggtagtagcaaagagacggcggtgatgatgagcagagcgcatgcattgaggcacttactgtgtgcgggcgctgtgcttagtgaggggcacacaggacctgctcacacctccgggctttgcctccatgcccgctggtgccagcccagacaccacaggcatatgatgtggctcatggttccccagagtgccactgcccggcctcagtgggatttaatggggactaatggactgagaaacagccctgtgcaattgcactgagttgtctcagagccacctggcatgctgacgatcattccctgattttgaaattgagggcaatctgcttattgaggaagcgtggcaagtgaaagggtctcagaggcagaaggtgaagggaaagccgacgggcctcatctggtcccctcaaagccccgggggcctggcctcggggtgggcgcagggaggaaggccgagcggaaggaagcaggccttgtctgagccacgtgagagcctgtcctacagggaccgtgccacgtgtctgtcccatgcactcatgggctcatttggagttagggatgtctcagcccaattgacttaggggaagtcaggccatagtttgtggccatggaaagttgtgagtgaacaatccatcttcgtcatccctgtgctggaggctctttaaaggacgggagacagagtctctcatttgtgagccaaggaagagctcccaagttgcacagggacggccacacagctggggtcccaaggctgggacctggcaaggctgggacccggcttggcagcctcagacacacagcaccttcacctgtggcaccgcccttggccgtgggctctacgtggcttggttcagccctctggctgtcccttgcgccccaggtgccatggctgctttggcaggagggtggtgttccagggtggtgctgcctggcagggttcccctctgcccagagccaggcggagatgggtggcctcaagctggggctgcgggtgtagcagggccagcctttccagccccaccagcagcacgaggggaagaggacaaaaactgagttctagtcttcagcctgaaaccagactccctgaacagcggcctctgggccccatatgggttggggaactccaccgccccaaggggtgtgtctggagccaggccatgcctcccgaagctgcccccagctcctcacccacaactgtgtgtccctgagcactttctggaggtgtttgtaggatgcagcctcttatcccttaaacgactgcatttaccgcccacctacagcagcaggagtgagtggtgagacagcctccggcctcacaggtcttgcctctgccgtgcctgatgggcacccgctctgtagaaagcaaggcgagtgctcggatcacacgccgctcctggcgtggtttctggtgtgcactagtcctgcaggtcaggttgaggttgcaggggggaagattatttttatcgaagttgtagtcatttcctggggctgcgtaacgaattctcataaactgggcagcttaaaacaatagaaatgtattcccacatagttctggaggccacaagtccaaaatcaaggtgccagcaggccctgccacctctgaaggccccaggggagggaccttcccggtctctcttggcctctggtggctgccggcggcattctctgcctgcttcttcacctggtgctcccatccgttctgtccaaattccccctttttgtaaggacacccatcctattggagtaggggtcaccctcctccaggatgacatccccttaactacatctgcaacagtcatgtccccaaatgaggtcaccctcagaggcagcagggttaggacttcaacatacaacttttggggggagatgtacttcagcccataacacaccacgtgggaggataacaccgatttcagagcttgcagaggaagccgccaggaactccagtgagacatcagcccccaggtgcctgtcaggcacgccgggctgtggggggcacctgggcccatctgagtaacggaggcgcatccgcacttcccccaggagtacatttttagaacccacagcgccataaaccaaagacaaggagacttcctggtgccccgtcagcttctggaggcgacgttctcggctgacagctctggcagcctcccctgtaggtgagagacaggtaaatgggactcttgcttccaaaacggaacagggtaaaaattctcaagcgttgtcgacacattgagaaaaaacaaatccagcctcctgggctctggtctcatccccagccgcgtcatgtgccccaggccggcgttgccacacatgaaaccccttcctgtttttctatgtagaaaggaactcagaatagagacactgagatattcgtgttgtcccttttgtctttgtcaacagcagagttacatcttactcatgagagccctgtagcaatgtggggaccctgggaccagtctcagttaagctggaacttccccggatgactggggagaggagctgcaaaaggcagggtgggggtggggggccttcccgagatggcagcccagccagaggccagcgttcttgcctctgggaagagaataaaggccccagacagggtggagctagctcagccccgtgccacacaaatggccagtgtgagcctgaaatgtggagctacattcagcccacatagcacaccctggtggggcctcggagccaggggtatggatccaccagaagctgccccttgggaacagcagtggcatcggggtccggcacacagcacccgggagcaggtggccgtcccctgacactcacgggctaggtttctcctgcttttccctcaaagaggacagaggtccaactgccagcttacatttagggcaggggcaggggcaggtctaccccaggggccacggccactctggcccccagcactgtgccaggcagagagcagagcatggaatatggggttcacccagagctggggagtctgcaggagcctggggtggcaactgagggctcagcgttcatcccaaacaaatggccttgcccactggcctaagccccagagaagggggatggggaccccaggaaatgaaagcaaagataagctccaaataggatgaaaagaaagagctccatgccagctgctctgtttgctgaagacgctggttcccgtggcagcggagcgcagagagaggggctgcctggccaggcagggtcagcgggccccagcagaccctcctctgctcccagctctggtatctgcaaggaaacagcgggattcgaacagtcaaactgtcttgctcggtgaagatttccataaccctcctggggaatgcaggagacttacagagacagcacatgtgcgaatgtttacacaaaacaggttaaaagcagcgaagaaatcatcatcatgccatctattttttttaactacgcagaaaacgttcgttacttctcagaaatgtgtaaatggaatttctcgtttaatggatgacaatggaaatcatttgattggtgcattttgttggttggttttgttaatactttgctgaatctgttagcgttcccccttacacatcaaactgtggtagcaactctgatgggttttgcaagcatgaaacagagggaagggctaccaaatggatctccgtggagcggtggttatcacggggaagagacggcagcatgccgagaaaataacaccgaagcctctttttccagaaaggaaatagattgattattctagttttgaaaatagcacaggctcattggaaaacctccaaactacactgatgggagctgaagggtgcacaccgatcatgacaacagccggcaatgtccccccagtttaaacctggacacgaggccttctagatgtttttctgtgcatagataccttgttttgaaaaacaactaaaacatgcgttgtgtagtctttttttttactagtggcattgtgagcaataaatagattaaattttaaccagcgtacagctcatagattttcccagaaggccacaatcaagcactctttttaaacctaccgaatgtgctctttcttcctcgtagcgtggcattttttggcacttgctttcagtacatactgtgcatagcattcttattttcccttttcatgtcaagtttcctcacttggcataatatccgtgatgatcctcctaatggcataatagtccatcatgcggaggcactgtgctggtttaaaccgcttcccgtcttgggacattcaggtggcttctagtcggttttgtgtttttgttacagcagatcacaccacggtgaatatctgtgtgcatagagctgtttgttcctgtttaattcttggcttaagataaattccccaggatagatatgtgggcttaaaggatacgaatttctatatggctcttactgggcagtattaacttgctctcccagaagaaggggctttatttacaaatcgcaggagcttctgctgcatttagctccctgagtgcccccatagcctggtgaatgtcacacaagccaggcgtgacccccacccaccatcgtccaagtacacagggagcctgttcacttccaagcaagttcacacccatagggtgtgaacccagatcggcccagccccctggtgcactctgctgcaggggcccaagagcagccagacctcctggggcagctgctcctcattcagcctctggggaccaccctgaagccagcacactgcccaaccggaaggtggctttcctctgaaacatgcctggctcactttgccctgctcctatgtgggatacctcgataccaagtgctaaacaaaaacagagtcagacagaaaactcatctgctaacattacatgtaacagggaaagttggaaacattctaaaagtccatcactggggactggattgctaacgtgtgctatggccacaccctggagaaacttggaaaatgaagctaagctctgtggagcaacttgggatgagttcatgatatgttagatgacaaagcaggttgcagcagactgactttggtgcaattccatctttgtttaaaagtacaaaggggctgggcgcagtggctcacgcctgtaatcccaacactttgggaggccaaggcaggtggatcgcttgaagtcaggagttcacgaccagcctggccaacatggtgaaaccccgtctctactaaaagtacaaaaattagtcaggtgtggcagcatgcacctgtaatcccagctactcaggaggctgaagcacgagaattgcttaaacccaggaggcagaggttgcggtgagcaaagattgcgccactgcactccagcctgggcaacagagtgagactctgtctcaaaaataaataaataaataaaaattttaaaaagtacaaaggggcggggtgcagtgactcacacctgtcatcccaatactttgggaggctgaggcagaaggatcgtttgaacctaggagttcaagaccagcctgggtaacatagcaagaccctatctctacaaaaaataaaaattaaaatattgttaaaaggtaaaagcggccacccatgtgtgtccacacttcaaaacattctggaaagatacaccaaactattagaagtgatttccagagtatgggatttagggaaataaatgggtaaagtgaggacttcggttttcatattttggtgtttttttttttactttactcttgtgttgtttagattttttagaatgtttttcttttgaaaacagcttctaaaagagaagatagccctcaacatctgacttttttttcttttttttttgagatggagtttcgctcttgttgcccagactggccaggctggcgtgcagtggcacaatctctgctcactgcaacctccgcctcctgggttcaagcgattctcctgccttagcctcccgagtagctgggactacaggcacacgccaccacgcccagctaatttttgtattattattatttttttaatagagatgaggtttcaccatgttggccaggatggtctcgatctcctgacctcatgatcatcccgcctcgacttcccaaagtgctgggattgcaggcatgagccaccacgcccagccccaacatctgactttctgtgtgttttccaagagtctagtgtgaggtcagaggtcagacaggtcatcagggattttgcttcgagtgagttgctgctgccctgactcctctcccacagcaaataagaccacacggggcttgggggttgggtttgtcgcttgcttttgctgtgctgagggcttcaccagactgaaacagcaggaccacagctcatctctgctccttctctctaggaccaactgcccctgtaagtacagttttttggataaccacaagaagttgactcctcgacgcgatgttcccacttaccccaaggtaagatgagattccggcccagaagaagctgcagctgtgtccccagccccacgcccagccctgtggccctgcggccagaccctgctgtgtgtacgttcacatcaaccgcccctcccagccctgggccgctgacggtgcgggttactttaaggcaaagtattttttctctttgacatttgtttagcaaaagtgatcccagaccataccttcccctgcaaggacataacagctccgtgctgctgtctgcccggccccgggagctgacctgggtagacagtttttacactcaaacgttactggaaagaactttaacgtttaactgaatttttaaaaatccattccattggcccttgtctctgagcaattcttagttgtcctggcaagttttgctcttttgcacaaaagtgttcttagttctaagagaagctgtgacgttggtgaagtagcaatggcatttttgaaataacgacaaaaggagggtctcgagttgccggtcacccgctcaacgccttcagctgggaagcaggcaaaatcccggcccacctgctttttttttttttttttttgagacagtgtttcactcttgttgcccaggctggagtgcaatggcacaatcttggctcactgcaacctctgcctcctgggttcaagcaattctcctacctcagcctcccaagtagggggcattacaggtgcccgtcaccatgcccagttaatttttttgtatttttttagtagagacagggtttcaccatgttggccaggctggtcttgaacttgtgacctcaggtgatccgcctgcctcggcctcccaaagtgctgagccaccgcacccggcccggcccacctgatttgtaatgtgctctcatgctaagattcagggggcacagcttccagagacagcagaggcctgggctaaacacaggtgggctctgccactgcctgcggttcaagtgatggcagagccttccacagcctccatgtaggccactggtgtccattagtccgtgattctatccacgcagttccaaacaatgtcctggatattgtcaggttctgggtggatttggggggtttttgtttttttcttttgatactgagtctcactctgtcacccaggctggagtgcaatggcatgatctcagctcactgcaacctctgcctcttgggttcaagtgattctcctgcctcagcctgagtaggtgggattacaggcacccaccgccatgcccggctaattactgtatttttagtagagacggtgtttcaccgtgttggccaggttggtcttgaactcctgacctcaggtgatccacccacctcagcatcccaaagtgctgggattacaggcgtaagccagcccagcctcatctgagatttttgaatggagactagtgcctttttccattggaaaatatgccccgcgcttctcaggatcctgtcccagggagccgtgaagcacagcctagatccaaaataaaaggtgtcagccctccagatctgtccccttacaaaaaacagaaaaacaaatatccagtaagacctaggagaagacagtgtgcaataccaaagcagtgttcttgtcttctgtatagaaccacagccttctgtccttgtgacagcttaacctaaagcctgatgtcctcagaagcaacccaggggcaccggccccatcagcaggcctgctcttctagctctcggcagaaaccaggaatgggttccagacaggagcatctcagaataacttcttaggtggtatctgaatttatgccaagtgaattttacccccacacttcactttattgccctttttttattattatttttgagatggagtctcactctgtcgcccaggctggtgtgcagtggcacgatcttggctcactgcaacctccccctcctgggttcaagcaattctcccacctcaggctcccaagtagctgggattacaggcacctgccatcatgcctggctaatttttgtatttttgtagagtcgggattccaccatgtttgccaggttggtcttgaactcctgacctcaggtgatccgctcgcctcggcttcccaaagcactgggattacaagcatgagccaccatgcccagctattgtccattttatcatcgggcttgttgaggtctaatttacatgcagtaaagttatttaggcttggagtacagtgaattttgacaaacttgtttagtcctgtgacctccaccacaagcgagatatggaacatttctgtcaccccaaaccctcccctctgctccctcaccctgcctctggcatccaccgatgggatctccacccgtagcattggccctttccagaagtatgtggcctgtgagtctgacgcaggtgccttagaaagagaacgggagaagctgggtgcggtggctcacacctgtaatcccaacacttggggaggccaaggcgggtggatcacctgaggtcaggagttcgagaccagcctggccaacatcgtgaactccccatctctactaaaattacaaaaattagccaggcatggtggcgggcgcctgcagtcccagctactcaggaggctgaggcacgagaatcacttgaacccaggaggcagaggttgccgtgagccaagatcgcaccactgcactccagcgtgggcaagagtgagactctatctcaaaaaaaaaaaaaaaaagaaagaaagaaaaagaaagagaacgggagaaagaggagaaatatctcagcatgcacatcactgtcacaggcccacggcgcctggttaacacggaactcctgtcctttctagtacctgctctctccagagaccatcgaggccctgcggaagccgacctttgacgtctggctttgggagcccaatgaggtaagtgcggggcttgcaggcaccacgtcccagggggaggcagctcaggatcttggacgccagtgggaccacccccatcgctcttcctccttcttgctttttcctcttctttttaaagactgaaaaaaaaaaacaaaacttgttttgccaggttttagttgaaactaactaacactttatagcagggcccaggagacttcacagcaaggggattctgtgagtgggggagacggctgtcaggggcagggaggctccacccagggctcctgatggcgctgggccccccgagccatctgctcatcctgcagaccctcatgcacgccggtggcagccccgtgctgcagaacacccctgccaggagcaaatctctcctcaaggaaggggctgcggtcagagtgctctgctctgagagcagtgtctgcaaaggcaaggcacaggcaaccggctgccccagataagtggacatgtgggattccgggaactgtgtcaccttctgcagcaaggcttgaggccaggaattccacactagcctgagtgatatgatttggctgtgtccccacccaaatctcaccctgaattgtcataatccccacgtgtcaagggcagggccaggtggagatcttgaatcatgggggcagttttccccatactgttctcgtgatagtgagtaagtctcacgagatctgatggttttataaatgggggattgtcttttgcctgccgccatttaagtgactttctccttctctgccattctccatgattgtgaggcctccgcagccatgtggaactgtgagtcccttaagactctttttctttataagttacccagtctcaggtatgtctttattaacagtgtgagaacagactaataagctgggcaacatagcaagacctcgtcgctacaaaaaaaaggtgttaaaattcctatttgctgaaaaatacaagaatggggaattttttgtttcatctcattggctaatagaccccctcttttcacaccccaaaaaatgaaaaagttccctcattgcagacctcggcctcagctgttttcaacgcaccaaaatctaaggacgttttcctgcttgtcagcaacacagaaaatgcacaaggctcctcagcaagctcacctgtgctctttgacaagctcggccgcagcgatgtctctgcaaagggcagaaagtgggctcttgcctcttggcacccctgaggccaggctgctgacacctggggcactgccctctcctaagtgaacctcttttcatgtgcatggtctcccagcaggagaaaaactgcagcaccagccagaaaagcaaagctccagcctccactccccagctcagttcacccaagagcagcaggcggccagtcccaggggctgcactgctgcaaacctgctcaaaacctccagccgccacgtggcaacttgctccccagctctgagagtgcaggaccggggcgcagagacgacagaagaggctttaaatatgcagaatgactgtctaggtcaacgcacaaaaggaaagggccccaggtgtgggagatgcaaggggtgagagggaaagctcagaagagacgtgttggagctgctggcctgcagcagctcccagggtccctgcacagctgctgagattgggcagagcaagtacacagcaagtagacaccgcagacagttagagcacactgactcctgctcccagcctgtgggcaaccgccgcacctcagcatcatgtagaaaaatcaccatccccaaagtcattttgacctcagcctgctgggaggaagagccaagccaggggccactgatggcaaagcacctgcgtggaaactggcactcgctgtcttttctgccaccttctaccagggaaccctttgagcacgggccactgtgactggggaggtggggcttgccccacgaagctgggggatctgtgtctccataatagaaaggccacctctctgtcctctgatcacagagtggattcacagctgctctcggggctggcaggtgggcaaggcagacagctcccggcagctggactcagcctctgggtggcatctcccacggcccgtggctcctgcccagcagatctcaagggcactccaggagaccgatgagggttccagtgcttccaagaagtatctagctgcctgtgtgtgagaatgcagagatgcccaagacaggagccttggcctctggcagatctagggatgccaggaattttggagtgtgagtggcaaagagggacaactaaagggacacacatgaaaacagcccactcggccccacaaaactgcatctggccacgcatgaggcacctggcactcagagaacgtcagggcgcctaaaagtgatcacctccctcccttccagcaggggcgcccccacttttctccgagtggtttggcccagtgtcctgcccatcacaaaccagacagaggacatgacttcaggctgctgtgtcctcccatgtgttagggcctccgagggcccagggctgtggcccgtgagcgtggcctgcctctatcctccgagggcccagggctgtggcccgtgagcgtggcctgcctctatcctccgagggcccagggctgtggcccgtgagcatggcccgcctctatcaagtgcagagctggaaggctgcaggagcctcccccgtcatctcatgagtcccccactcacgaccatgcagcccactcagaccacgacctgccgccacatgcgggaactgctggctccctcgtgcccgcccggggctgaggactgcacgtgcagccacagatgcatccggccctcctgccccacagcctctatgaaggccacataaatggcaccaagtgtctctgtctgccgatcagcatcccctcttggcttcacagcagacgcatctgcctttcaggactgccttgaacaacatctgggctggtcaggtggagagcgaggagtttccaggttgcagcccctatggtcctgagggctggcgtccaggatggtgggggtccagcagctctgggcagcgaggcccctggctgggtgatccaggtggcagctgaccagtggcctgggagccagccctcctgtcctcacgtggggccccatctccaaaagccagtgcagtgccctgcacattatccaacctacatctgtactgtctccccaaggaaaacgagtgtgtggttcacgtgctttaaggacgtttcccaggtgacattccaagctcccatctgtggccgcaagtgggggagtttccagttttccagatagattttctgccatgccagagaaccctccgcctccttcagagccatctcatcaatgcagtgatcgcaagcttcgatttacaaaaactcgcctcccttgcagcatttccaggtttcacacacagcgtaacaagtaaaaatggatttttgggcagcacgcctgtcctagtttgctgaggctgccataacaaagtaccagagactggggtggcgtcagcagcaaaagttgattcctcagttctggagctggaagtccaggatcaaggtgctgccaggttcggcttctccggaggcctcggtccctggtctgggaccttcttgctggggcctcggtccctggtgtgggaccttcttgctgggacctcggtccctggtgtgggaccttcttcctggccagcaagatggccgccttcttgctgggtcctcatgtggcctgttctctcggcacatgcatcccaggtgctcttcctcctctaatgaagacactagtcccatgggaccaaggcctcaccctgactagatggaaacttcattacctccgtaaaggccccgtctccaaatagccccactggggtcggggctttaccatgttgacctggggaagggggcagttcagttcgtaacatgcccttttgggaggagaaagtcaggcaatgagcagacacaggcaggaagccacgccgggctccagcagggatggcccagtgccctgtacaggcagcaggcagctgggctggaggtgggccctgggtggaggacacctaccaggtgtgtctaaactgcccctttcctacacatcttccttcgcactgggctcgccacccaagacctgctttttccagaaagcaaagcctactttggtcaaactctcatttttaaaaatcacttcatcttttcctccctaacttaattagctccaaagcactgagctgtattgaaatagatcaccacaatgacaatcctctttgggactgaaaacaaaatctatttcaacttgaacagggatattgatagaagacagggctccatgaaaaagggttaggaggagccgcttgctggggcaggggccgcatctgggcactgcagttaagatgttaaagtgtcttcggtcccagggggccgcagatgaacacagttcagcgtttctggatgtaaatcgtcaaagctccttcgatccccagcctcgggcaaggaaagggcctttctctctgtgatgccacctgtgctcaggtgtgcactggatggaactgtgtcctagacccctcagctgtgatattgatccgctgagattgtttttcatctgtagaaatcaataaattcctttttggtgcagtgttttgtgaacgggtgcactctctcacccggtcgctgtcctaagaattctccttgacttcggaactggccctccacgccccaggatccacctgccaggagacccccagtgtgctctcaaacccccacccatctgagtggcctggaaaggctggtctgaagacctctcttcccatgtctgccgaccaggctttgctctccagggactttctgggagggggagaacccacctcctgccaacggccctgctggcactccgaggacagcagagggaaggaagccaggggctggggagccggccacacaactgcccagtgcctatccttctcctgtgcccacagatgctgagctgcctggagcacatgtaccacgacctcgggctggtcagggacttcagcatcaaccctgtcaccctcaggaggtggctggtgagtgccaaacccgccttcggttcttcctgggcacgtggtttcatccagttccacaggaatggagggaatggatcaccagggcaccttccggatggcactgcgctccctgtgagcagaggtgacatttccccgggagttctgtgaggacactcagcctgtctctgttcctccttccaccaaaaccttctttacgcccgagctactcctgctctgataagcaaggagtagcttatcagtgagactctgccatcatcaagcaaagcagcatgtcctaaagcagcggtgtgtgggagcgtgtgtgtgtgtgtgggagcgtgtgtgtgtgtgagagtgagtatgggggtgtggatgtgagtgtgtgtgagtgtggggtgtggatgtgagcatgggggtgtctgcatgtgtttgtgagtgggtgtgtggatgtaaatgtgtgggagcgtgtgtgtgtgtgagtgtggggtgtgggtgtgagcatgggggtatctgagtttacgggtgggtgtgtgtgaatgtgtggtgggagtgtgtggggtgggagtaggagtgtggaggtgtgtctgtgtgtgtcagtgtggatgtgtgcatgtgtatatctggatgtggggtgtgtctgtgtgtgggtgtgtgtgagggtgtgtgtgcatgtgtgtatctgtggatgtgaggtgtgtgtgcatgtgtgtatctggatgtgggggtgtgtgagggtggatgtgtgcatgtgtgtgtgtggatgtggggtgtgtgagtgtgtggtgtgtgagtgggtgtgtgcatgtgggtgtctgcctgtgtgaatatgtttggcagcaggtttttttaatgaaatattgctcagaaccaaatattaaaagcctattaaaggtttcatggtgactggggacccagagctccctcttggagtctcccctccccccatcccctaactttatgccccactgtggctcctcagacacctccggggagaccccagtccttgactgcagggtgaaacccctggtgggagctctgtccccacacctgccccgggtgccgtggtgtggcccgctggacgttctcagggtccctgtgtcacctcattggtacctgtggtaaacctggaacactgttgacctctggttgggatgagggtttggcagagaatgttcaaaccagcgcacagccttctgggtggctttgggaggagaggtgggcgggcccaggcacagggtgactcggaccccctgcctcccgcagttctgcgtccacgacaactacagaaacaaccccttccacaacttccggcactgcttctgcgtggcccagatgatgtacagcatggtctggctctgcagtctccaggtgggtcctgcccgctgcacacccagacctctactctcgggggtcagacggaggcccccttccagggagcggcagccccatcccaccaagagagccacaggcgtggggtccccagccgctccgcccctcctagggacgcacccctgcccaccgttgtcagtcaccccatgggcgaggctgctcctaggattacgagagcaggtgagtccccgacctggtcacccccccaacccccacaggcaggccgatcctctcccaccatgccaggagatgccagatggctgcaggggcctttgtcccccgcttaccactcacccaattccaccccccctcaccccatcccaccctccgagtgaagagagcaaacacctacgccctgttttccaatccaggagaagttctcacaaacggatatcctgatcctaatgacagcggccatctgccacgatctggaccatcccggctacaacaacacgtatgtacaggattttctctttttttccttttaaaaggcaccctggctactggagggaacctgtcagcccaaccctcagagcagttcccagatggagctgtcaacgacggcctcccagcccccaactctgcctccactgacacagctcctggcttctggactttgcccagggccttgggtctccccggagtaggaactttcaggattatcaaaccccaggggctctttcccactcctgtgcgggcctggcttcaggctcaggtgcacggcagatccctggccccgccggcgccttctccaccccaggcagggagcaacacctgtccgcatgcagggatgggggctccacacccccctctcaggagctcgcctctccctgggcaggctcccagctggcttccgcagggaaagcacaggcaggagccagaagagagcagaagagggggagaagagggactgcagagggacaggaggtgggagtgaggtgtccctcgtggggccagggatcagaaggacagaccgttgctccactcctgcctccacaggcacagagttccgccccatgtggcggacaaggtccaggccatgggcttgggtctgtgtcctcagtggcgcagcagctctctctgttgaactgtgtgtttgtgtgatgtcatcacatgcctgagagctctgctgccatgtgtcagcgcctagtgggttccgaggtgtggctgtcagcgctcctcccggggccatcaccatgcacacccatctgttccccttttgctcatttcacactcacagtggccggcacagcacaggtcagcagaggccttgaccacagcatcccagtgaacctcagcctcgttctgcccacctgcctctggcacctggtgacgtttgataatttcacaagaggccgtgatgcctcagggcctgtcccagggagcatgccgcttcctcagaggtgtctgtctggtgggactgcaggagcatggggacgtgcagttgcaggggcagctgagcggcaggagggacctcctggccaggccagggcacaggcagctcccccagcccccacggcaccttctcctgactctacttgctccacttacatggctgggtgttgctcccccgtgcaggtacctggtgagggcgcctgagtctcccctcactctctccttgcctcccaggtaccagatcaatgcccgcacagagctggcggtccgctacaatgacatctcaccgctggagaaccaccactgcgccgtggccttccagatcctcgccgagcctgagtgcaacatcttctccaacatcccacctgatgggttcaagcagatccgacaggtgtgtggggtgagggccctcccaccggagtgggggcacattcagggacagagcagcccccactctccattggctggaagctcccagaagctcctggccacagcagtgccctggggacccaagggaacccctccctccttcctcacctcctccagggcccagagtggagccccaaaaagagggtaccctcgccatgcgcacgtgcatcccactgacctgcacttcccagcctgtatttaattcagccttcactggctccctttgagataaatcctttgtccctcttccagcccaagaaactgaggcttagcaaaggtagggagcctgcccaaggaggggacaggccctggacagacacatctgctgcatccaacataggagagctgccccctgccccataaccccagctgctgtcacctgccacccacagcccagtcagcccccttccttttatttatttttttttcttttgagacagagtctcgctctgttgcccaggctggagtgtaatggcaggatctcggctcactgcaacctccacctcctgggttcaagcaattctcctgcctcagcctcccaaatagctgggattacaggcatgcgccaccaagccggctaattttcggtatttttaatagagacggggtttcatcatgttggccaggctggtcttgaactccagacctcaggtgatccacctgcctcgacctcccaaagtgctgggattacaggtgtgagccaccacgcccggccaccccttccattttagataagggggctttatgcctctcagggcgtgatgggaggagagtgagaggatatctgcgtgagaggaagatgacctggtccacctgccccagacaaacacctccagctcaccgaaataacgccccattccacacgggaattcctcatcaaaccctcactctctgacatttgcaggggagggaagctctcggagtaaaccctgggagaaatgtgttgggttgaatagcagcgtccttcaaacaaggtccacctcccgtgaatgtgatcttatttggaaaagggtctttgcatttgtacttgttaagatttccagataagatcagtgtggattgtctaagggggccgtaaatccaaagactagtgtccttggacgaggagacagagtagaaaacagcccagacacagaggagaaggccgcatgaagacgcagtgattggagatttgagtgatgcagccccaaactaagggacttcggggcccccaggagcaggaggagacaaggaaggaccctcccctggagtcttctttgagagcagggccctgcccacactttgatcttggttctggcttccagaactgtgagagaatgagtttgttgttttaagccgcctagtttgtggtactttgtgtggcggccccaggacactcacccagggcaccgtcttctgcggttccacaaggcagacctcagccattcgaagtctaagtggcttccttccagaggcagcaagaaagactgcctggacttcagcactgggaagatactcaccaccctccaggcgtgctgctgagcctccctttatcagagagcagcagcctcttctaccatggctttccaatttgtctacgcttccaggaagttcaaagcccagtgtaaaaaactgaagtcagtgaagcatttggggaagctccgaggaagcagcatgctccctgggacggggccctgaggcatcacggcctcttgcgaaattgtcaaatgccaccatgtgccagaggcagaggtgggcagaaccaggctgtggttcattgggatgctgtggtcaaggcctctgctggcctgtgctgtgccagccactgtgagtgtgaaatgagcaggagaacagatgggtgtgcatggtgatggccccgggaggagcgccgacagccgcacctcagaacccactcggcgctgacatacggcggcagcgctctcgggcctgtgatgacatcattgcacaaacatacacaattcaatagacaatttacagtcattattgaatcactggttcccagtacagttatctcccctttatctataggctctctggcctctcctccatgtttgtgcccctccccaccctgcaagcaggtgccctgtgtggctacgataagctgtggcaaatcttcgtctgcagtaggtcaaggagcaaccgtgaagagagaacgctgcatctgccactgctaccccagtggggagctcctccagggacaggacctggggaatcaaagcaagtgaacgccccttagtgtaggcctcgtcccactgagccatgtcggagagcatcccgcaagagaaggaggcggcacctgattggaggagcagccgctctgcacaggggatcgttctcgtgcccatccaccgtggggacacaccagcattggcctgcttcaaatgcttcactgactgcaaaatatgactctcctctgggggtaaaattagttgtcccacttttttaaaaatatattttgtcatggaagatttcaggaataactgaataaatgcttcactaataacacaattaaatgtttacaggaaaattgaataattcaagatacaagtgatccccccaaaaaaatatatatatatacagttgaaatgacctagattgatgggtttgggttttgtatctgatgcttgttgttttattttcttggaagaggaaaacatcatacctggcacagagatgtgttctgtaaatgcttgtggggtgggtgggtggatggatggatggatggatggatggatggatggatgggtggatgggtggatggacaaatggatggaagggtggatggatggatgggtggatgggtggatgaatggacagatggataaatgggtggaaggatggatggataaatggatggaagggcagatggatgggtggatgggtagatggatggaggatgaatgggtggatggatggatgaatggatgggtttttgggtgggcagatggatgtgtggacaaatggatgggtgatggatgcacatatgaatcggaataagagatacatgaaataatgtgtgcagggggctcagtacacagtaggcctccgctgaataattgttcagactatacccgtgttaacacgttgttctctcgctatttagggaatgatcacattaatcttggccactgacatggcaagacatgcagaaattatggattctttcaaagagaaaatggagaattttgactacagcaacgaggagcacatgaccctggtgagtggcttattctgcctgggtgggcagccaggcggtgggctggcgaagcaggtcatccatccagctcacactggaagccaagaagctgaaattattagtcttcttggaacaaggtgtctataaatctggttttcaaggtcatgactcttactaggaaagtccgggcagggcctccctcctgatgggtcctccttcatggtcagaggcagcattctcccattcctccatctcttttggatttgaaggagataagtgggtgaaggccgtgcatctcgctctgctttccagagaataaaaccagctctcccatgaaggcacagccccagcatggcactctgaaagcccacctatgtgggggcaactccaacacagctcccgctccccaagccagcatcccccaccaggcccacaccatagcccagcacccctccataaccaggacaaggtggccagagaaggggtagggggcctcccccatgagaaggtgcacttaggttgcccagcatctgccttttggaaaggacaggcactgggcacaccaaggcacacaaggaccagagcacgactcatgcctggaatccagcactttgggaggccacggcaggaggattgcttgagtccaaaagtttgagaccagtctgagcaatattagcaagactccatctccacaaaaaaagaaagaaaaataaaaaaatcagtgcatatctgtggtcccaactgcttgggaggcagaggtgggaggatcgctggagcccaggtccaggctgcagtgagccatggtcgttccactgcactccagcctgggcaacagagcaagggtctgtctcagataacagagagagagagaggtgcatgagaactgccctcccggccttcagagagaaagctggttttgtggagccttgtctaagcatcaggtgcacccctggcattcttactctgaaatttgattatctgtttaaaatcaatagcatcactttccacctccagagaggttgaaagatagggaactctcggctcaggctgaccttctaaccatccagtcccagtaggtagagtcattaggactcatcgctctctggagctgaggtgcagttaattcccaaagactgtgcgagaggatgggagctcccgcaggcaagggctggacagcaggcaaacctccccaggccagggccaccagaagccccttccctaagagggaaacagtcacatagagcggcttcctggcaagcaagtttcttgctcctgaaaaaccaagggaaggagggaggcgccgccttgtcctctaagatatgaggaaggcagagatggacctgcagtcaggggtgacccaggccccgccgatgccttcctcctctgaggtgggaggagaggtcagggaagagacggggaggggcaggatgccagaggatcgggtgccaggtggtcaggacaagtgaacccagctgaaggtccccactcccaccccacccccagccttacacactgcagctgtgcagaccagaggcaaagcgaggctcagagcccagggttccgtttatcccaacgacctgcaccgcggggtcagatgacaagcagcacggccaggcatcgtctcactgctacggagccccagacggggctttatgaacacgggtggaggacagaggttggggtaaggtctcgggggaaaggttctgattcaaaatgggccccaatagggaggcctctgaggatagtgcgggccagcgtgggaggtgtgaggtgcagggagtgtggccggcagggcctgggaccttgaccttccccagagacactgctgccctggccctgccctaggtctggtgtcgggacagctccactgaggccggccaggcacaggctagtcattgcctctgatctggagccggactccacagaggagtcaaagaaaggcctgaatggcttcctgggaactgatagggcagggaaaggaagggcgaccacagcaggatcccttcgaggtcctgccgaggttggaaggcaggatccaccaagcatcatgcagactccgagctgaactgagctgctcctcacctagtcacgttccccaaaccagcaggtgcagcccgcagcccgggggcatgtgcctcagctgggctttcctgtctaatcagcttcagagcctggatggcaaccaacactttggtctggaaacctggtgattccagacactcatttgtgcccggtgcaggcagggccacgggacgccagccctccacctcttgtcctatggcgacatccgggctagtttgggtggaagctgctgcattcctgggcctgccctatctcctcctgaagctcctatggcatgcccaaccctggccaagctgagacagagctacctgtcccctgggaagatgagcaatgcacccacctagggaacagcagaaaatagggggtgaccaggcacagggcagtgcttcaggggatatcacctgggctggggtggccagaaaggctggaaggaggggacccaaacaggaccttgaaggttcattctccattgagaagggagcctgtcctccctgaaggcagccaagctcagttgcatggtccagcaggtcctccgtctcttcctgcctgtaatggcaagtccagacccgagcagcagcagcaggcccgtgttctacctcctgttacctcaattccaaaatctcttctttcagctgaagatgattttgataaaatgctgtgatatctctaacgaggtccgtccaatggaagtcgcagagccttgggtggactgtttattagaggaatattttatgcaggtaagagtcttgcagagcaatcaagcctccagccactcttattagccccacttagtaagggtttgcgttaaacgagcacgcctgggtggtcccgcatattccccgggctgccgacagttcagcctccagaaagccttcagggtaagcgtacatcagaaacaaaataggttataatttgagacctgaaagacagtaacaatccagaaaagctaatactctaaaactgtcacctgtcactgctaattgagccattattacaagcagccttgtcaaacaaattgcctgaaagtcaagaagcaaggactgcagaagcaggagggggcccaggagggccgagacccagcaggtcagctcacacagatggccacggggaaggtcggggacatagaaaaccaagccagctgaaaacaaccaccaaatattaatacaacagcttgatgaaccctaggagaagtcgggaggctttctgcaggacgctgctgccgtcctgggatacatccatccaactcacctctgcctatctctcaggtcggtcttcccagctagacctgcacgcccagctctgtttagcactgaagatagggtcaccttctccttgttcttactgagacacatttgtggtgtggtttggttggttggtggttaactggcgcatcttgtctttctctgagaacagcgatctggttatggggcatttctgtctctaatgtcactgtctgctgcattccctgcagagcgaccgtgagaagtcagaaggccttcctgtggcaccgttcatggaccgagacaaagtgaccaaggccacagcccagattgggttcatcaagtttgtcctgatcccaatgtttgaaacagtgaccaaggtgagtaactgtcaccacatgtcacacttgcttacactcagatacatgcatgcacacacaggcacacacacatatacacatatgcacacaggtacacacagacacacactcatgcacacacgtacacagatacacacagacgcacatacaggcacatacacatatacacacacgcacacagctacacacaggcacacacacaggcacacacttgtgcacacaggtacacaggcacacaaatgcacacacacggcacacacaggcacacactcgtgcacacacatgtacacaggcacacacaggcacacaaatgtgcatgcaggtacacatgcacacaaggcacgcaggtacacatgcacacaaggcacacaggcacacacaggcacacaaatgcacacacaggcacacacacacacacacatgcacacaggtacacacaggcacacaaatgcacatgcaggtacacatgcacacacaggcacacacagggacacacaggcacacataggcacacaaatgcacacacaggcacacacatacacacatgcacacaggtacacgcaggcacacacgtacagaggcacacacatgcacacacaggtatgcacatgcacgcacacaggtacacacaggcacacctgcacacctgcacatcctgagcagcctcttccccggctgtcgtggtgaccgctgtccctgttccatccagagcctgctccccacagcctggcccgtgaccccagcatctcccactctgtgctgcactccctgccttgccttgctgggccctggggggcccctcactgccctcacccatcgctgccggccttcaggaccctggaggcagcactggctgtggactctcctgtccccactctgcgtcccagttcctcacctgtggaggaacccctgagctctgtgccctcgagctgtgaagcccctgtccagctcccagtctcaccgcacccagccaccgagaccttgctccttgcacacagctcgttcctgcccagctccccccagggcctctgagctgcctgtggccccctgccaaggcccccacctcaaggcacccccagcatgtccaaaacaggcccatctcttgttccccccggggatctgggctcacagcctcacaccctccgaccttcctgggctcctacgctgcgcatccttctgctctagggcatctcttggagccaacccacccacttcccactcccaggaccctcagccgggaggctgtcagctcctttcccctgccccgtgtctttgtaagaacctcccaacctgtcccccaccctcatctcacgggcacgggggacacaggaggcaggaaggggactttctgtaggacctcatggagggtgatgagggccagagacagagccgcagtgggtggaggcagcagagccggcacgagggtgtccaggagctgggactggcccagaggtttccgcacggagcacctgacacctgtttttctccgacgtttcccattgccttaagaacgagggactctgaataaatccgtgtgtctctcccagctcttccccatggttgaggagatcatgctgcagccactttgggaatcccgagatcgctacgaggagctgaagcggatagatgacgccatgaaagaggtaaaacacactgagaagagcctgccttccttgcggcaagcaggcacgctgccctccgcactcccgactccagaagcttggacgtgccaagcagggcaccactgaaggccccgtggacaggcacacgtgtaccttccatcagaaagcctggctcagtaaaattagggaatgcgatgagggaaaccaaaactgcattcgccaagaacacgtcaggtctcagtaccttcgagggagtttactggccgtgcccttcacaagaatcacaactgtcacccacacctgtggacacccaggtgtctttgggtgtatcagccgccgttagagcatctgggacccctcagagtacagtgcctggcctggccccagggctgacttgttcagaggaggccatggggtagaaaggggccctcccctggcacggggacaaagcgaccacccacctgccagctcccgggcccagaacacacaccggcacctctcaggggccagggagcctggggctggctttaggttgctgctggatagatatcattttggaggaaggggtccaggtcacagcctcagggcccacgcagtctttctacggattccccacggctgtctgctgtcctgctgcccatggtgtggcctctgcccctcccagcctcctgcctcctccctccagcgcccccaggcagctagaacagtcttactactcctgcagggtttgacccctcctggccttggccggtgttgcctctgccacccccgctccccacagtgccactgaagcaccctccaaggcccgtcagtcagggctcccctagttactgtgcccaccaccccgtcttttctgcctgggcgctcctgaagcccatgtggcccacaatgcccttttgagcactgagccattttccaggcgtagccttgggttggtctcatctccctcgactgacggccccgtgctccccatgcccacacccgcctggagcgccatgccaggcacatggtaggcgctcagcaattgcttaggagtccactgaaaatccagaccagctgccctgacttctccagttgatgtctcctactggaaagtcacagaaaggtctctaaacctctggaaggctgagagcacttatgcagagggacagatgtagcaagaaggcttcccccactccacaaccccgcaagagagctgaaggggcttctgcctctctcgtgggccctccgagagccatagccctgatggccttgagtctctagtcctgagccctgctgcccagtaggggatagtagggttccttaaggcctctgccttcccccctgtcagcccccacaaaaaggagagacacgccaaagaggtgaaaaggccaagcccaagccgcaggctctgcacacaccaccagtccccgcggctgtggtggctgcagctgggtgagctcactgtccaggccccagatgaggcaccaagggtagcgggacagggtatgcagagctgcctctgaaaagcccatgtcaggagtgcttgggctcagaggggctggggaccacaggctttcacgttgcagcacctccaggcaacagaagctgctgggagagaggcagacactcccctgctgtctcctgctccctgacttggccttctctgtactctgttccagttacagaagaagactgacagcttgacgtctggggccaccgagaagtccagagagagaagcagagatgtgaaaaacagtgaaggtaatgcttgctctgctgaagtggcatctcagcgcatacaatgattctgacaaaggacagaaggaaagaggaaggggagaaaatctgaattttggaatacctttaaatgaatggaactttttttttttttgaaactaagtctcgctcttgttgcccaggttggagtgcgatggcacgatctcagctcactacaacctctgtctcctgagttcaagtgattctcctgcctcagccccctaagtagctgggattacaggcatgagccaccatgcctggctagtttttctatttttagtagagatggggtttcaccatgttggccaggctggtcttgaactcctgacctcaggtgatccacccacctcggcctcccaaagtgctgggattacaggtgtgagattgcgcctgaccaaatgaatggaaattttatttcttgcaactaatcattagaattaggctcttaaggctggtggctcatgcctgcaatcccagcactttgggaggccaaggtgggcggatcacttgaggtcaggagttcaagacccagcttggccaacatggtgaaaccctgtctctactaaaaatacaaaaattagccaggtgttgtggcgtgcacctgtagtcccagctacttgggaggctgaggcaggagagtcacttgaacctgggaggtggaggttgcagtgagcccacattgcgccactgccctccagcctggagaacagtgagactccatctcaaaaaaaaaaaaaaaaaaaagtgaggctcttaaagaaggggaacatgctttagttaatagaaaaacatcaataattagcatatgtatcacttataagagtaagtactttttaaaagtgcaattgaagtactgaaaacttttcacaaatcacgtgtttgctttatatggctttgagcattttcctctgtacttgttgatactagtcattcagctcacggggaatgcagagcagccgtttgttcacctcataataaggtcacactaatggccaggcacggtggctcacgcctgtaatccaagcactttgggaggccaaggcggcggatcacgaggagatcgagaccatcctggctaacacggtgaaaccccgtctctactttaaacacaaaaaattagccgggcgtggtggcgggtgcctgtagtcccagctacttgagaggctgaggcaggagaatggagtgaacccaggaggcggagattgccgtgagccaagatcgcgccactgcactccagcctgggcaacagagcgagacttcgtctcaaaaaataaaaataaataaataagccgggcgcagtggctcatgcctgtagtcccagcactttgggaggccaaggtggacggatcacaaggtcaggagatcgagaccatcctggctaacacggtgaaacccttctctactaaaaatacaaaaaaaattagccgggcgtggtggtgggtgcctgtattcccagctactcgggaggctgaggcggagcttgcagtgagccaagatcgtgccactgcactccagcctgggtgacagagcgagactctgtctcaaaaaaaatataaataaataagtaaataataaataaggtcagactccatctcaaaaaaatataaataaataaataaacaataaataaggtcacactctccatgtctaacagataattcaagagatagtgcatcaagcatgcaaggctcagggcaggacaaacgggacatggctcataagaggagctgcaacaggctttggcatccaacacacctggttttgagtccaggcttgccaattacaagccgagagatgtgcacaagtgtcccagcctctctgaacctcagagccccagtctctaagccagaggcaataataccattgttactgctgttttagtgattaaacagtcaaagtgcttgtctggtcccgatgaagtgctcagtcaatgttgccatttaatttttaagtcagttcatatttttcagtgggtcagaaaagagatcaatattgttttactttgtctaaatgtgttcagcaatatatctgatggcctctttcttttaaaatggtctgtgtgtcggccgggcacggtggttcacacctgtaatcccagaactttgggaggctgaggtgggcagatcacttgaggtcaggagttctaaaccagcctggccaacatggtgaaaccccatctctactaaaaacacaaaaattagccagctgtagtggcgtgcacctgtaatcccagctacttgggagccagaggcaggagaattgcttgaacccaggaggcggaggttgcagtgagccgagatcacgccactgcaccccaacctgggcaacagagcaagactccatctcaaaaaaaaaaaaaaaagtctgtgtataatcctgtaacgtttctgcgactgctggcacttttttttttccttcttttgtgagacggagtctcgctctgttgcccaggctggagtgcagtggtgcaatctcggctcactgcaatctccacctcccgggttcaagcaattctcctgtctcagcctcccgagtagctgggattacaggtgtgtgccaccacgcctggctaatttttctatttttagtagagacagggtttcaccatgttggtcagcctggtctcgaactcctgacctcgtgatccacccaccttggtctctcaaagtgctgggattaaaggtgtgagccaccgcgccctaattctaacaaaaacaaatcagtcatcgtttcccttcttccaggagactgtgcctgaggaaagcggggggcgtggctgcagttctggacgggctggccgagctgcgcgggatccttgtgcagggaagagctgccctgggcacctggcaccacaagaccatgttttctaagaaccattttgttcactgatacaaaaaaaaaaaaaggaattcatgatgctgtacagaattttatttttaaactgtcttttaaataatatattcttatacggaaatgggtactgtacttcttctttggtagagttgtgtatgctgcttccggtaagttctctcatggagacgaaggacactgtgcttttcccccagatgtatcttagagcaattgaccagtgtgatgcggtgcgtacgtccctgtaaattcagcattaaatgtcagcacggtgccctgagtgcaaggacatgcacgggtcctgtg

SEQ ID NO: 22379 - DNA, 2263 bp, Homo Sapiens
agccagagggacgagctagcccgacgatggcccaggggacattgatccgtgtgaccccagagcagcccacccatgccgtgtgtgtgctgggcaccttgactcagcttgacatctgcagctctgcccctgaggactgcacgtccttcagcatcaacgcctccccaggggtggtcgtggatattgcccacagccctccagccaagaagaaatccacaggttcctccacatggcccctggaccctggggtagaggtgaccctgacgatgaaagcggccagtggtagcacaggcgaccagaaggttcagatttcatactacggacccaagactccaccagtcaaagctctactctacctcaccgcggtggaaatctccctgtgcgcagacatcacccgcaccggcaaagtgaagccaaccagagctgtgaaagatcagaggacctggacctggggcccttgtggacagggtgccatcctgctggtgaactgtgacagagacaatctcgaatcttctgccatggactgcgaggatgatgaagtgcttgacagcgaagacctgcaggacatgtcgctgatgaccctgagcacgaagacccccaaggacttcttcacaaaccatacactggtgctccacgtggccaggtctgagatggacaaagtgagggtgtttcaggccacacggggcaaactgtcctccaagtgcagcgtagtcttgggtcccaagtggccctctcactacctgatggtccccggtggaaagcacaacatggacttctacgtggaggccctcgctttcccggacaccgacttcccggggctcattaccctcaccatctccctgctggacacgtccaacctggagctccccgaggctgtggtgttccaagacagcgtggtcttccgcgtggcgccctggatcatgacccccaacacccagcccccgcaggaggtgtacgcgtgcagtatttttgaaaatgaggacttcctgaagtcagtgactactctggccatgaaagccaagtgcaagctgaccatctgccctgaggaggagaacatggatgaccagtggatgcaggatgaaatggagatcggctacatccaagccccacacaaaacgctgcccgtggtcttcgactctccaaggaacagaggcctgaaggagtttcccatcaaacgagtgatgggtccagattttggctatgtaactcgagggccccaaacagggggtatcagtggactggactcctttgggaacctggaagtgagccccccagtcacagtcaggggcaaggaatacccgctgggcaggattctcttcggggacagctgttatcccagcaatgacagccggcagatgcaccaggccctgcaggacttcctcagtgcccagcaggtgcaggcccctgtgaagctctattctgactggctgtccgtgggccacgtggacgagttcctgagctttgtgccagcacccgacaggaagggcttccggctgctcctggccagccccaggtcctgctacaaactgttccaggagcagcagaatgagggccacggggaggccctgctgttcgaagggatcaagaaaaaaaaacagcagaaaataaagaacattctgtcaaacaagacattgagagaacataattcatttgtggagagatgcatcgactggaaccgcgagctgctgaagcgggagctgggcctggccgagagtgacatcattgacatcccgcagctcttcaagctcaaagagttctctaaggcggaagcttttttccccaacatggtgaacatgctggtgctagggaagcacctgggcatccccaagcccttcgggcccgtcatcaacggccgctgctgcctggaggagaaggtgtgttccctgctggagccactgggcctccagtgcaccttcatcaacgacttcttcacctaccacatcaggcatggggaggtgcactgcggcaccaacgtgcgcagaaagcccttctccttcaagtggtggaacatggtgccctgagcccatcttccctggcgtcctctccctcctggccagatgtcgctgggtcctctgcagtgtggcaagcaagagctcttgtgaatattgtggctccctgggggcggccagccctcccagcagtggcttgctttcttctcctgtgatgtcccagtttcccactctgaagatcccaacatggtcctagcactgcacactcagttctgctctaagaagctgcaataaagtttttttaagtcactttgtac

SEQ ID NO: 22380 - DNA, 4652 bp, Homo Sapiens
gggagaagctaggaaaaaatgtctttgagctgtgagatgcttgtatattttgaaaatatgattatatgcatgtgtttgtattttatgacttggataatctgaaaatcaatttgctttgtcaatgcttcctggattagaattccactatttggtccctatcctagtctactaaagaaaattgagcgggaaacatggcgggaaagtggcgtttcattaattgctactgtaactcgtctaatggagaggttgttagattacagaacttctataagactgaactgaacaaggaggagatgtatatacgctacattcacaaactctatgatctgcatctcaaagcacagaactttacagaagctgcatataccctcctcttatatgacgagctactggaatggtctgatcggcccctcagggagttcctgacctaccccatgcaaacagaatggcagcgcaaagagcacctgcacctcaccatcatccagaactttgacagaggcaaatgttgggagaatggcattatcttgtgccggaagattgcagagcagtatgagagttattatgactacagaaacctgagcaagatgcggatgatggaagcctctttgtatgacaaaattatggaccagcaacgtcttgaaccagagttcttcagagttggattttatggaaaaaaatttccatttttcttaagaaataaggagtttgtgtgtcgagggcatgactacgagaggctggaagccttccaacagagaatgctgaacgagttcccccatgccatcgccatgcagcacgccaaccagcccgatgagaccatcttccaggcagaagctcagtatttgcagatatatgctgtgactcccattccagagagccaggaggtcctgcagagagagggtgttccggacaacatcaaaagcttctataaagtgaatcacatctggaaattccgctatgaccgaccatttcacaaaggcacaaaagataaagagaatgaattcaagagtctctgggtggagagaacgtcattatacttggtgcagagtttgcctggcatctctcgctggtttgaagtggaaaagcgtgaagtggtagaaatgagtcctctggaaaatgcaattgaagtgctagaaaataagaatcagcagctgaagactctgattagtcagtgtcagacaagacagatgcagaatattaatcccctgactatgtgcctgaatggagttatagatgctgcagttaatggtggcgtttccaggtatcaagaggcattctttgtcaaagaatatatcttaagtcaccctgaagatggggagaaaattgcacgattaagagagctgatgcttgagcaggcacagattctggaatttggtttggccgtgcatgagaagtttgtacctcaagatatgagaccccttcacaaaaagctggttgaccaattctttgtgatgaagtcgagcttagggatacaggagttctctgcttgtatgcaagccagtcctgtccattttcctaatggaagccctcgtgtgtgtagaaactcagcacctgcttctgtgagcccagatggtaccagggtaattcctagacgcagcccgttaagttacccagctgtcaaccgatattcttcctcctcactgtcctcacaagcttctgctgaagtaagcaatattacagggcaatcagaaagctctgatgaagtctttaacatgcagccaagtccatctacctcaagcttgagttctactcactcggcttcacctaatgtgacaagttctgctccatcgagtgccagagcttctcctttgttgtctgacaaacacaaacattcccgagaaaactcttgcctgtcaccaagagagagaccatgcagtgccatctatccaacacctgtggagccttcgcagaggatgctgtttaatcatattggagacggggccttgccacgcagtgacccaaatctctctgcacctgaaaaagcttcaccagcaagacacacgacatcagtatccccctcgcctgccgggcgatctccattgaagggctctgtgcagtctttcaccccctctccagtggagtaccactcgccaggactcatctccaactcccctgtcttgtcgggcagctacagcagtgggatttcttctctcagccggtgcagcacgtcggaaacctcaggctttgaaaatcaggtgaatgaacagtcggcccccctgccggtgccagtgccggtgcccgtgccgagctacggcggggaggagccagtgcgcaaggagagcaagactccgcccccgtacagcgtctacgagcggactctgcggcgccccgtcccgctacctcacagcctctccatccccgtcacgtcggagccgcccgcgctgccccccaagcctctggcagcgcgatccagccacctggagaatggggcccggaggactgaccccggcccgcggcccaggcccctgccccgcaaggtctctcagttataagtcacttttctatgtacctgcgatgcattctttgcccgtttacaaaataagaagtatgatgagaagacatttagtgtaggcactttaataacttactcagctccttcgatgaatggaattaaaacttgcttattaaatatcatgttgcacaatattaaaagttgctgatctaaaacgccagatgttaaatgaagtatggctgaatttcattaaaacgtttctcatttggaagtggtaaatagtgataaagactccttttgtacctttttatgttcacttttttttatatagtttaatcttaaaaccaatacgatattgtcaaacgatacaatgtgtgacaatgttgtatcgtttttactgaatacttgatacttggagaaagcttattaagtcagtgcacatcctaacacagtggtccttattttagaagacttctgtaaataaggcaaggtttatcagtgcagatcatcagaattaaagttcaagcaggcgagcaagacagtatacttaaggggttgcaaagcttgggactggaaattgttttgttcttgaaacaaaatacttctttaaggttgcttttgctgtttgactgctgtctacattcgtaaaattctattttgtgaattggtagctaaatcccttactaccctgacaccgtggtatctactgtatttcttttcaaggtgcaatttgcttcagagttccaatcagctagattaagcaagaggctccagaagaaatgtttacttgaattttgcgcttcctttcttgatagtttcctatataaaatttgtcattgaacaagagcaaatgctgaagtattaatgaggcacaaatgactgtgccccattagcaagaattcaggaatcaatacagacagtattaaattaatagcttaagtgaagaaaaaaaaaaacttagtgaaaatgtattagcacgattaaatggcaaaaggacttataaaaggcaagggcattaactttcagtcctgcacaaaataaaaaattcctcacgactctccacttttaccagtggagtttgtcttagctgacctgtcgtctttctcttgaaggaggattgctgtagacttctctagcttgaatattgcaacatagcatcttaggtctagatagggatgctaatgccagttgtagaagtgtgaaaaaagcaccttgtatgtagtaatgtattttatatctttgttttttcttttactgactgtttataacactcaattgacaatagatatgaactgtattttaaatcatactgttaaatattttccctcttttgttgggaagctcattttagtttaaccatgtttgttttgttggtagcttacctggaaggcagtgaccacttttttatattctcttaatgaaaccattcagcaggtatatgctgttgaggctggttatagaggttttctataataaatgttcaagtatttttgtatataactggttaattttaataagagataccattatgtgtaaaaaaaagtaaaaataaacgcaaacagttgttgatgcagtatgattgttataattatgccaaatactttacgtatggaaaaagaatatttgtacatatgtgcttttaacaattctgccatattgactttacaattttgaatgtcggaaaaattaatatatgttaaatatttatgtttagtgaaagtgttcataattgagaaaaggaacatatgcattttagctttgtatcttgcaagttttgcagtcagaaattttttgaactagcttttgcttttgataacacttcgtgtttgtaaccacattcatatatatatacatatatatgtgaagctccatatttctgttgctttaaagaagtaaaaccttccatttaaataagatgacatgcataagataacaaagcttccttgatttccttttcctgtgtaatttaatagatttgttgactagtgcttgggcacattataaatcagtgttatttgctcttggagccattttttaaaaaaaattttggcagtgagcagttgaatttatcttgaatttatcatgtgtgtgtatttctgaagcagctacatagcagaacattttaagagattctgttagcccacatgttcatgttggttgctgctgaatggtaaatattaaataaaattaccagattaatctt

SEQ ID NO: 22381 - DNA, 4300 bp, Homo Sapiens
gcattgattcctctgctccattcctgcccctctctgccccctccctctgtcctatatatcttcacttctctcctttctccccatcctgtgttctgggagagtggcctcaagttggggcttggctgggagaagtgcagagtgaagggatcaggactgaaatgagttgggaggaggataagcaatcaggatctcaggaaacttctagatctttttctagtttcaattctgcccttaatctatcccttccctttcccagggccttctcacagcccaccactgctccctgaagttccctgtctccattctctagcacgtgaaatcgctaaagaacattctccacttcctgaccatggttcccatggagatagtgatcccctcctcttcacccccagggcaggttgtttccatgggaactgtctaccctgctataggagaaggctatgacctcccgcagaccctctgactcctttagtagctgatttcttgtcctcaaccacccgcctcctgtaaggtgctcctatagggggtggaaaaggtgatggtgctggggtgtgagttgtctgggtcaacaagggttgttgtgggagtagaggccctgctcacaggtgcttcctctcctctccctggggtggggccagccaacaagcacaagccatggattgaggcagagtaccagggcatcgtcatggagaatgacaacacggtcctactgaatccaccactctttgccttggacaaggatgccccgctgcgctatgcaggtgagatctgcggcttccggctccatgggtctggggtgccctttgaggctgtgatccttgacaaggcgacaggagaggggctgatccgggccaaggagcctgtggactgcgaggcccagaaggaacacaccttcaccatccaggcctatgactgtggcgagggccccgacggggccaacaccaagaagtcccacaaggccactgtgcatgtgcgggtcaacgatgtgaacgagtttgccccagtgtttgtggaacggctgtatcgtgcggctgtgacagaggggaagctgtacgatcgcatcctgcgggtggaagccattgacggtgactgctccccccagtacagccagatctgctactatgagattctcacacccaacacccctttcctcattgacaatgacgggaacattgagaacacagagaagctgcagtacagtggtgagaggctctataagtttacagtgacagcttatgactgtgggaagaagcgggcagcagatgatgctgaggtggagattcaggtgaagcccacctgtaaacccagctggcaaggctggaacaaaaggatcgaatatgcaccaggtgctgggagcttggctttgttccctggtatccgcctggagacctgtgatgaaccactctggaacattcaggccaccatagagctgcagaccagccatgtggccaagggctgtgaccgtgacaactactcagagcgggcgctgcggaaactctgtggtgctgccactggggaggtggatctgttgcccatgcctggccccaatgccaactggacagcaggactctcggtgcactacagccaggacagcagcctgatctactggttcaatggcacccaggctgtgcaggtgcccctgggtggccccagtgggctgggctctgggccccaggacagcctcagtgaccacttcaccctgtccttctggatgaagcatggcgtaactcccaacaagggcaagaaggaagaggaaaccatcgtatgtaacactgtccagaatgaggacggcttctctcactactcgctgactgtccacggctgtaggattgccttcctctactggcccctgcttgagagtgcccgcccagtcaagttcctctggaagctggagcaggtctgtgatgatgagtggcaccactacgctctgaacctcgagttccccacagtcacactctataccgacggcatctccttcgaccctgccctcatccatgacaatggcctcatccacccaccccgaagggagcctgctctcatgattggggcctgctggactgaggagaagaacaaagagaaggaaaagggagacaacagtacagacaccacccaaggagaccctttgtcgatccaccactacttccatggctacctggctggtttcagcgtgcgctcaggtcgcctggagagccgcgaggtcatcgagtgcctctatgcatgtcgggaggggctggactatagggatttcgagagcctgggcaaaggcatgaaggtccacgtgaacccctcacagtccctgctcaccctggagggggatgatgtggagaccttcaaccatgccctgcagcatgtggcttacatgaacactctgcgctttgccacgcccggcgtcaggcccctgcgcctcaccactgctgtcaagtgcttcagcgaagagtcctgcgtctccatccctgaagtggagggctacgtggtcgtccttcagcctgacgccccccagatcctgctgagtggcactgctcattttgcccgcccagctgtggactttgagggaaccaacggcgtccctttgttccctgatcttcaaatcacctgctccatttctcaccaggtggaggccaaaaaggatgagagttggcagggcacagtgacagacacacgcatgtcggatgagattgtgcacaacctggatggctgtgaaatttctctggtgggggatgacctggatcccgagcgggaaagcctgctcctggacacaacctctctgcagcagcgggggctggagctcaccaacacatctgcctacctcactattgctggggtggagagcatcactgtgtatgaagagatcctgaggcaggctcgttatcggctgcgacacggagctgccctctacaccaggaagttccggctttcctgctcggaaatgaatggccgttactccagcaatgaattcatcgtggaggtcaatgtcctgcacagcatgaaccgggttgcccaccccagccacgtgctcagctcccagcagttcctgcaccgtggtcaccagcccccgcctgagatggctggacacagcctagccagctcccacagaaactccatgatacccagcgccgcaaccctcatcattgtggtgtgcgtgggcttcctggtgctcatggtcgtcctgggcctggtgcgcatccattcccttcaccgccgcgtctcaggggccggcgggcctccaggggcctccagtgaccccaaggacccagacctcttctgggatgactcagctctcaccatcattgtgaaccccatggagtcctaccagaatcggcagtcctgtgtgacgggggctgttgggggccagcaggaggatgaggacagcagtgactcggaggtggccgattcccccagcagcgacgagagacgcatcatcgagacccccccacaccgctactaaggcctacacctctccccacgcagagggggaattctgccctggtgaaacagacactccagacatgggagaaggactttctgggaacacagagaccaagagggagagaggcttcagaaccagtcctcctttcatttcaaaaccccagcgggccctctggagtccgccctgcccctcccccggccccccatccctcacttctgggctgtcatgctcctggtgtgccccttgcactggggctggctgggttggaaagtgggctggacttcagctgcctttctacccccaatggcagctgcccccttagcactcactgtgttggggagagggtgacgattgcaatggctggggctggggctggggctgggggtgggattgaaggaaaccctctcctctccccttcccttctctctcctgtccatgggaagcttttccccctctgcagggctccctcagctggaccatcgtccctgcttctcttatgatcgccccacctcatttccatttcagtctggggaccccatttctccctcctttccaacttccttcctttcttgtcctgtttcccttcctgcccttgcagtcctgaggtcctgcagccccggcccctcctccgtgacctggtgtggccaggctgcggggacgggaggggacgtgggggccccgggtgtacatatataatgtatattttttcaatgttgtcgtgagtgcagcccatgttcctgcgtgcagctcacggccttgtgtgtatgtgtgtgtgtgtgtgtgtgaggcatcgtcatgtcctggggcaggggcggggggttgggtgtggtgagggaggggacatatcctagggttttcaaataaaacaatcag

SEQ ID NO: 22382 - DNA, 5460 bp, Homo Sapiens
gattctcaagtgcaacctggccgagggccacaaaaagtttagctaagggaggcttcagtgagaagcagcacccccttggggacacagcctgcactgtggaaatgccacctctctccccttgcctgagtgaagagctgttagatccagaattgcatgttctcataacccccagcctgagagagaaaacagagtctgagctaaagtttgaggaggatgagcgatggattatgatggaggctgagggagagtgggaggaagagaaactgtcagacagggaaaagacttttctgatggcagatgagaagaacagcctggcagatatttttgaagaaagagaacaagcaaacacagcagtggtggaggatggatccgattgcttagctgctgtcttgaggacttttggccacctatctcttggtcagatttgttgccctgatgacccacagccagccaaggaccagttggctactgttcccaaggatatacccctggattgcgattgtgttcttacaggtgaggatattctcggtgaggtggcaaacagaactgctcaggggttagagggacttgtttcagattcagcatgtactgtgggtactattgatgcagaacagctctctgacacagactcagtgcagatgtttcttgaacttgaaaaggagtgtttatgtgaagaaggagtaactcctctagttgagctacagaatcaaatctcttctgaagggctggctgcatcccaggatgcagaaaatttactcgtaattagtcatttttcaggggctgccttagaaaaggaacagcatttaggccttttacatgtaagggcaaaagattatgatactagattggattgtggatattttaataccctggattcttctcaggtgcctaatgctgtggaacttattgcccacgttgatatcatgagagacacttccactgttagcaaggaggaatgtgaaaaagtgccttttagccccaggactgcagaatttaagtccagacagccagctgatctggattcactggaaaagctggacccaggaggactgctgaactctgatcacagggtttctcatgaagaaaaattatcaggcttcattgcttctgagctggccaaagacaatggcagtttgtcccagggagactgcagtcaaactgaggggaatggtgaggagtgcattgagagggtcaccttcagttttgcttttaatcatgaactaacagatgttacctcaggacctgaagtagaggtgttatatgaatcaaatttactaacagatgaaattcatttggaaagtgggaatgtaactgttaatcaagaaaataacagtctgacatcaatgggaaatgtggtcacttgtgaattgtctgtggagaaagtttgtgatgaggatggtgaggcaaaagagctggattatcaagccacacttttggaggatcaagctccagcacatttccacagaaacttcccagagcaggtcttccaggatctccagaggaagtccccagagtcagagattctgagtctgcacctgctggttgaagaactgagacttaatccagatggagtggaaactgtgaatgatacaaagcctgagctgaatgtggcatcatcagagggaggggagatggaaaggagagattcagattcattcctaaatatttttccagagaaacaagttaccaaggctggtaatactgaaccagttttagaggaatggatacccgtcctccagagaccttcccggactgctgcagtacccactgtcaaagatgccctagatgctgcactgcccagcccagaggagggtacctcaattgctgcagtgcctgccccagagggaactgctgtagttgctgctttagtgccctttccacatgaggacatcctagttgcttcaatagtctccttagaggaggaggatgtcacagctgctgcagtatcagccccagagagggctactgtcccagctgttacagtatctgtccctgaagggactgctgcagttgctgcagtgtcctccccagaggagactgctccagctgttgcagcagccatcacacaggagggtatgtcagctgtcgcagggttctccccagagtgggctgctttagctattacagtacccatcacagaggaggatggtacaccagaagggcctgtcaccccagctaccacagtgcatgctccagaggagcctgatactgcagctgtcagagtgtccaccccagaggagcccgcctccccagctgctgcagtgcccaccccagaggagcccacctccccagctgctgcagtgcccaccccagaggagcccacctccccagctgctgcagtgccccccccagaggagcccacctccccagctgctgcagtgcccaccccagaggagcccacctccccagctgctgcagtgcccaccccagaggagcccacctccccagctgctgcagtgcccaccccagaggagcccacctccccagctgctgcagtgcccaccccagaggagcccacctccccagctgctgcagtgcccaccccagaggagcccacctccccagctgctgcagtgcccaccccagaggagcccgcctccccagctgctgcagtgcccaccccagaggagcccgcctccccagctgctgcagtgcccaccccagaggagcctgccttcccagctcctgcagtgcccaccccagaggaatccgcctccgcagctgttgcagtgcccacccccgaggaatctgcctccccagctgctgcagtgcccaccccagcagaatctgcctcctttgcagctgtggtggccaccctggaggaacccacttccccggcagcttcagtgcccacccctgcagctatggtggccaccctagaggaattcacttccccggcagcttcagtgcccacctctgaggagcctgcctccctagcagctgcagtgtccaacccagaggagcccacctccccagcagcagcagtgcccaccctagaggaacccacctcctcagcagctgcagtgctcaccccagaggaactcagttccccagcagcttcagtgcccacccccgaggagcctgcctccccagcagctgcagtgtccaacctagaggagcccgcctccccagcagcagcagtgcccaccccagaggtggctgccatccctgctgcttcagtgcccaccccagaggtgcctgccatcccagctgctgcagtgcctcctatggaggaagtttcccccattggtgtgcccttcctgggagtttctgcccacactgactcagtgcctatttcagaagaaggaacacctgttctagaggaggcttcctccactggaatgtggatcaaggaggaccttgattccctagtatttggcataaaagaggtgaccagcacagtgctacatgggaaagtgcctctggctgcaaccgctggattaaattcagatgaggtaattgtccattttgattctgggaagggtctaaagagtaaagtgagatttgcagggctgacctggtggtgatgagaaatggcacagatagttcttttgttctttttgggtctcccgggcttatagtttgtagtctttctgttcagtttttggggaaaatatactttaattttgtctggtgaaagactttataatttcatgcttcgttttttattcagataagccaatcccacggaaaacagggatataaacagttgttgatttacatttttaaaaagattattagcaggaaagggtcattctgtttttgaattatacagtgagcatgttcttgcctaaaccaagagacagtttattcattggtggtgtcaacatttaggtagaggccagagtgtgagctttggaatgagacctggggtgcttcctaaccactctgggaaaattagttagctattcttgagtttcctgtttcttcatttgttaaggcataactctgtgaggataaaatgagatacatttaaggtaccaagcgtataagattaccaatcactggccatatcctccccattcttttcaaataggtatgttggttggttgaaagaatttaccaaagtagattggagagaagcaataaagctaaatgattaagaacttttaaatgcaaatatgtgtttctgaaaaccagagctaggcataatgtttatgaaaaatagagatattttagtcatctttgtcaaactgcctttgtgtccttaagcaagtcattttcctttccaggacctcatttcttcattataaaacaagaaaattgggctaaatgtcctcttgggtctctcttggctctaagattctttttattttttttttttggatggagtctggctctgtcagtcaggctggagtgctagagtgcagtggtgcgatctcggctcactgcaggctccgcctcccgggttcacgccgttctcctgcctcagcctcccgagtggctgggactgcgggcgcccgccactacgcccggcaattttttgtatatatatatatataattttttttttttttttttggtggagacgggtttcactgtgttggccaggatggtctcgatctcctgacctcatgatctgcccgcctcggcctcccagagtgctgggattgcaggcgtgagccaccgcgcccagccggctctaagattcttaatgttagagaaccgaatgtgttaggaaacagttggaaacgatgttccacatccttgagcactcctagtccaaggaatttgagatcagcagctttccacagttaattacccaggtttgatttggtcagtggtaaagagtgcaggagttagaggtttaatctgaacacaagagatgactgagtgagaagattgttttgattttactgcgcccctaggactcaaaatagtgccttcttcatagcaggcatttgctgttgactgactgactgaatgcatgaatatcaatttcctagactatggatggatgctacaagaaagatgggttttctcattcacctcactgcagagcctttcagggcagccttaagtcagctagagcaccagctaaacatgcaggtcctgacaacaaaatcattttgattgcatgccataaactctttgattaagaggattgattaagataatctggccttgctgagtggtggtggttttaccttgagctttaccagttattttgtcaggtagcattccattaaattaggatgcatcatctttgagactgatggatttttgattcatttttccgagttttattgaatttggaatgacaccgagatcccaatagcctgtacaaagtgaagacagtaggtcaacaacagagccattcttgataatacagaatatttcacaccaggcacagtggctcacacctctaatcccaacatttgggaagccaagggaagaggattgcttgaggccaggagttcgagaacagcctaggcaacatagtaagaccccatctctgag

SEQ ID NO: 22383 - DNA, 4248 bp, Homo Sapiens
atggaggatgaatcaatttacacctgcgatcactgtcagcaggacttcgagtctctggcagacctgacggaccaccgggcccaccgctgtcctggagatggtgatgacgacccacaactctcctgggtggcctcgtctccctccagcaaggatgttgcgtcacccacgcagatgatcggagatggttgtgacctcggcctcggcgaggaggaagggggcacgggcctgccatacccttgccagttctgcgacaagtccttcatccgcttgagctacttgaagaggcacgagcagatccacagcgacaagctgccgttcaagtgcacctactgcagccgcctcttcaagcacaagaggagccgcgaccggcacatcaagctgcatacgggcgacaagaagtatcactgccacgagtgcgaggcagccttctcccgcagcgaccacctcaagatccacctgaagacccacagctccagcaagcccttcaagtgcactgtgtgcaagcgcggcttctcctccaccagctcgctgcagagccacatgcaggcccacaaaaagaacaaggagcatctggccaagtcggagaaggaagccaagaaggacgacttcatgtgcgactactgcgaggacaccttcagccagacggaggagctggagaagcacgtgctcacccgccacccgcagctgtccgagaaggcggacctgcagtgcattcactgccctgaggtcttcgtcgacgagaacacactgctcgcccatatccaccaagcccacgccaaccagaaacacaagtgccccatgtgccctgagcagttctcctcagtggaaggtgtctactgccacctggacagccaccggcagcccgactccagcaaccacagtgtcagtcccgaccctgtactgggcagcgtggcctccatgagcagcgccacacccgactccagcgcctctgtggagcgtggctccaccccggactccaccttgaagccgctgcgggggcagaagaagatgcgggatgacgggcagggctggaccaaggtggtctatagctgcccctattgttccaagcgggactttaacagcctggccgtgctggagatccacctgaagaccatccacgcggacaagccccagcagagccacacatgtcagatctgcctggactccatgcccaccctctacaacctcaacgagcacgttcgcaagctgcacaagaaccatgcctaccctgtgatgcagtttggcaacatctctgccttccactgcaactactgccccgagatgttcgccgacatcaatagcctgcaggagcacatccgcgtctcccactgcggccccaacgccaacccctctgacggtaataatgctttcttctgcaaccagtgctccatgggtttccttactgagtcctccctcaccgagcacatccagcaggcccactgcagtgtgggcagtgccaaactagagtctccggtggtgcagcccacgcagtccttcatggaggtctattcctgcccctactgcaccaactcccccatctttggctccatcctgaaactcaccaagcacatcaaggagaaccacaagaacattccactggcccacagcaagaagtccaaggccgagcagagcccagtctcgtccgatgtggaggtgtcttccccgaagcggcagcggctctcagcaagcgccaactccatctccaatggggagtatccttgcaatcaatgcgacctcaagttctccaactttgagagcttccagacccacctgaagctgcacctggagctgctgctgcggaagcaagcgtgcccccagtgcaaagaggactttgactcccaggagtccctcctgcagcacctgacagtgcattacatgaccacgtcgacccactatgtgtgcgagagctgcgacaagcaattttcctcggtggatgacctgcagaagcacctgctggacatgcacacctttgtgttgtaccactgcaccctgtgtcaggaggtcttcgactccaaggtgtccatccaggtgcacctggcggtgaagcacagcaatgagaagaagatgtaccgctgcacggcctgcaactgggacttccgcaaggaggctgacctgcaggtgcacgtcaaacacagccacctgggcaacccggccaaggctcacaagtgcatcttctgtggggagaccttcagcaccgaggtggagctgcagtgccacatcaccacacacagcaagaagtataactgtaagttctgcagcaaggccttccacgccatcatcctgctggagaagcacctgcgggagaagcactgtgtgtttgatgctgcgaccgagaacggcacggccaatggggtacccccaatggccaccaagaaagctgagcctgctgacctgcagggcatgctgcttaagaaccctgaggcacctaacagccatgaggccagcgaggatgacgtggacgcgtcggagcccatgtacggctgtgacatctgcggggcggcctacaccatggaggtgctgctgcagaatcaccggctgcgggaccacaatatccggccgggcgaggatgatggctcacgcaagaaggctgagtttatcaagggcagtcacaagtgcaacgtttgttcacggactttcttctcggagaacgggctacgggagcacctgcagacgcaccggggccctgccaagcactacatgtgtcccatctgtggtgagcgcttcccttcgctgctgacgctcaccgaacacaaggtgacccacagcaagagcctggacacgggcacctgtcgcatctgcaagatgcccctgcagagcgaggaggagtttattgagcactgccagatgcaccctgacctgcgcaactcactcacgggcttccgctgtgtggtctgcatgcagacagtcacttccacgcttgagctcaagatccatggcaccttccacatgcagaagctggcgggcagctcagcggcgtcctcccccaatggccaggggctgcagaagctctacaagtgcgccctgtgcctcaaggagttccgcagcaagcaggacctggtgaagcttgacgtcaatgggctgccctacggcctctgcgccggctgcatggcccgcagcgccaacggacaggtgggtggcctggccccgcccgagcccgccgaccggccctgtgccggcctccgttgccccgagtgcagtgtcaagtttgagagtgccgaagacctggagagccacatgcaggtggaccaccgtgacctcacgccggagaccagtgggccccggaaaggcacccagacatcgccagtgccccggaaaaagacataccagtgcatcaagtgccagatgaccttcgagaacgagagagagatccaaatccacgttgccaaccacatgattgaggaaggcatcaaccacgagtgtaagctgtgcaaccagatgttcgactccccggccaagctcctctgtcacctcattgagcacagcttcgagggcatgggcggcaccttcaaatgccccgtgtgtttcacagtcttcgtccaggccaacaagttgcagcagcacatctttgccgtgcacgggcaggaggacaagatctacgactgctcacagtgccctcagaagttcttcttccagaccgagctgcagaaccacacgatgagccagcacgcacagtgagggatcgctcaacaggacacctctccgcagaaggcttgccggagacgccgtggggagggccatttgaacattacatccaatcaaagtgtcatttgcaacccagatgtaaaactctaatgatttggccatgaggcgctgctattataagcagctggaaatgaatattaatggcagagattaaaagtattccatgctcagtattttttattgtcctgctacagctagtgtgcttttagactttccgccgcagactacatttctagagttagagaaacctgctttttaaggctattgtcctttgttccttcatgtattatattgatagtttttaaaaaagaattagtgtgattttttttctttgcttcttttttttctttcttgtttttcttcccccccacccccccacccccttcggttaactactttttaattgcaattctaggtaattgtgcatcgtgatgtgattgcttggctattgtctgaatatttccttttaattttttaattaaagactaatgctttgattggatttgccagttcaccggacagtgattaaaactatgtaatgaatat

SEQ ID NO: 22384 - DNA, 5332 bp, Homo Sapiens
ggcgaaggaggtggtggctgcgttgggctccgggaagccgttcgggctggggctgtcggccgcggggcggaggcactcgcgcggggggtaattcggggtctgggttctggtgccgcgcagctttccccggtgtgtgtggtttcagcgcagcatggctgtggtcatccgtttgcaaggtctcccaattgtggcggggaccatggacattcgccacttcttctctggattgaccattcctgatgggggcgtgcatattgtagggggtgaactgggtgaggctttcatcgtttttgccactgatgaagatgcaaggcttggtatgatgcgcacaggtggtacaattaaagggtcaaaagtaacactattgttgagtagtaagacggaaatgcagaatatgattgaactgagtcgtaggcgttttgaaactgccaacttagatataccaccagcaaatgccagtagatcaggaccaccacctagctcaggaatgagtagcagggtaaacttgcccacaacagtatccaactttaataatccatcacccagtgtagttactgccaccacttctgttcatgaaagcaacaaaaacatacagacattttccacagccagcgtaggaacagctcctccaaatatgggggcttcctttgggagcccaacgtttagctcaactgttccaagcacagcctctccaatgaacacagtcccgccgccaccaattcctccaattccagcgatgccatctctgccaccaatgccatccattcccccaattccagttcctcctccagtacctacattgcctcctgtgcctcctgtgcccccgattcccccagttccttctgtgccacccatgaccccactgccacccatgtcgggcatgccgcccttgaatccgccacctgtggcacctctacctgctggaatgaatggctctggagcacctatgaatttgaacaataatctgaatcctatgtttcttggtccgttgaatcctgttaaccctatccagatgaactctcagagcagtgtgaagccactccccatcaaccctgatgatctgtatgtcagtgtgcatggaatgcccttttctgcaatggaaaatgatgtcagagatttttttcatgggctccgtgttgatgcagtgcatttgttgaaagatcatgtaggtcgaaataatgggaatggattggttaagtttctctcccctcaagatacatttgaagctttgaaacgaaacagaatgctgatgattcaacgctatgtggaagttagccctgccacagaaagacagtgggtagctgctggaggccatatcacttttaagcaaaatatgggaccttctggacaaactcatccccctcctcagacacttcccaggtcaaaatcgcccagtgggcagaaaagatcaaggtcaagatcaccacatgaggctggtttttgtgtttacttgaaagggctaccatttgaagcagaaaacaaacatgtcattgatttttttaaaaagctggatattgtggaagatagtatttatatagcttatggacccaatgggaaagcaactggcgaaggctttgtagagttcagaaatgaggctgactataaggctgctctgtgtcgtcataaacagtacatgggcaatcgctttattcaagttcatccaattactaagaaaggtatgctagaaaagatagatatgattcgaaaaagactgcagaacttcagctatgaccagagggaaatgatactaaatccagagggggatgtcaactctgccaaagtctgtgcccacataacaaatattccattcagcattacaaagatggatgttcttcagttcctagaaggaatcccagtggatgaaaatgctgtacatgttcttgttgataacaatgggcaaggtctaggacaggcattggttcagtttaaaaatgaagatgatgcacgtaagtctgaacgcttacaccgtaaaaaacttaatgggagagaagcttttgttcatgtagttaccctagaagatatgagagagattgagaaaaatccccctgcccaaggaaaaaagggattaaagatgcctgtgccaggtaatcctgcagttccaggaatgcccaatgcgggactgcccggtgtgggactgcccagtgcaggacttcccggtgcaggcctgcccagcacaggactgcctggttcagcaataaccagtgcaggactgcctggtgcgggaatgcccagtgcaggaatacctagtgcaggaggtgaagagcatgccttcctgactgtaggatcaaaggaagccaataatgggcctccatttaactttcctggtaattttggtggatcaaatgcctttgggccaccaatccctcctccaggattaggaggcggggcctttggtgatgctaggcctggtatgccttcagttggaaacagtggtttgcctggtctaggactggatgttccgggttttggaggtggaccaaacaatttaagtgggccatcgggatttggagggggccctcagaattttggaaatggccctggtagcttaggcggtcccccggggtttggaagtggccctcctggtcttggaagtgcccctgggcatttgggtgggccaccagcttttgggcctggccccggccccggccccggccctggcccaatccatattggtggtccccctggctttgcatctagttctggaaaaccaggaccgacagtaattaaagtgcaaaacatgccctttactgtgtctattgatgagattttagatttcttttatggctatcaagtaatcccaggctcagtgtgtttaaaatacaatgaaaaaggtatgcccacaggtgaagccatggtggcctttgagtctcgggatgaagccacagctgctgtcattgacttaaatgacaggcctataggttcaagaaaagtaaaacttgtattagggtagccattcacatcattttttatagggtagatcttcatattgctgtgattaatgcatccagattgttttcctagtatttccaggttagaacctgtggattgtttcaattgcatatagcttggtttccataacatagagcattggttgactgtttacagaagactcactcaccaggataaacattgctgtatgttacagtaaagctatctggagagaacacataaatgattttggcataccattagagaaaccatttgtaaaactcaaatgaccacataaagcttatcaaggagtctagattggttttgttttataccatatgggatgaagaaaatagaaatgtcagtagaactcattgagggtgctcttgccagctgctgaaaatagaagttggctactctcagaatttggtttaaagctggacagatttgctttgttatagggtaaagctttgtctaaagtcctcattttcttttaaaattgaataaaatttctgtatacagattcattgtatgtacctttattgcttcttaagggtccttgctgtatagacagtcctgcttcagaagttgctgctttgtttgtctaattgactcatttgtaaatgagcagaactgttttgttggtttttttccctaaatataaaagtccacacttcgtttgtgctataacctcaaactttgatttctaatgtcacacttaaaactgtgtggaataagacttttgccataaaaataaactatggagtcctttatctaccagagcctttttggtttgaccgccacgatttaggttagtcagtttaaaaattgttcatgttgtttggatggtatcgaaaaccagaaaccacttttaataatgtgtttaagatacttgatttgaagtccttttcatatggactaattgtagtatcaatttcctcctgtcccgattatgtgaaattttggcctttaaacaaagaggggcccattcataagaaagtgttatatctaggtttttaaaactgaagttgaaattatctttgttagcagtagtagtatagaataaaagatccgtatgctggttcgtagattgatacgtgttagtcctgttatttggaggctttttggcatagttgttcgatcaggagcctgtttactaaaagtcttcatacagagtacaagtgcagccgccagaggagaaaattgagattcttgaccctttcatactcttttctttggtattcaggacactaaggcaggaggaccacatgagttctggttggtaagtgtccttgtcatgaaaacacttgccttacaaggctctaattatgatttccctagtcagtgctctgaagatgtgtcacattatattataaacaatacggaaggggagataggtgagatgatatgaaaaacaaattttctcactgtcataaaaggctctaattatggttactttccttgtgatgaaaaacttggccttacagggctctagttatggttactttccctagtcaatgctctgaaaatgtgtcacattataaacaatacagaaggagagatagatgagagatcatgaaaaccaaattttatcttttacatggcccctttgtcttcgtttgaaacatccccaacatttcctacaaatcagcgtagttacaaaggggtcagtcttttaaaataagtatttcctattaaactatatatatatacagtgcctttttggtgttgtgagtcagtggaacactgaaatacagcggttgtgtaatttaagagtggcaacagtttcatttgataagatttgaaaaggctttttatcactacaatcttagaggattgacagtacaggatttttgtttaagagaaggattgtttagactcaagaggtgactatgttgtgggtcttttgataattcatgaatacagatttgctttgaccgatcactagatactgcctcctcaatttcaaaagcaatataacgtttgtatatgctgtttaatttaagttaatgttaagtaatcatttctcattccaaagacaatgcaaaaaacttcagcactgcttgagagttgtatttcagccacagatattttctccattggaaagctattttcattttagaaaaatgggttgtttgaagatgaaagtcttttatcttttttcacaatttattttggttatatgttcgtacattcttattaaatatttcatacactttattgcaactactttgttatttctacatcttagataaatgctgaaaaggaaaacgatttcattgttcatctaattaaataaattaaaagagcggtttgtgtagaaattggagagaactatgttttatatgaatcacaacagtgctcgttgtggactgtaattaaatgctttgccctctggaacttg

SEQ ID NO: 22385 - DNA, 4656 bp, Homo Sapiens
aagatggctgcccacgggggctccgcggcgtcctcggcgctgaaggggttaattcaacagttcaccaccattaccggtgcaagtgaaagtgtaggaaaacatatgcttgaagcgtgcaacaataatctggaaatggcagtcactatgtttttggatggtggaggaatcgctgaagagcccagtaccagttcagcaagtgtctctactgtcagaccacacacagaagaagaagttcgtgccccaattcctcaaaagcaggaaatactggtggaaccagaaccattatttggtgctcctaaaagacgacggcctgcacgttcaatttttgatggtttccgggattttcagactgaaactattcggcaagaacaagaattaagaaatggaggagctatcgataagaaattaactacccttgcagatctattccggccacccattgatttgatgcataaaggcagctttgaaacagccaaagagtgtggccagatgcaaaataagtggctgatgataaacattcaaaatgttcaagactttgcatgtcagtgcctcaaccgcgatgtgtggagcaacgaagctgtgaagaatattatccgggaacatttcattttctggcaggtttatcatgacagtgaggaaggtcagagatacatacagttttataagttaggggatttcccctatgtttccatattggacccacggacaggtcagaagctagtagaatggcaccagttagatgtatcttctttcttggaccaagtgacgggatttctgggtgaacatggacaactggatggactttctagcagtccccccaaaaaatgtgcccgttcagagagccttatagatgcaagtgaagacagccagctagaagctgccatcagagcctccttacaagaaacacattttgattcaacacagacaaaacaggatagccgctcagatgaagaatctgaatctgaacttttttctggcagtgaggagttcatatccgtttgtggctctgatgaagaagaagaggtagagaatcttgccaagtccagaaagtctccccacaaagatttggggcatagaaaagaggagaatagaaggccgctgactgagccaccagtcagaactgatcctggaacagccacaaaccaccaaggattgccagctgtggattcagagatactggagatgccacctgaaaaagcagatggagtagtggaggggatagatgtaaatggaccaaaagcacagctgatgttgcggtatccagatggaaaaagggaacagatcactcttccagagcaagctaaactgctagctttggtgaagcacgtgcagtctaaaggatacccaaatgaacgttttgaacttctcaccaactttcctcgaaggaaattatctcatctggactatgatattacattgcaagaggcaggcctttgtcctcaagagactgtctttgtacaggaaagaaattaacaccatggcttgacctctctcagcttaccccttttttcccttttcctgtgagatacatgtcactaagtatgcattttggctcataggaccacagagccaaagttgggcaagcaagtcaccttccttctcttatttcttgatctctcctataatcagtctctttctccccctttgtttctttctcctcttctgttttctcgctccccactccgtacccttctgcctccccctccccccacacttttctttcttacctaatctggtgaccaaactgaagtgtaaggataagacctctcctagtactagcagcaggaattgtgtgttccagtaagtggtctcttgcacggcacttttttgggatcaaatgttaacgttactccccagactcttcgggcaaaggaatggctagattcagagtaagaacaaccctcccttttttgtaagtccccgtgtttagcagggagaagaaattctctaacatgggtttggttttgttgtgttcttcatgtggaaatgtcgcttaacaaaatatccaggcttttgtttacgtggaaaaagcatcccttgtaatgattgctcatcatacttaaaaacctttttcaaaggattttcatgttcccagctataaggactatttccatgacgtgttattggcagaatgagtgttaaatatggagcatatagcatggggtgactttcattgtcctaacctgagacagttttccttattactctgtattgatcctgctagtccaagaatggacatgaagtgaacctatcgtggtgactgggataggaaggtgcttgctatttttgccagcacagcatattagttcctttggagccctccattgtctgagtctgcagtgatctgtaggaaggcagctggtcaataatcatgtagtacaatggcttggaattgtaaccactatggttattgattgtcctgtgttgtttcaggcatacttaggtatgtccctggggaaaaagaaaaccattcagctgagagttgctaaccatgttcttttggttagaaataatggttcattttttgcccctggttggaatagtctctaaaaggctctggtgactgaattgaacatgagtccgcatgctgttttctttcaaaaggtatcaaaacggaaagcctctctaaggggaagacctttcaactccattcagaagacaacatttagtaaggaggatggcggaggttactagtaattttcagatgtcttgggctttttctgccaacaaaacccaaaatcaaattagagttggtgaaagctttcttcagtgtttttagaagaggccatcttgaatctgtagaataccatttacacatcaacttcaccctatgctcatttcgtattttgagcttaaatggagtcctctgaagggggggtagtcgtgattctggtggcaaaactagaacttttaacttgtaaaatgaaaaatattaaatggacctttttgtcagttgaggatttagattgattcttttatctgaggagcgtatgttcctcagatgttgcgtagagacctttaggttttcatctactttaagattgctctcttggcaattaggggatttgggaaaagaagaaaaaaagatgccatgtgttgctagtacacagttataggatatggtttctaatggttgaattttgaggaactctccctaaagaatgagttttatatctcctcaaggaaatcatggaaaaatctgtttattcttcagtgagtccttttgaattaatgttcttaaatttttttctaagtctgtgtaagtgcttatgtataagtatataattgtataaatatttataaatatatttatataattacggtttcatttctaccttgagtcaaagttctgtctttagattggtgactgagtaatacttacactttggtgttttttcttaggttcttgaggcttacttaactagcagcttctgatttattgagtgaaagatggttttcatgttaattcctcagttgcatctctgaacttggataacatacttgccgtttgaaaaatagagctgtatactgtcaaaggtgcactggagggtaaaacatttgttggtagtagacaagctcagaaatccaaaaattcagggagggcacagggtaagaagagaggtttgctcagctttgtgctctgatggcacccatctgtactccagcaaagtcatagctgaagcccaaatcgctcaaacgtgtgaagtcaatcatttttcctatagggctctgtttccttttctttaccttctagcttctcttgataaaacagttgggagaactgccaacgtgttcatcagtgagagggtgtggttctttccgatatgttcagcacgtgcatattcatttatgagaaaccaaagtaacttcttcaactcgggttactgtgggatgattaagtagatataaagtgatttaaaagacagcatggtactttcactcagcttaacatgcagctgggatgtctacaatacaagatgtggtgggttttattttattttattttgaggcaggagtgtaattatcttagggttgatataaaggcccatgggaagagttacggattgtacatgggaagaatccataaggagtattgccttgctcaagaatttaatccgctgacagtatgcttcttccagtttgccttacttcctctgcaagtttctttgctccttagggcagaggttttattgaatagattaaatgaggtcagtaagattagttaaaaatagtcattccttgtgggtgttggacacagcttgaaaggagtgtttaaaaaaaaaaagctagggaggaaaagaacaagaaagatagacttcgagagtgataagagaaaaatacagggagatggaatggaaactaccaggaaggccgggcgcggtggctcatgcctgtaatcccaacactttgggaggcggaggtgggcagatcacctaaggtcaggagatcgaggccagcctgagcaacatggtgaaaccccgtctctactaaaaatacaaaaattacctgggtgtggtggcgtgcacctgtaatcccagctactcagaggctgaggcaggggaatggcttgaacctgggaggcagaggttgcagtgagccaagatcgcaccattacactccagcctgggcgacaaagcgacactccatctcaaattt

SEQ ID NO: 22386 - DNA, 4254 bp, Homo Sapiens
gtgtcggccatggagtaagaaggaggcggcgtgggaggaggaagatggcggccggcaagagcggcggtagcgcaggggagattacttttctggaagctttggctagatcagagtctaagagagatggaggttttaaaaataattggagctttgatcatgaagaagaaagtgaaggagatacagataaagatgggacaaatctgctcagtgtggatgaagatgaggattctgaaacctcaaaaggaaaaaagttaaatcgtcgatctgaaattgttgctaatagctctggtgaattcatcttgaagacatatgtaagacgaaacaagtctgaaagttttaaaactttgaaaggcaacccaattggacttaacatgttgagcaacaataagaaattgagtgaaaatatgcaaaatacgtcattatgttctggaactgtagttcatggtagacgttttcatcatgctcatgcacagataccagtagtaaaaacagcagcccaaagcagtctggaccgaaaagaaaggaaagaatacccacctcatgtccaaaaagttgaaattaatcctgtaaggttaagtcggctccaaggtgttgaacgtataatgaagaaaacagaagagtccgaatcacaagtggagcctgaaattaagaggaaagtacaacagaaacggcactgtagtacctatcagcctactcctcctctatctcctgcttcaaaaaaatgtttaacccatttagaggatttgcaaagaaattgcagacaagctattactttgaatgagtctactggaccattattaagaacgtcaattcatcagaattctggaggacagaagtcacaaaacacaggattaacaaccaagaagttttatggcaacaatgtggaaaaggttccaattgatattattgtgaattgtgatgacagtaaacacacttatttacagactaatggaaaagtcattttacctggggcaaaaatacccaaaatcacaaacttgaaagaaaggaaaacaagtttgtcagacctaaatgatccaatcattttgtccagtgatgatgatgatgacaacgacagaactaacagaagagaaagcatatctcctcagcctgctgattcagcatgttcttcccctgcaccatccactggaaaagtagaagcagcactaaatgaaaatacttgcagagcagagcgtgaactacgaagcattccagaagactcagagttaaatacagttacattgccaagaaaagcaagaatgaaagaccagtttggcaattctattatcaacacacctctgaaacgtcgtaaagtgttttctcaagaacctccagatgctttagctttaagctgccaaagttcctttgacagtgtcattttaaactgtcgaagtatacgagtaggaacactcttccggctgttaatagagcctgtaattttttgtttagattttatcaagatacagctagacgaaccagaccatgatcctgtagagattatattaaatacctctgatctaactaaatgtgaatggtgtaatgtccgaaaattacctgtagtgtttcttcaagcaattccagcagtttatcaaaagctgagcatccaactgcaaatgaataaggaggataaagtttggaatgattgtaaaggagtaaataaattaacaaatttagaagaacaatatataattttaatttttcaaaatggccttgatcctccggcaaatatggtatttgaaagtatcattaatgaaattggtataaagaataacatctccaatttttttgcgaaaattccctttgaagaagctaatggcagacttgttgcctgtacaagaacctatgaagagagcatcaaaggaagttgtgggcaaaaggaaaacaaaattaaaactgtatcatttgaatctaaaatacaacttagaagcaaacaagaatttcagttttttgatgaagaagaagaaactggagaaaaccacaccatcttcattggcccagtagaaaagttgatagtatatccaccacctccagctaagggaggcatctctgttaccaatgaggacctgcactgtctaaatgaaggagaatttttaaatgatgttattatagacttttatttgaaatacttggtgcttgaaaaactgaagaaggaagacgctgaccgaattcatatattcagttcttttttctataaacgccttaatcagagagagaggagaaatcatgaaacaactaatctgtcaatacagcaaaaacggcatgggagagtaaaaacatggacccggcacgtagatatttttgagaaggattttatttttgtaccccttaatgaagctgcacactggtttttggctgttgtttgtttccccggtttggaaaaaccaaagtatgaacctaatcctcattaccatgaaaatgctgtcatacagaaatgttcaactgtagaggacagttgtatttcttcttcagccagtgaaatggagagttgttcacaaaactcttctgccaagcctgtaattaagaagatgctaaacaaaaaacattgcatagctgtaattgattccaatcctgggcaggaagaaagtgaccctcgttataagagaaacatatgcagtgtaaaatacagtgtgaaaaaaataaatcatactgcgagtgaaaatgaagaattcaataaaggagaatctacatcccagaaagttgctgataggactaaaagtgagaatggcctacagaatgaaagtttaagttccacacatcatacagatggcttaagcaaaatcagactaaactatagcgatgaatcacctgaagctggtaaaatgcttgaagatgaactcgtcgacttctcagaagatcaggataaccaggatgatagcagtgacgatggattcctcgctgatgacaactgcagttcagaaataggacagtggcatttaaagcctactatctgtaaacaaccttgtatcctacttatggactcactccgaggcccttctcggtcaaatgttgtcaaaattttaagagagtatttagaagtggaatgggaagttaaaaaaggaagcaaaagaagtttttccaaagatgttatgaagggctctaatccaaaagtaccacagcaaaacaacttcagtgactgtggtgtatatgtattgcagtatgtagagagcttttttgagaatccaattctcagttttgaactacctatgaatttggcaaactggtttcctccaccaagaatgagaacaaaaagagaagaaatccgaaacataattctgaagctacaggaagatcagagcaaagagaaaagaaagcataaggacacttactcaacagaagcacctttaggcgaaggaacagaacaatgtgtcaatagtatctcagattgaccatttctgttacttgtcatttctactttcagaaactaaatgactttcaaatttgggtatagacaataaagaactgaagtgctcactactcagtgatttggaaattttgatgcttgtataaatgtcagataattaatttccaaaggcgtatgtattaagtaaaagtctgtaaatatgttaatgaggccaatttttccagcatttataattatttttttcacttgttaggaagcttttgttatgtattttctgttaatagtacctaaaattgcaacttctaaacccaaataaaaagaaaatatttataggaggaaatgattaatttgatattctttagtgaacttgtttaattcctcagtgggtgtgacatatttcatgggaatattcaaatatctatggtaatattttgaccctttatatttgttctaaaataagtcaaaatgtgaaaataatattaaatctaagatattttgaactaagcatctttatatgcttgtgtaacaggaacaaagtaacagcctttcaattcatatactgccttgtgttcagtgaacccaagaaatgtaataaatatttgtaattttacacaaatatttaagaggaaagagtattaagagcaattcaaaaaaagtaaccttatactactaaaaaaaaaattcttgcatatattatcatcaaatgcatttttgaagacatcaaagactcaggttaaaactattttggtaagtgcagcttgaatttcaaatatcccgtgttacctttctctattacagcttaaagtatgctacaatctgtgtcatatagttaattgataagcatttttaatctgtgtaaacacaggaatttaaataggaatttactatttttttat

SEQ ID NO: 22387 - DNA, 6006 bp, Homo Sapiens
atgagcggcggcggcgacgtggtgtgcaccggctggctgaggaaatcgcctcccgagaagaagttgaggcgctatgcctggaagaaacgctggtttatcctgcggagtggccggatgagcggtgacccagatgttctggaatactacaagaacgatcactccaagaagcctctgcggatcatcaacctgaacttctgtgagcaggtagatgcaggcctgacctttaacaagaaggagctgcaggatagttttgtgtttgacatcaagaccagtgaacgcaccttttacctggtggctgagacagaagaggacatgaataagtgggtccagagcatctgccagatctgtggcttcaatcaggctgaggagagcacagactccctgagaaatgtttcctcagccggtcatggcccccgctcttctccagctgagctcagcagctctagccagcaccttctccgagagcgcaagtcctcagccccatcacactccagccagccaactctgttcacgtttgaaccccctgtgtcaaaccacatgcagcccaccttgtccaccagcgcacctcaggagtatctctacttgcaccagtgcataagccgaagagcagaaaatgcaaggagtgccagcttctctcagggcaccagagcctcttttctcatgaggagtgacacagctgtacaaaaacttgcccagggcaatggacactgtgtcaacgggatcagtggtcaagtccatggcttctatagccttcccaagccgagccggcacaatacagaattcagagacagtacctacgacctcccccgcagcctggcctcccatggccacaccaagggcagcctcacaggctccgagacagataatgaggatgtgtacaccttcaagacgcccagcaacaccctgtgcagggagttcggggacctcctggtagacaatatggatgttccggccaccccactctcagcctaccagatccctaggacattcactctggacaaaaaccacaatgccatgacagtggccactcctggggactcagccatagctcccccaccccgcccccccaagccaagtcaggcagaaacacctcgatggggcagtcctcagcagagaccgccaatcagtgaaaatagcagatctgtcgctgccaccatccccagacgcaacaccctccctgcaatggacaacagccgacttcaccgagcttcttcctgtgagacctacgagtacccacagcgtggtggagagagtgcaggccggtctgctgaatccatgagtgatggagttggctctttcctgccagggaaaatgattgtgggccgatcggacagcaccaattctgaagacaactatgtgcccatgaatccaggttcttccaccctgttggccatggaacgagcaggtgataattcccagagcgtctacatcccaatgagcccaggggcccatcactttgactcacttggctacccatcaacaacccttcctgtgcaccgaggccccagcagaggaagtgagattcagccaccccctgtcaaccgcaacctcaaacctgatcggaaagcaaagccaacaccacttgacctgaggaacaacaccgtcatcgatgaactccccttcaagtcacctatcaccaagtcttggtctagggccaaccacaccttcaactccagctcctcccagtactgccgccccatctccacccagagcatcaccagcacagactcaggagacagcgaagagaactatgtccctatgcaaaacccagtgtctgcatctcccgttcccagtggcacgaacagtcctgcccctaagaagagcaccggcagcgttgattatctggccctggacttccagccgagctccccaagcccccaccgcaagccatctacttcatccgtcacctctgatgagaaggtggactacgttcaggtggacaaggagaagacccaggccctgcagaacaccatgcaggagtggacagacgtgcggcagtcctcagagccttccaagggtgccaagctgtgatgagagggccaccgcagagcccaggaggcagcatctccagagctggcccttcccatctcccctctcccctctcccgttcttcctcccatccacctcctctctactctgccagtctcagccttcaaagcacttgacatcagggaccctgaacccttcccctgggaggtgagggcctgatcaaggcacctcctctgcccactcggggcccagctgtgatttttatcagtaatggccatgcctccacccaccttagttaggagctacttccaaaaagcatccttcagcctcttcctgtcctttagacctgactctctaccagatgtttggagggaagggctggggctctgagccagattccacacctcacgttcagtcacagccctcagctatcttccctccggccactgggctacctctccttcagtcccagaagacaagtctcaccaacccagggagtcaaggaccagcaaaccaaagtggataatggactttttcattcctgtttttcttggcaggagagaagcaaggccactaaaagaggagatggtggagacggaggctcagcagtggtcttgaggggtaaaggacttagatgcccagatgaagagggaaagctgacatctgcagggaacccactttgaggctgaggccatggcaggacagctgctgtggggtgcagaggcagaagatgaaggacaaaaggaagggaaaactgatggccaacctagagcagcaaggagcagggcttggagctcgggtggtggagatgacaaggacactgtggggtctgggtccccagaactctggagctacaggccactctaggcccaagggctagtcctcttccccagtcccctcagaggcccccgccagccccaccttgaaagcagcatacaggggaaggcttggaccaagctgggcgaccaagcacatggggcaggaacacatggtaaaggggtggggaatatgggagggagtgtggtgtggatgggggtgatgcagggactgaggggaaccctgggacaggcacaggctgggcagaggcacagggcagtgcaggggactctgcagtggggtcgggaagtgagtttctttgcagtgagcagtgcagtggaagtcgggcacagaggtagcagacagatgtgaagcagtggtgaaggccatgtagcaagtggggaaatacatccaaagggcctgggagttggggggtgcccaacgcaatccttgggggtgcagggtggagcagaaagtgaaggagggacacgtgcaagagtggtgtgcatggtggtgtgacatgaggaccgttcctaggatgggacagtgggtcaggcaggacaaggagaaagcagggcagaatgatgcctagaggaccacatcaggcatggctgacagcttgtgcccatgggctgtggcgtatgtcagatcgcagggtaggaacgagtctggcctggtgccggcccagtgtttcctcagctcatccgccctctgttgctccctagcattccaggagccatcttggactctcctccccaggtttgaaaggccatcagattagcagggacggggtgtagggcatcacccaaggttccttctcttaaactaagggtgggggatctgaatgtttttatgttgactgttcttgactaaattttcaagagtttcagaagcaacaggacagaccagacgtttcattctaccctggggcgaacagaacttcttcctcccaaacaatgacttcctgccatgtttgatggggacagctaccactgtcctctgcccccattcccctttcagctcccatgagcatgcatagttcaccagaccaatggcctagccattctctaagtcccatcctggaagaagttatttcttcaagagctgcacctctcctcctagcattagtttagatcaactcaaggagtatttattaatggctgctgtctccagtttctggggttaagcactaaggacacaagaatcaatcagaccttctccctgaacttaagatagccacaatcagaaaaaggacaaggacatgagacagtggtgatggccatcagacagagacttcaaatgctgatggagggcagaggaagtacttagggaggttggtgtcagaggcaggagtgggggatcagggaaggtggattctaggaaaagggagtgcctgaggtaggccttagaaggggatgagtcagatttttacagaggaggagggcagggcttgggtccagtggaggaagaaggaaggagaggcttggaaagccttgtgtcttgggaaaaaaaggcctttgagcatatgggtccagccactcagaagtgcaggggccatgccttggtgttccaataagtgaatggaagcagtggtggtagctacactgggcagagttggcagggtgctggttcactctgcccagccctgaatgtgtgccttaaaggccccctacaaggggccccatacgacagagcttttaactggtgccttccctgtacccgcagcagccacaagtgggcccagactattgcagcctcccataaacatgtgagcatgttctgagtgtgccatgatgtgagtggacctggctggaatcttcggagagcgactgaggtgttcaaatcgaatctcccaggaggcttccttccagccccctattctggtaactaccaggaggcttccttccagccccctattctggtaactaccaaaatccctcgggtgcaagtgtaggggtagagatggaaggatgagaggtgaaattgaccttttgaaagcaaagctctggctcacaggccccaaactaccagccgtatctagcatatccccaccctccacccactacctcctccaacaaaggagtcaactcagttgaaaaaactggtcctttggcctatccatgggtcaaagtccacctctcctgggggcctggagaggactgagcctacggaaaggggataccttcccactcagcactgcttcacacaggccccctgcctggggctctccaaggagccttcttcacccacttccagctccacttctgcaaggttaagtcaagtgagaacgatgagaaatagggagatggtgtctccttaagtccttgatctgcctgtctgtggaatgggaggttggattagctgcgctgaggtcccatccacagctggtgctcagctgcttgaaggggagactccctcctctgtaacttctttctgggggattggggtgggcagtacctatccccagtcccctcctagcttgactttagtggtttccaatgtagaagttaacaaagtatgccccattcctgtgacaaaagcacaaccattctgaagttactggagcatgggctcagctcatcctccctctggccccttctcccatggggacatctcggcccagcacccctatcccatttccagagttcttccttccccatctgggccttcataaaatgcaggggaagccagactggtctcaggagcgctaaagcccttccgtggggggtcgtctttctgggactagccctgctgtttaggacctgggaccacaatggggtacctgccgagggggtccccaagagatccaggctgtcatgtgatttatggtggcatgtgttgtgtatttgttggctacttgtgtcttgaaatctagaattatttcacgcagaattgtcactgtttgtcaggaagagaaaatgggctagtggaagcccagtcttgagttcttgtcttgttaccatttaaaattgacatttaattttcaaatcactgttggtgcctaatcacttaagttattaatttattctgttgtattcttttttttaaattgtaacatatttatccggtgggtgggacaggagtgtgttcaagtgggtcatgtttttgctgtggtgacacatggtacaggcttggagcttgcaggtccctttctactgtggtgttggagcaggacaataaagtccactagaaatgcacccc

SEQ ID NO: 22388 - DNA, 2785 bp, Homo Sapiens
atgaggtccagctcgtccctggctctctctctctctcaggtcctgatgtcttttccaagtctggagagcagcgatgctgctgtgccctgcgcagaaaaccgtgttccggctgcagctaaccaccgcagctcaatgtctctgggtgtatctcagagataagcaggtggtggtgttccttgcttatcccacaagggcacctggccggaataatggagtcacttccctccactggcctgaccccactctttctctttcctggacacaggaggcatacacggaatacctgaggagcatccactatatctcccaggtgttactagaagaagtggaaaccactaaagaagctggggaaactgtgccccccgacacctccaagatgctgaaactagcacagcagtgtctggagagggcccagtcgacggccgccaagcttgggaaaacacgcctgaagccaaccatgcctgcagctgctcccatcccccagcctgccggccgacaccgccgtgtatactccgatgaaggaggaaagctctctccttttctgccacccgagatcttccagaagcttcagggggcagagtcacaaagctgtaagaaagagctgacgccactggaggaggcctccctgcagaatcagaagctgaaggctgcgtatgaggcccgaatggcgcggctagaccccagccaggccatgcagaagacatccctgaccctctctctacagcggcagatgatggagaacctagtgattgccaaagcccgggaggagacactccagagaaagatggaggagcgccggctgcggctccaggaggccgccaacaggaggttttgcagcaagttcgccctgaccccggaggaacgggagcagcgggccctttacgccgccatcctggagtacgaacaggaccatgactggccgaagcactggaaggccaagctcaagaggaatccgggggacctgtcactcgtaaccagcctggtctcacacctgctcagcctccccgaccacccgatcgcgcagctcctgaggcggctgcagtgctccgtgtacagcgccctgtatcccgccgtgagcagagcagccgcgccagccccaggctgctgccccccgacccccaaccccggaagccgacggctgcggccctcgcagagcctccattgcatgctgtccccgcccgagcccagcgcagccccgcggccccaggacagtccccccacgcccccactccaacccggcccgtggggtctccctcacccctgggggacaccgcatctggattgccagacaaggacagctcgttcgaggacctggagcagttcctggggacgtctgagccgcagggccggggccgtggggtacagccggagccccagctgcagcagctgaagaccgcggtggaggagatccacaatgccgtagacaggctgtctcgctgacccttctggccttcgaaggcctaaacacagctgcctccaaggaccgctgcctggcctgcattgaggaaccctttttctccccgctgtggcctctgctgctggccctgtacaggagcgtgcaccgagcccgggaggctgccctgagcaggagcatggagctctacaggaatgcaccccccaccgccattggcatccccaccaagctcctcccccagaaccctgaggccaagggggccactggctacccctactgcgcggcggcccaggagctcggactgctggtcctggagagctgcccccagaagaagctggagtgcatagtgcggaccctgcggatcatctgtgtctgtgcggaagactactgccccaccccagaggccacaccccaggccggcccccgcccatcgctgcagctgccattggtgccgatgacctgctgcccatcctgtccttcgtggtgctgaggagcggcctccctcagctggtgtcggagtgcgcggccctggaggagttcatccacgaggggtacctgatcggagaggagggctactgcctcacatcactgcagagtgccctgagctacgtggagctgctgccccggggaggcctggccaagtagtacagctagagcccagggtccctgcagggcctggcctcgcctcccagggctgtctctcctacacctggagccatgggatctactgaggaccatcctggagcctcacgctgctctgcacatggtgggggcttgtccactgtggtgtgctctccagctcttcaccttcctcacctcacatctgaccctggagcttggggttggcacctctgccccgacagaatggggctgaatcagctccaggaggaaccaggccctgctctcctgtgtagcctcagagaggccaagaagggaagctttgggcttcggtgggtgcaggctcagcgatgaacatctggctggggcagctcctggggagcatcagggaagagggggccatgagccggccagcagtggagacggcagtccagtttctctcccctctgacccctagaaggggagttgtagccccatgaactagtttcttgtctgggtcaggaacaagggccggctggggcctggggtgcagctggtgtcagggtatgctgtttgctgatgggcagggacacccctgcagggtctcgggctctgagcccaggacattccctgccccttgctcaccttggctgtgggctgtgaacattccgggaccctgggcatcttatctaggtccgtgcagcccaagggtcagccctcttgactgtcacatgctgcccccacccagcctaaaataaagagctcactgctgtg

SEQ ID NO: 22389 - DNA, 8456 bp, Homo Sapiens
  misc_feature (3848)..(3848): n is a, c, g, or t
  misc_feature (5680)..(5680): n is a, c, g, or t
  misc_feature (5735)..(5735): n is a, c, g, or t
  misc_feature (5750)..(5750): n is a, c, g, or t
  misc_feature (5858)..(5858): n is a, c, g, or t
  misc_feature (8099)..(8100): n is a, c, g, or t
  misc_feature (8108)..(8108): n is a, c, g, or t
  misc_feature (8130)..(8130): n is a, c, g, or t
  misc_feature (8448)..(8448): n is a, c, g, or t
ctctcgcggcgcgaccgctcagtcacttcgcccagagacccggacctggtccgctggggagcaggcggccataaaccccctctctcccggttccctgacgccgcggcaggagctgttacaaacaccctgcggttggtctccgatgcccttcagtgaggtggggacgcctggaccctggtgagcgaaccccaagccaccccccaccccaactcagtgtcttcgccggcccccggcccgtacgcctgtctggtcgccatggctgaaaacacagagggggatctgaactccaacctgctccacgccccctaccacaccggggaccctcagctggacacggccatcgggcagtggctccgctgggataagaatcccaaaacaaaagagcagattgaaaacctgttacggaatgggatgaacaaggagctgcgagatcgtctttgttgccgaatgacttttgggactgcaggacttcgttctgccatgggggcagggttttgctatattaatgaccttacagtaatacagtcaacacaggggatgtacaaataccttgagagatgtttctcagacttcaagcagagaggctttgtggttgggtatgacactcggggtcaagtaactagcagctgcagcagccagaggcttgctaaactcactgctgcagtcttgctggccaaagatgttcctgtgtaccttttttcaagatatgttcctacaccttttgtaccatatgcagttcagaagctcaaagcagttgcaggtgtgatgattactgcctctcacaaccgcaaggaagacaatggatacaaggtttactgggaaactggtgctcagatcacatctcctcatgataaagaaattctaaaatgtatagaagaatgtgtggaaccctggaatggttcctggaatgataatttagtggataccagcccgctgaagagagaccctctgcaggacatttgcaggagatacatggaagatctgaaaaagatctgtttttacagggagttaaactcgaagaccaccttgaaatttgtgcacacatcttttcatggggtcggacatgactatgtgcagttggcttttaaagtgtttggttttaagcctccaattccagtaccagaacaaaaagatcctgatccagacttttctaccgttaaatgtccaaatcctgaagaaggagaatctgtgctggaactttccttgagactggcagagaaagaaaatgcccgggtagtgctagccacagatcctgatgcagacagactggcagcagcagaacttcaggagaatggttgttggaaagttttcacagggaatgagttggcagctttgtttggatggtggatgtttgattgctggaagaaaaataaatcaagaaatgctgatgtgaagaacgtttatatgttagccaccacagtctcttctaaaattctgaaggcaattgcacttaaagaaggatttcattttgaagaaacattaccaggttttaaatggattggaagtaggataatagacctcctggaaaatgggaaagaagtcctttttgcatttgaagagtctattggttttctctgtggaacttcagttttggataaagatggggtgagtgcagctgttgtggttgctgagatggcatcttacctggaaaccatgaatataacattgaaacagcaactggttaaggtttatgaaaaatatggttatcatatttcaaaaacttcctatttcttgtgttatgaaccacctaccatcaaaagtatatttgaaaggcttcgtaattttgattctccaaaagaatatccaaaattttgtggaacatttgctatattgcatgtacgggacgttaccactggatatgacagtagccagcctaataagaaatcagtgctgcctgtgagtaaaaacagccaaatgattacatttacttttcaaaatggctgtgttgctacccttcggacaagtggaacagaaccaaagataaagtattatgcagagatgtgtgcgtcacctgaccagagtgacactgctttactggaggaagaactgaagaaactcattgatgctctgatagagaattttcttcagcctagtaagaatggactgatctggcgttctgtttaggggtacaccaatatgtcatgacactgtgtgggcatatggaacagagcaaccgagaactgcatacattgaaccttgtgttagcattctctctctatctcatctggccgagtatctttttccttttattttctttctttttggtcaactggctagactaaacaaagtataagtttgaaatgaaatggtctagagggaaatgattcaaattttttcataattcaaacaaaagttattacactaaaagtattatagtaacgtattgtccttccgttaacagaaacatcacaattcaaaagtgagttttcttattatagtgtgattaagcctagttctgtatctcgtaattgtgtatagcatggtaaaagaaaaaaaaaaagacaggtaaatgttatataattgtagggttagttaaggaaattagtccataaaattggcaagaaaatggtactttccttgattgttatgaaaaagtgtcattgtgacatcacaggtattaatttacaaattagagtatttgaaataggatatttagcatttctgtagtttagaacagatgttacagtgtgtggttttggcatgtctgtttcaggtgcccttggtgcagtataaatttactgtatgtatttaaaattctgatgtttactgaacataaaacaatagtggcaacactcctattggctttgttcttatcaaatttctcagtgccttctcagggtctggtatgaacagaaaaaacagtgttcctgcatttaccataatttaatcagtcaatttgcagatagctaaggaaaatcttccaaaatctgtaggtgcttcctctatatcaagtgagtttactgattttaaaatcttaggaatataaataaagatcttaataaaagcaagcttaatgtagttaaggatcttcatattagaattgtgtcatttatcaaaccttttattacagaaaaaaatctgaactgagaaaggagctctgaatttatttgacagtctaacttttgaattacatttttgtaagtagatttatcttttattttatgaagtaatgttaattttactaagaataaaacatccaaattttaagtattatgaaatactaaaactacatgttttaaaacagaggtccagtttattctaacatcttgctgacttctgtagaatttctgattgcatgactattatttatcttcttttagtgtagaaaataattttttacaaaaagtcacttttgggctgggcgcagtggctcacgcctgtaatcccagcactttgggaggctgaggcaggtggatcacaatgtcaggagtttgagactagcctggccaatatggtgaaaccctgtctctactaaaaatacaaaaattagccgggtgtggtggtgggcacctgtagtcccagctactcgggaggctgaggcaggagaattgcttgaacctaggaggctgagattgcagtgagccgaaatcacgccactacactccagcctgggcaacagagggagactccatctcaaaaaaaaaaaaagtcacttttggctaatcatgcagtcttctgaaaaggtttaataaaaaaatgctgtttaggctgggcttggtggctcacatctgtaataccagcgctttgggaggctgaggcaggaggattgcttgaggccaggagtttaagttacagaactatgatcacactgccgcactgaagcctggatgacagagtgagaccttatntcaaaaaaaaaaaaaaaaagagagagagagagaaaaagaaatgctgtgtttaatcttcttaaaatgtatcttgtcctacatagttctcagaatacatatggggtatagttaggagataacaataacaagacctaaacaaattgcttatgggagatagcactgtaattagagaatttatttcatataaaataataatataaagtttgaactgattagaatgttccttaaatcatggtttcgtttgttgcagctgtcagctaacatttggttgagctcatataatccaaacctaattgtccaactattgtattgccactattgttaatttgttccttccttactttcttattgttggatcttatatgactgtatgactgtagataatagacagctagctaaatgtagagcaccatttttctcaatgagtttgttttcaaaggctttgcactggagaagatatgtgtagaatttttgttttatttttaaaatgtgtaaaacatcttttgttttatatgcttttaagaatgtagattgtaatttaggaaatggcatatattctgcaaagtggtataatgttgtatatatgaaaaacaggtatatttggtttagttctgtgtttcagtgactgataaacaaaaatgaagctaaaatgaatcaacggctcattcatagttactaaagccatgtcatgactgtcattctattatgaagaaaacagttttatttgagtgctttaatataatgcaacatttaagtcatcttaaggtgaaaagttattgaagtgttcttctctcaagttaacaaaattttacaaatgttcctgaagtgtatcgattgagggaattattttattctagcctgtcatgagtctgtctgagcatgatacttaacatgaacttgatgtagtaggtgcacatttgcctaacaggataaattcagtgatagcccaagctggtcaggagagacagaagtgctggctaggaggtctcagcctcgggcactacaatgtttatctttttctttttgaacaatattgtgaaaatgattgcattctcattgagcatgaaagtcaaaactggaattttctaaagctttggagaaaaggagagaattagtagggcaagatcaaagcatacattggaaataaacagtagaaataagcaaacaatataaagagacacgggaaatgcttctcgtgaagggcaaatgtaacaccataacagtagggaataaactgtgtcccacctgtttacttgtgtttatttgttgttatgatgagtatgcacctaccattttcctttattgtgatcactaaaatgaggccaaggtttaggaggtgagaaaaagtatcccttttacggattcagttcctgctaggatgttgtatcagaatcatgtgagaactcaggaagaggtagagcagaaataaaaaggaagaaaatgtagattagaaaataagacttctgagaaaaagttcaaggaataaagattgtttgactctggagaggagaaagctgttgagatagtttgctaagtttgctaataaagctttattgagtcttttattgaagggttcaaagtaagaaatactatgccatagtgttctccatctctagtgaagacagaaccagagggaataaggatcttttttttaaagacagcatggaaagtttaagatttaggaacttcttgagaaatcttcataatatcttctattcaaaatcttttttttatttttaagggaataaaaattttaaaaattaagagatatacagatgactttttaaggtccttctttccagcacattttttttaaaaactcaggttagaanaaaaatgtcataaagggcactaaaagtaacatttgggtttcactccatatttagnagaatttagctcacnaaacaatttttgtgtgttttgagtaactgatgcataagtgcaatgaataattttcctgcttcactgttatttttaatttaacctggcaaattaagtgagacttgaacnaaattttgttcatcttgaagaatgtatagtggcttaggttatttgaggttttcgttttgaatatatatgttgttattttgatgtagatacgttagcagatggagaggttctaagagattggatactttggaatgtctttatataggaaatagacctcccatttcttaagcaagttgcttctggaattgatgcaacaggggatattagctgtagtttaatggataagttgttctatgagctgctgctatcagtacttttttccacattttccattgatatttgtgatgcttgaaaaatccaaacttcacttggatacatttaattttatgcctttttctctctacctcccacttttcctaggcacccttgcacattttgttactgtgaaggactattgccctgttacctcactgataagaaatctcaactgtattcattcagaatgctttaagcttagtcataaactacatttgcctatggacctttggttattttgttaatgttgtcattatatttaagacttattgtaggaagtaattttaaatctatttcataacctgttttgatctgtctgcatactgctatatgttaatttattacggcttttacaattcacttgtcatctgagattgttctagaaactgatgaggaaagagtcgtactaaccaaaatgaatgggcaattgacataacattctatttcaggtttccttgtacttggggagccaaagcacaagatctaaggaaatcttattcacatttgtccctcagagcatcttaccctaagccacagaggtataaatagtaagatgagaattgctcattgtctgactccttgcacagcatgaatttaattctagttggaaacaaagttagtgttgactactggttaccttaaagtattcaccatactatatatttattagaccatctttcctctttgtttattcaagactatgtacttataaaagagaacctataagaatgtgtagagtgaccaaatagggacaaagtgacatacctagagtttgctgctcaaatttttccactagcgtaaccctaaagcagaggggcatgatgaagggggaaggggttctgagagcaaaatcagaatcagcctaccactgacatgaagtgtgttctgtctttaaaatgtaagtgaattttgcattctctataataaaacttttaatataaaaatgatatgtttaatctttactgaaacttatgccaccacaaaggagcaccatgttcatcacgtggctgctcagttttttcccccagtgccctcaccgccagtggaggcaagtccttgagctacacacactggctgtagtgcaagatatataaacataggccgggctcggtggctcatgcctgtaatcctagcactttgggaggccgaagcaggtggatcatctgaggtcgggagattgagactagcctgaccgacatggagaaaccctgtgtccactaaaaatacaaaattagccgggtgtggtggcacatgcctgtaatcccagctactcgggaggctgaggcaggagaatcacttgaacccaggaggtggaggttgtggtgagccaagatcgcgccgttgcactccagcctgggcaacaagagtgaaactccgtctcaaaaaaaaaaaaaaaagatatataaacatagaacatatccagactatttcctgcccttggaatctgaccttcagaaggattaacgccaaactaaactgacctgaaacagttttgttactattggcattccttgactaaaaaggaccacctgatgctcagtcccgagagtaggaatcgtggtttattatttttcatatccataccacctagttcagtacctgttatagagtgtttaattgctgatactaggaattaagggattttttaaaagtagcaaatagtttaaggaacaatcaaaaaatgaattttctaattcagttttttcaatgaagtcccatcactgaactttataatgtaatgtttattaagcagacatccccttaaatactcagtttctttggagagagcaaagcatatctccctgtggaaattatatataatgcctggtattttacactcaaagcaaggtgttggccaggaaggtaaagaaatggtgtctatgtagacttaatatcactagtctaagtgtcattttgagcctagtagcactaccttccaagtgagtcacaacaaatttgatcctatttgtaggttttttccactgnnatgattcntcatgtatcttacaagagccantcaagcaagactctgcttctatgtatggtgaggccttgttgttctagggtagaataaactctttgtatgcctcattgaatatgccaggtaaaatatatgcagtcaagaatgaattatttttctgactaaagtgtgtagcagtagttcaaaattgtgcccttgttttaacagtttctgtcaacatcttctcatttttccctacaaaaacaccagggtgtattataagtactgcctgtgagaatttgcactttatgtatttgtgtgtggatttcttgtggttttagccaaatgaagtgttatcagtaataaacaggtctnttcatagg

SEQ ID NO: 22390 - DNA, 5255 bp, Homo Sapiens
cgaccccagccaccgccctgcggccagcgcgtcccccgactcgccgcccggagaccccgaggctccaacgagttcagaaatgtccagaaatgacaaagaaccgttttttgtgaagtttttaaagtcttcagacaattccaaatgtttttttaaagctctcgagtccataaaagaattccaatcagaagaatatcttcagattattacagaagaagaggcattgaagataaaggagaatgatagatcactttatatctgcgacccttttagtggcgttgtctttgatcacctcaaaaagcttggctgcagaattgttggtcctcaagtagtcatattttgtatgcaccaccagcgatgtgtcccaagagccgaacatccagtttataatatggttatgtctgatgtaaccatatcttgtacaagtctggaaaaagaaaaaagggaagaagttcataaatatgtacaaatgatgggcggacgagtatacagagaccttaatgtatcagtaactcaccttattgcaggagaagttggtagcaaaaaatatttagttgctgcaaacctgaagaaacctattttgcttccctcttggataaaaacactttgggagaagtcacaagagaaaaaaataactagatatactgatataaacatggaagatttcaagtgtcctatttttcttggttgcataatctgtgtgactggcttatgtggcttagacaggaaagaagttcagcaactcacagttaagcatggaggtcaatacatgggacaattgaaaatgaatgaatgtacacacctcattgtgcaagaaccaaaaggtcagaagtatgagtgtgccaagagatggaatgtacactgtgtgaccacacagtggttttttgacagtattgagaaaggtttttgtcaggatgaatccatatacaagacagaacctagaccagaagcaaagactatgcccaattcttcaactcctaccagccagatcaacacaattgatagtcgtactctttcagatgtcagcaatatttccaacataaatgcaagttgcgtaagtgaatcaatatgtaattcacttaacagcaaactggagcctacacttgaaaatctagaaaatctggatgtcagtgcatttcaagcacctgaagatttattagatggttgtcggatatatctttgcggttttagtggcagaaagctagataaactgagaagacttattaacagtggaggtggagttcgttttaaccagctaaatgaagatgtaactcatgttattgtgggagattatgatgatgaattgaagcagttttggaataaatcagcccacaggcctcatgtagtgggagcaaagtggttgctagagtgtttcagtaaaggttatatgctttctgaagaaccatatatccatgctaattaccagccagtggaaattccagtttcacatcagcctgaaagtaaagcagctcttttaaaaaagaagaacagcagcttctctaagaaagactttgctcctagtgaaaagcatgagcaagctgatgaagatctgctctctcaatatgaaaatggtagctccacagtagttgaggctaagacgtctgaagccaggccctttaatgattctactcatgctgagcccttgaatgattctactcacatttctttgcaagaagaaaaccagtcttctgtcagtcattgtgtccctgatgtttctacaattactgaagaaggcttatttagccaaaagagtttccttgttttgggttttagtaatgaaaatgaatctaacatcgcaaacatcataaaagaaaatgctgggaaaatcatgtcccttctgagcagaactgttgcggattatgctgtggttcctctgctggggtgtgaagtggaagccactgtgggagaagttgttacaaatacatggctggttacttgcatagactatcagactttgtttgatccaaagtcgaatcctctcttcacaccagttccagtaatgacaggaatgactcctttagaggattgtgttatttcatttagccagtgtgctggagcagaaaaagagtctttaacattcctagcaaacctccttggagcaagtgttcaagaatactttgttcgcaaatccaatgcaaagaaaggcatgtttgccagtactcatcttatactgaaagaacgtggtggctctaaatatgaagctgcaaagaagtggaatttacctgccgttactatagcttggctgttggagactgctagaacgggaaagagagcagacgaaagccattttctgattgaaaattcaactaaagaagaacgaagtttggaaacagaaataacaaatggaatcaatctaaattcagatactgcagagcatcctggcacacgcctgcaaactcacagaaaaaccgtcgttacacctttagatatgaaccgctttcagagtaaagctttccgtgctgtggtctcacaacatgccagacaggtcgcagcctccccagcagtaggacaaccacttcagaaggagccctcgttacacctggatacaccatcaaaattcctgtccaaggacaaactcttcaagccttcctttgatgtgaaggatgcacttgcagccttggaaactccaggacgtcccagccaacagaaaaggaaaccgagtacgccactctcagaagttattgtcaaaaacttgcaacttgctttggcaaatagctctcgaaatgctgtcgctctttctgccagccctcaactgaaagaggcccagtcagagaaggaagaagccccaaagccacttcacaaagtagtggtatgtgttagtaaaaaactcagtaagaagcagagtgaactaaatgggatcgcagcctctctaggagcagattacaggtggagttttgatgaaacagtgactcatttcatctatcaagggcggccaaatgacactaatcgggagtataaatctgtaaaagaaagaggagtacacattgtttccgagcactggcttttagattgtgcccaagagtgtaaacatcttcctgaatctctttatccacatacttataatcccaaaatgagcttggatatcagcgcagtgcaagatggccggctctgtaatagtcgactactctcagctgtgtcttcaacaaaggatgatgagccagatcctttgattttagaagaaaatgatgtagacaatatggccaccaataataaagagtcagcaccatcaaatggaagtggaaagaatgactctaaaggagttctgacacagaccttagagatgagagagaactttcagaagcagttacaggagataatgtctgcaacatcaatagtgaaaccccaagggcagaggacttccctttcaagaagtggttgtaacagcgcatcttcaacccctgacagcactcgctctgctcgcagtggacgaagtagagtcctagaggcactgaggcagtctcgtcagacagtacctgatgtcaacacagagccttcccaaaatgaacagatcatttgggatgaccctacagcaagggaggagagagcaaggcttgccagcaatttgcagtggcctagttgtcccacacaatactctgagcttcaggttgacattcaaaacttggaggattctccttttcaaaagcctttacatgattcagaaattgctaaacaggctgtctgtgatcctggaaacatacgtgtgactgaagctcccaaacacccaatctctgaagaactggaaactcccataaaagacagccacctgatccctacgcctcaagcccccagtattgcctttccactcgccaacccccctgtggctccgcaccctagagaaaagattataacgatagaggagactcatgaagaattaaaaaaacagtacatatttcagttatcatctctgaatcctcaagaacgtattgactattgtcatctgattgagaaactaggtggattggtgatagaaaagcagtgctttgatcccacctgtacacacattgttgtgggacatccacttcgaaacgagaagtatttagcctcagtggcagctgggaagtgggtgcttcatcgctcctaccttgaagcctgcaggactgctggacacttcgtgcaggaagaagactatgaatggggaagtagttccatacttgatgttttgactggaatcaatgtacagcaacgaagactagcacttgcagcaatgagatggagaaaaaaaatccagcaaagacaagaatctggcattgttgagggagcatttagtgggtggaaggttattttacatgtggatcagtctcgagaagcaggcttcaaacgccttcttcagtcaggaggagcaaaggtgctacctggtcattctgtacctttatttaaagaggccacacatcttttttctgacttgaataaactgaaaccagatgactcgggagttaatatagcagaagctgctgcccagaacgtgtactgcttgagaacagaatacattgctgattatctcatgcaggaatcacctcctcatgtagaaaattactgtctaccagaagctatttcatttattcagaataataaggaacttgggactggattatcacaaaagaggaaagctcctacagaaaaaaataaaatcaaacgacctagagtacactaatcgcatctaccctttagttaccaaacattaaatgtttttaaaaattgaaagcctgaatgtgactgtgatagatttgggtagtaatttaaagatgagtacctgaagaattctgcttcagagtataatgatgacccttcttgagttttgaacacctgaaattgtaatcactgaaatattaactgtttcttaataaaaagttacctgaaataacaacaaaatacaactcctcagctagcttgctgttaaaccacattgaagtctgttaaaagatatttatttttcttgtaaatatctgaagctgtagcttagtggaaattttagcaaggtaatggattttgctttaaaatgtctgccttacaaattcataacaacaagatttgtcagtcagcatttattcatgttttccctgatttttatcttctcaccattttacctcttttaacaggagcctgagcacaaggtttaatgaggaagctggggctataaatatgtgtgtatatatgtatatgtatgtttgtacaaatctccatgatgtttgccaagtttgaatgcgcaaaacttggaaaatgtgacaataaagaataaaagtagtaactcaaattagtat

SEQ ID NO: 22391 - DNA, 7885 bp, Homo Sapiens
gcgaaggcgacagctctaggggttggcaccggccccgagaggaggatgcgggtccggatagggctgacgctgctgctgtgtgcggtgctgctgagcttggcctcggcgtcctcggatgaagaaggcagccaggatgaatccttagattccaagactactttgacatcagatgagtcagtaaaggaccatactactgcaggcagagtagttgctggtcaaatatttcttgattcagaagaatctgaattagaatcctctattcaagaagaggaagacagcctcaagagccaagagggggaaagtgtcacagaagatatcagctttctagagtctccaaatccagaaaacaaggactatgaagagccaaagaaagtacggaaaccagctttgaccgccattgaaggcacagcacatggggagccctgccacttcccttttcttttcctagataaggagtatgatgaatgtacatcagatgggagggaagatggcagactgtggtgtgctacaacctatgactacaaagcagatgaaaagtggggcttttgtgaaactgaagaagaggctgctaagagacggcagatgcaggaagcagaaatgatgtatcaaactggaatgaaaatccttaatggaagcaataagaaaagccaaaaaagagaagcatatcggtatctccaaaaggcagcaagcatgaaccataccaaagccctggagagagtgtcatatgctcttttatttggtgattacttgccacagaatatccaggcagcgagagagatgtttgagaagctgactgaggaaggctctcccaagggacagactgctcttggctttctgtatgcctctggacttggtgttaattcaagtcaggcaaaggctcttgtatattatacatttggagctcttgggggcaatctaatagcccacatggttttgggttacagatactgggctggcatcggcgtcctccagagttgtgaatctgccctgactcactatcgtcttgttgccaatcatgttgctagtgatatctcgctaacaggaggctcagtagtacagagaatacggctgcctgatgaagtggaaaatccaggaatgaacagtggaatgctagaagaagatttgattcaatattaccagttcctagctgaaaaaggtgatgtacaagcacaggttggtcttggacaactgcacctgcacggagggcgtggagtagaacagaatcatcagagagcatttgactacttcaatttagcagcaaatgctggcaattcacatgccatggcctttttgggaaagatgtattcggaaggaagtgacattgtacctcagagtaatgagacagctctccactactttaagaaagctgctgacatgggcaacccagttggacagagtgggcttggaatggcctacctctatgggagaggagttcaagttaattatgatctagcccttaagtatttccagaaagctgctgaacaaggctgggtggatgggcagctacagcttggttccatgtactataatggcattggagtcaagagagattataaacaggccttgaagtattttaatttagcttctcagggaggccatatcttggctttctataacctagctcagatgcatgccagtggcaccggcgtgatgcgatcatgtcacactgcagtggagttgtttaagaatgtatgtgaacgaggccgttggtctgaaaggcttatgactgcctataacagctataaagatggcgattacaatgctgcagtgatccagtacctcctcctggctgaacagggctatgaagtggcacaaagcaatgcagcctttattcttgatcagagagaagcaagcattgtaggtgagaatgaaacttatcccagagctttgctacattggaacagggccgcctctcaaggctatactgtggctagaattaagctcggagactaccatttctatgggtttggcaccgatgtagattatgaaactgcatttattcattaccgtctggcttctgagcagcaacacagtgcacaagctatgtttaatctgggatatatgcatgagaaaggactgggcattaaacaggatattcaccttgcgaaacgtttttatgacatggcagctgaagccagcccagatgcacaagttccagtcttcctagccctctgcaaattgggcgtcgtctatttcttgcagtacatacgggaaacaaacattcgagatatgttcacccaacttgatatggaccagcttttgggacctgagtgggacctttacctcatgaccatcattgcgctgctgttgggaacagtcatagcttacaggcaaaggcagcaccaagacatgcctgcacccaggcctccagggccacggccagctccaccccagcaggaggggccaccagagcagcagccaccacagtaataggcactgggtccagccttgatcagtgacagcgaaggaagttatctgctgggaacacttgcatttgatttaggaccttggatcagtggtcacctcccagaagaggcacggcacaaggaagcattgaattcctaaagctgcttagaatctgatgcctttattttcagggataagtaactcttacctaaactgagctgaatgtttgtttcagtgccatatggagtaacaactttcagtggcttttttttttcttttctggaaacatatgtgagacactcagagtaatgtctactgtatccagctatctttctttggatccttttggtcattatttcagtgtgcataagttcttaatgtcaaccatctttaaggtattgtgcatcgacactaaaaactgatcagtgttaaaaaggaaaacccagttgcaagtttaaacgtgttcgaaagtctgaaaatagaacttgccttttaagttaaaaaaaaaaaaaaagctatcttgaaaatgttttggaactgcgataactgagaaacttcttaccagtccacatgcaattaaacatattcagcatatttgttattttaaaagggagggttgggaggtttcttattggtgattgtcacacggtataccatactcctctccttcaaagaatgaaaggccttgttaaggagttttttgtgagctttacttctttggaatggaatatacttatgcaaaaccttgtgaactgactccttgcactaacgcgagtttgccccacctactctgtaatttgcttgtttgttttgaatataacagagccttgatccagaagccagaggatggactaagtgggagaaattagaaaacaaaacgaactctggttggggtactacgatcacagacacagacatacttttcctaaagttgaagcatttgttcccaggatttattttactttgcatttctttttgcacaaagaacacatcaccttcctgaattctttaaatatgaaatatcattgccagggtatggcttacagtgactactattatcaatactaaaactcagagaatcaaagatggattaaactcagtggttgatgaaagccaaaacctgtttgtactgttctatactattcaggtatctttttatttctgatagttttatattataatagaaagccagccactgcttagctatcatagtcaccattttctcactgttaacattaggaaaatcaaggctactatgcttcaggattgtctggttaaatagtatgggaaaaaaactgaagagtttcaacataattacacacgtgaaataattacagcttaaactgaatttgtatttcattttattgtcagatggtggtgttcaccagcctgtatcttgtctgagactgcattcgtatctgagcaggttttctatgcctactgatgtcagtatgtttatactaaccttcatgcttttttcccagaatccctcatctgccagaaaacttgaaaagtttattgcttgtagagttgtactgctttgatttttgaagttggggtagtagttagaactagatttaactagtctataatgaacatgaaggcttttatatatgaagttgtatacctttttgtgtttagagaattatgggaaacctggtaagcaaaactttcctcccagataattgcttccaaattcgaagagttagtcaccaagagagccatatgtatgaaagcgtatctgtgaaaggtaggaaacttaccccccctaagtgtaatgttgctttaggcaactcttgtaaatagtgagacttgtttggtctcttacatgtagagatttgagtgcagttggtacagtactttggtgtctccaccactgtcccttctccccgcttcaaaataagtgtaatccacggtagcagccacacttccttcagaaggaactgttataatttatttaaaagttgaaaaaccacccaagatgactaccaactttcactttttttcttctgccatccaccctcattttccctttagcaagatttttatatctaactttccttccctccattgagtacgtgctttgagaaaacatttcttaaaacagtgtgtgccacctaaggctggatgggaaagtgcagtcttgttgttcatataaaaaacacacttcttattagtttacccacttgcctttttctattgttaatgttctgaatttccttttcttggcttgtttctacttcattttaaccctgggtcacttgctgccagcagtttgtgaatggtgtctttcaaataacttagttcttatggcttcacttaaagactgtctcaaaaatactttgctctcttcttcttttttgttcatgggacatggtacctaagcaaataggagttgggtttggtttttctcctaaaataatgctcaatacttacctaatcaaatggcatccatttgaataaaatgacaataactaaagctagttaatgtcagtgacattaaactaactccaggattcaggagttttaatgttagaatttagatttaacagatagagtgtggcttcatttgtccatggtagcccatctctcctaagaccttttctagtctgtcttcctgccttcgaacttgatgacagtaaaaccctgtttagtattctcttgtgcatttggtttgttggttagccgactgtcttgaaactattcattttgcttctagttttattttacagaggtagcattggtgggtttttttttttttttctgtctctgtgtttgaagtttcagtttctgttttctaggtaaggcttatttttgattagcagtcaatggcaaagaaaaagtaaatcaaagatgacttcttttcaaaatgtatggcccttttattgcacttttaactcagatgaatttataaattattaatcttgatactaaggatttgttacttttttgcatattaggttaatttttaccttacatgtgagagtcttaccactaagccattctgtctctgtactgttgggaagttttggaaacccctgccagtgatctggtgatgatctgatgatttatttaaagagccgttgatgcctccaggaaacttaagtattttattaatatatatataggaatttttttttattttgctttgtctttctctcccttcttttatcctcatgttcattcttcaaaccagtgttttggaagtatgcatgcaggcctataaatgaaaaacacaattctttatgtgtatagcatgtgtattaatgtctaactacatacgcaaaaacttcctttacagaggttcggactaacatttcacatgcacatttcaaaacaagatgtgtcatgaaaacagcccctttacctgccaagacaagcagggctatatttcagtgacagctggatattttgtttctgaaagtgaatctcataatatatatatgtattacacattattatgactagaagtatgtaagaaatgatcagaacaaaagaaaatttctattttcatgcaaatatttttcatcagtcatcactctcaaatataaattaaaatataacactcctgaatgcctgaggcacgatctggattttaaatgtgtggtattcattgaaaagaagctctccacccacttggtatttcaagaaaatttaaaacgatcccaaggaaagatgatttgtatgttaaagtgactgcacaagtaaaagtccaatgttgtgtgcatgaaaaggattccttggttatgtgcagggaatcatctcacatgctgtttttcctatttggtttgagaaacaggctgacactattctctttgattagaaaataaactcataaaactcataatgttgatataatcaagatgttaaccactataaatatgtagaagaggaagttttaaatagaccttaagctggcattgtgaaggaacaccatggtagactctttttggtaatggtattttgtatttaatgaaatgcagtataaaggttggtgaagtgtaataataattgtgtaaacaaatcctgtttaatagaagagatgtacagaatcgttttggtactgtatcttgaaacttgtgaaataaagattccacttttggttatcctgtatgctgtaatataccacaaccaagcaccctttccagacagactttttttaagctgaatgaatccaattttttaatgttttttggaaattcagaagcttctgaaaacattcacttgtggcaatttgaatttatctttcattttaaactcctgaaattcagatttttacaagtccaatattgccctagggagaacatgaatttgctaagaaatgttatcttttaaatctctgatatctttgtcttgaagcagccttgatatgtagtaagcgtgattcactttagcctgattataatattatttatctaaagtttgtttatgcattgccttgtcccaggaattttttaagaggacttgcagagacacgtaccacacagtaacatttagactaaatatgctctgagtaaaggagaaatgaaaaaatattaaatcaagagtgaacatgtacacaaagtgcaattggaagtgggctacaaatttagcccccagcttcccagcaggcaactcaaagaggtaactgaggtaaaatgttccagctcagaagcattggatcttggataaaaagcctacatgatgcaaactgtggcaactgagatgtcagatctcaagatctcaaattgtacttgtgggagcacagtcagtgaccccagatgaccttgactgacctaaaagttgtgggggaagtcggatgtcagagccttaacaccagcaggtgaccatccaacctggggcaatgcctgcctgttcaccacttagcctctttctggcaagtcattagaatgtcctccatcttcattggctgcaacttgatgagctacagcctctttcctaacttcctttatgatgctagtttaggttggttataccagcttggaagtatgcttagattaagttacagcagatacacaaattagatgcaagtaaaaaaaatcagaatttctgtagtagaaactacgaaaaataaaaaggaaagtttttactttttgggtatttttttacgaataagaaaaagtgagcgttaatcagttcaaaaggaggtactgctgtgtaatgggctttgtacgttccttctcatgtcacttacgtcactacttcgccatcaaattgaacaagcttttaattagatcctgaaaattcactatgctagtagtttattggtagtattatattttgagtagaactctgattttccctagaggccaaattctttttatctgggttaatttcttttaaacataacaatgttaatgctgaattgtatattaaatcccatttctaaaaaccacacaattttttctcatgtaagttgagtggaatgtggttagttaactgaatttggaatgttcatataaataatttgttgctgctc

SEQ ID NO: 22392 - DNA, 2626 bp, Homo Sapiens
gaattcctcgacactgttggcctactggatttatttgaaaggaatgaggatcctgcactcttcctccctcagtaagtaaatgccagtccctaggaagagagaaccaaaatgtctaccggaccagatgtcaaggctacagtgggggacatttccagtgatggcaatttaaacgtggctcaagaggaatgctccaggaaaggtttttgttcagtccgacatgggctggccctcatcttgcagctctgtaatttttcaatttacacccaacaaatgaacttgagcattgccattccagctatggtgaacaacacagccccacctagccagcccaatgcctccacagaacggccctccactgactcccagggctactggaatgaaactctaaaagaatttaaagcaatggcccctgcatatgactggagtcctgaaatccagggaatcatcctcagctccctcaactatggctcattcttggctccaatccccagtggctatgtggctggaatatttggagccaagtatgtggttggtgctggcttgtttatttcctcattcctgaccctcttcattccactggcagctaatgcgggagtggccttgctcattgtcctccggattgtacaaggcatagcccaggttatggtattaactggtcagtattcaatttgggtcaaatgggctcccccactggaaaggagtcaactcaccaccattgctggatcagggtcaatgctggggtccttcattgttctacttgctggtggtctcctctgccagaccataggatggccttacgtcttctatatctttggaggaattggctgtgcttgttgtcctctctggtttcctctcatttatgatgatcctgtgaatcatccctttatcagtgctggtgagaagagatacattgtgtgttcattggctcagcaggactgttcaccaggctggtctcttcccattagggctatgatcaaatccttaccactctgggccattttagtctcttatttctgtgaatactggcttttttataccattatggcgtacacaccaacgtacatcagctcggtacttcaagccaacctcagagatagtgggatcctgtctgccttgccgtttgttgttggatgtatctgcattatccttggaggtctactggcagactttcttctctccagaaaaatcctcagactcatcaccatcaggaaactcttcactgccattggggttctcttcccatccgtgatcctcgtgtccctgccctgggtcagatccagccacagcatgaccatgaccttcttggtgctgtcttctgccatcagcagcttctgtgaatcaggagcccttgttaacttcttggatattgctcctcggtacactggctttctcaaaggactattgcaagtctttgcacacatagctggagccatctctcctactgctgctggatttttcatcagtcaggattcagagtttggttggagaaatgtcttcttgctttcagctgctgttaacatatcgggcctggttttctacctcatctttggccgagcagatgtgcaggactgggctaaggagcagacattcacccacctctgagcaaaccgagagatgtgctagatcctggtgcttagttcatcattgttttccctcacagacatttctctttcatgcctgcttgactgataagccattagctagaccctgactatgtaacgctaaagattttaccatgcctggaaattttacaggggaagaaaacacgctagttatttaactgcaagctactaaaagcataggtgtgttgagatttctgtgttctccactcttccactgttatcctagtaaaagcatcaggggctggggacaatttctttccaaagcaaaagaggaagccagaccttgggaccgagaactgagaatcacaagggagttgcgcccaacatgcagaacatgaatcctctgagctgtcctcaaaagaaagccccaaacaacagaaagcatagtgttttccattgttggtgaaaaatgtcaaggaggaaagaacaataatgattccatcatgataagaggaatgaacgtgtctgcaactaatgggagcaagatagtacactttaactctttcagacaacttgcattctgtggatgccagctttggaatcagagccgcctctggaatacctgtgcttccagagttagcttttggacagttaccttctttctggccatcttgacttctgccccacatctgctttttggctttgtgcagatctttaacatgttagtgaacagacattgcccagtgtctcttctagcccctccaacagttcttcatgtagcactgcttttggacagtgacccatgatatctgccttcgtttgcccctctgactgttggaatcccacgcaccattcagtaggattcaattcaatgtggaaccattcaacattcacctcattaacctaaaatgtctcccaaagatgtatgtaagacacacactgccctaacctcacttcaaatgtctggagaaatgtgtgtagtgcttttgttaaagcccctatatgggcagcatggaggatcataagatagcaaaaccatttcaacactaaatgaatattaatgt

SEQ ID NO: 22393 - DNA, 5834 bp, Homo Sapiens
ggagccgccactgccgccgccattttgtgtctgtggagaaagaagcttctgtggcggctggaagtggacggagatcacccgcgagacggcggcgtttcatacccgaggttccccctgtgtcgtcccccatcccccctccgcggtcagcatgtggtgaagccggagccgcgagagagccggggagaggaagaggagtcggaagggaggcggggtatccagagcggcttcagcttcagctgcagcggacctcggaggggggccgcggcgcaatgtcagagcagacgccggccgaggccggtgctgcgggggcccgggaggacgcctgtcgggattatcagtcatcgctcgaagacctgaccttcaatagcaagccgcacatcaatatgctgaccattctagccgaggagaacctgcccttcgccaaggagatcgtctctctcatcgaggcccaaaccgccaaggctccttcctcagagaagcttcctgttatgtaccttatggattctattgtgaaaaacgttggaagagagtatctcactgcctttactaaaaatctagttgcaacatttatttgtgtgtttgaaaaggtggatgaaaatactaggaaaagtttatttaagttacgttctacatgggatgaaatattccctttgaagaaactttatgccctggatgtcagagtcaattcattagatcctgcttggcctattaaacctctaccccccaatgtgaatacgtctagcatccatgtgaatcctaaatttttaaataaatcgcccgaggagccttcaacacctggtacagtggtcagttcccctagcatctccactcctccaattgttcctgatatacaaaagaatcttacacaagaacaactaataaggcagcagttactggcaaagcaaaaacagttgttagaacttcagcagaaaaagctggagcttgagctagagcaagctaaggcacagttggcagtttctcttagtgttcagcaggaaacatccaatttaggtcctggatctgcaccatccaaattacatgtttcacagattccccctatggcagttaaagctcctcatcaggttcctgtgcaatctgagaaaagccgtccaggaccatccttacaaattcaggatttaaaaggaactaaccgggatcctcgtctgaacaggataagccaacattctcatggaaaagatcagagtcacaggaaagaatttctaatgaacacattaaaccagtctgatactaagacaagtaaaactataccctctgaaaaactaaattcatccaagcaagaaaaaagtaaatcaggtgaaaaaataaccaagaaagaacttgaccaattagattctaaatcgaaatcgaaatcgaaatcaccctcacctttgaaaaacaaattatctcacacaaaagacttgaaaaatcaagaatcggaaagtatgaggttgtctgatatgaacaagagagatccaagattaaaaaaacatcttcaggataagaccgatggcaaagatgatgatgtgaaagagaagagaaaaactgcagaaaaaaaggataaagatgagcacatgaagtcatccgaacacagactggctggaagtagaaataaaatcataaatggcattgtacaaaaacaggatacaataacagaagagtcagaaaaacaggggacaaaaccagggagatcgagtactagaaagcgatcaagatctcgatcacccaagtctaggtcaccaattatacattccccaaagagaagagataggcggtcacccaaacgaaggcaaagaagtatgtctccaacatcgacacctaaagctggaaagattcgccaatctggagctaagcagtcacatatggaagagtttacaccaccttctagggaagacagaaatgctaagagaagtactaaacaggatattcgggatccaaggcgaatgaaaaagactgaagaggagcgaccacaagaaactacaaatcagcattctacaaagtcaggcactgaaccaaaggagaatgtagaaaactggcaaagttccaagtctgccaaaagatggaaatctggttgggaagaaaataaaagcttacaacaggttgatgaacatagtaaacctcctcatctgaggcatagggagagctggtcaagcactaaaggaattttatcacctcgagccccaaagcagcaacagcatcgattaagtgtagatgccaatcttcagattcctaaagagttaactcttgcaagcaaaagagaattacttcaaaagacgagtgaacgtttagcatctggtgaaattacacaggatgacttccttgttgttgtgcatcaaattcgacagctatttcagtatcaagaaggtgtgcgagaagagcagagatctccattcaatgatcgttttccacttaagcgacctcgatatgaagattcagataaaccatttgtagatagtccagcatcaagattcgccggcctggatacaaatcagcgacttacagctttagctgaagacagaccgttatttgatggacctagtaggccatcagtagcaagagatggcccaacgaagatgatttttgaaggacccaataaattaagccctcgaattgatggacctcccacaccagcttctcttcggtttgatgggtcaccaggacaaatggggggaggaggccctttgagatttgaggggccacaaggtcagctaggaggtgggtgtcctttgagatttgaaggtcctccaggaccagtggggacacctctgcggtttgagggcccaattggtcaagcaggaggaggtggttttcggtttgaaggttcccctggtctgaggtttgagggatctccaggtggtttgagatttgagggaccaggaggccagcctgtgggtggtctgaggtttgagggacatcgtggtcaacctgtgggtggtctaaggtttgagggacctcatggtcagcctgtgggtggacttagatttgataatccccgaggtcagcctgtaggtggacttagatttgaggggggtcatggtccatcaggggctgcgattaggtttgatggacctcatggtcagccaggaggtggaatcagatttgagggccctttgctacagcaaggggttggaatgaggtttgagggcccccatggtcagtcagtagctggtctgagatttgagggacaacataatcaacttggtgggaaccttaggtttgagggtccacatggtcagccaggggttggtatcaggtttgaaggccctttagtccaacaaggaggtggaatgaggtttgagggtccttctgtaccaggaggtggcctgagaattgaagggcctctgggtcaaggtggtccaagatttgaaggttgtcatgctttaaggtttgatgggcagccaggtcagccgtcactcttgccaagatttgatggattacatggtcagccaggtcctagatttgaaaggactcctggtcagccaggccctcagaggtttgatggaccacctggacagcaggttcaacccagatttgacggtgtacctcaaagatttgatggtccacaacatcagcaagcatcaaggtttgatattcctcttggtcttcaaggcacaagatttgacaatcatccttcacaaaggcttgaatcagtatctttcaatcagactggtccatataatgatccacctggcaatgcttttaatgccccatcccaaggactacagttccaaagacatgaacaaatatttgattcacctcaaggaccaaattttaatggaccacatggccctggaaaccagagtttctctaatccacttaacagagcttctggacactattttgatgaaaaaaatcttcagagttctcaatttggaaactttggcaatatacctgctccaatgacagtaggaaatattcaggcatctcaacaggttctgagtggtgttgctcagccagtagcttttggtcaaggacaacagtttttaccagttcatccacaaaatcctggatttgttcagaatccttcaggagccctccctaaggcatatcctgataatcatctcagtcaggtggatgtaaatgaattgttttcaaaattgctaaaaacaggaattctcaaattgtcccaaactgattcagctacaacacaagtaagtgaagtaactgctcagcctccccctgaagaggaggaagatcaaaatgaagatcaagatgttccagatcttactaattttacagttgaagaattgaaacaacgttatgacagtgttataaatcgactgtacactggtattcagtgttactcttgtggaatgaggtttacaacatcacagacagatgtttatgcagatcatttggactggcattatcggcaaaatagaactgaaaaggatgttagccgaaaagtcactcatagacgttggtactacagtttaacagactggatagaatttgaggagatagctgatctggaagaacgggcaaagagccagttttttgaaaaggtgcatgaagaagttgtgctcaaaactcaagaggctgctaaagaaaaagagttccaaagtgtacctgctggaccagctggagcagttgagagttgtgaaatctgtcaagaacaatttgaacaatactgggatgaagaagaggaggaatggcatttgaaaaatgctattagagtagatggaaagatttatcatccatcatgttatgaagattatcaaaatacatcttcatttgattgtacaccatctcccagcaagacaccagttgaaaaccccttgaatattatgttgaacattgtcaaaaacgaattgcaggaaccctgtgacagtcccaaagttaaggaagaacgaattgatacaccaccagcttgtacagaggaaagcatagcaacaccctctgaaattaaaacagaaaatgacacagtcgagtcagtttaaataaaatgagaaaggtatgtttttcttttttaaaaaagctgctgttggatctagaaggtgaagaatttttttatgtatatatagacatatctatataaattgtctggctgaggcagggccttcagctatcatttggttaataaatacattttagtatttgcatttcctactgcctgcagagtttcaggtgcttgttgtgtgaaagttctgtagatgtgtgcaaatttaacgaaatgaaattgtatgtgtaaaaatgtacgatttttcactgtgcaactgtaaattataaataaaaaatatttttgctattcatggagtgtaatatttatgcacaccatcaaatagtttctgtactttttattgggtaaaaatggaattgaacagcaacctcaacataagattttttttctagtagcctcccactgattaaagaagcaagtttgaggtttcatccttcaaaagggggttccgagagagcaccgtagggcttttctcaaatagaaaagccagattttgaaaaaattttaaagataaaataggacatattttgcagatatatatatatatatacacaaacacatctccaggtatagagaaccatccagatgttcacttttgaaaatatctaatgatgcaaagttttattcttgaacttggacactgatgccatcaaacaattaacaaatatatttaagtactaaaggtgattttttttttaaagactttttcaaattgtcaaatgatttaatgcagatgaacatatttctattttaagtaacgggaatctgtaagaatgtttgcttgagatatggttaacttttttcttttgttggttttgacttagatggacaccatgagatgttaatattcatacatgtaataaatagaatgatgaag

SEQ ID NO: 22394 - DNA, 5025 bp, Homo Sapiens
gagccggtggttgcagcggaggcggtgatgtcggtgcaggttgtgtcagccgcggctgccgccaaggtgcctgaggtggagctgaaggacctgagcccctccgaggcggagtcgcaactaggactgagcacggccgccgtgggcgccatggcccccccggcgggcggtggagaccctgaggctccagctcccgccgcggagcggcccccggtccccggcccgggctcggggcccgccgccgctctcagccccgccgccgggaaggtgcctcaggcgtcggccatgaagcggagcgacccacatcaccagcaccagcggcaccgcgacggcggcgaggccctggtcagccccgacggcaccgtcaccgaggcgccgcgcacagtcaagaagatccagtttgctgaccagaagcaagaattcaacaaacgtcccaccaaaattggacgtcgctctttgtctcgttccatttctcagtcatctactgacagctacagctcagcggcttcatatacagatagctctgatgatgagacatcgcccagggacaagcagcaaaagaactctaagggaagcagtgacttctgtgttaagaacatcaaacaggcagagtttggacgaagagaaattgaaattgctgaacaagaaatgcctgcattgatggctttgaggaagagagctcaaggagaaaagcctttggctggagccaaaatcgtgggttgcacacacatcactgctcagactgctgtgcttatggaaactctgggtgctctgggggcccagtgccgatgggctgcctgcaacatctattccactctcaatgaagtggctgctgctctagcagaaagtggatttcctgtttttgcctggaagggagagtcagaagatgacttttggtggtgtatcgatagatgtgtgaatgtggagggctggcagccaaacatgatcttggatgatggaggggatcttacccactggatttataaaaagtatcccaacatgtttaagaaaatcaagggcatagtagaggagagtgttactggagttcacaggctgtaccaactgtccaaagctgggaagctgtgtgttccagccatgaatgtcaatgactcagtcaccaaacagaaatttgacaacctctactgttgccgtgaatcaattcttgatggacttaaaaggacaacagacatgatgtttggtggaaagcaagtggtagtctgtggctatggagaggtggggaaagggtgctgtgctgccctgaaagccatgggctccattgtgtatgtaactgaaattgaccccatctgtgccctgcaagcctgtatggatggatttcgactggtgaaattaaatgaggtcatccgacaagtggacattgttattacctgtacaggtaacaagaatgtggtaaccagagagcacttggaccgtatgaagaatagctgcatcgtttgtaacatgggacattccaacacagagattgacgtggcgagtctgcggacaccagaactgacctgggagcgagtgagatctcaagttgaccatgtgatatggcctgatggcaagaggatagtactgctggcagagggccgcctgctgaaccttagctgctccacagtgcctacatttgtgctctcaatcactgctactactcaggctcttgccttgatagagctttacaatgctcctgagggtcgctataagcaggatgtctacctgttgcccaagaagatggatgagtatgtggccagcctacacctgcctacctttgatgcccacttgacagagctgacagatgaacaggccaagtatctgggactcaacaagaatgggcccttcaagcctaattactacaggtattaagttcctgtaactcaaaccagaatttttaaggaatagaactccaagccttttctccactactatacaagaaagaattcagcaagctgcttctccaatcaaagctgcctgccgtgctcaccctgtgtgttaggttatttatttattaaaatcaagaatcctgtgcctgtagtgttggcccagagtgtggttactgccctgagggccatgaaagccacagaggatgggctgaggaaggaaagaaatggggttactgctcccagtgcatcatttgcatcattccccattgactgaatcctcagcagtggccgtttttcctcttgtccaggctcacgagttagtccagggattccatactccctattccctggagttttctggaataaattttcagcacctgcttttctcagcttggcccttccccgggtgaggccgtttggaattaacatggccagtgtttcacacaagattgggttcccaatcttgaccatcactatcactgccttctttatataaaggctaataaggaaggagtgttatttatggctttgccaagctacatcaagaactcagctgtgctgtgcctaccaggggtctcctttcttacccaggactcctttcttctccttgaatatttatgtccattttaacacttcctggttgcaagagggatgtgcctccattatttcctccacagttttggtatttgtcagacatttgttctgctgtctttctaatccagccaacgtctgctcaggaagtggggccagctccactgggacccatagttttacttccttgtcatttgattggatagtttccaaggaagcccctccagattggcactatctcagaaaaggagagcttgttgtgaaacactgcttcctgaaacttcctgctattgcctaaagctacgtctgaaactgagtagggaaaggcatacttttccagggacttagggggataggctttggaaatgggacaggtctttcagactcacagcttgataccctaacaaagcagagtatatttatttgtttcccaggaaggccattgcagtttgactggctgagggatacagagatgaaattgtaaactgtatccagattatcaaagctaatttgactagtttgaacctcgtcagacattcattcctttggccattgccatggatgaaaccgagatctgcagtctgatctgtggacttctctgctggcatatcttttatgatttaacctcttccatttgatgattctgtatttcagagtcagtttcttgagtaactccagtgctacaaaaagaattagtaatgtggtgtgggcagcgtgacattttatgtcccacccaaaaattggattccttttggagactgatctgttggtctcaggcatttcattaggaccagattggttctaagagttagtctggactggccctaggaaacttgaattaaataagcctcttccccttaccgatcctttttaacactctcaggtttgtttgtttcccacttttttcctatgctggtctgcctcaaagtctcaagaccaaggtgactcaagataacaccagaccacgcatgatcaccaaaaccttcccatcctgattctcttcttctacctctaccctctccaacttctcctggtcttcacatatactctcaaagctagtctgaaagtgaccttactttcggaagtagggaagtggaactttggtaaatgactgtttgcctcatttaatagtatacaggctcagcccatagactacagttcttcagaggccatatgtctcagcaagtactggttatattctttttttgtaaggaagatcataaatgctaaaaattccactaagccattcagttcttccttttgcctacctagtcctgatttttgtattaattggttccctttagcaagggattcagatctttgtaccttatcttatatccagagcagattccatttggcagatagatggtctctagcctattgtattcttagaccaaaaatcataacctgctgtttctcagcaaagccttgctctctggagcttactatgtgctggtacttaaagagtacattctgccttgctgtagtgaagagacccactccaaataaaaaaggggccacacggggcttctaagttaggttgccagtgttgctgcccatgatgagttatttgcctctgagtttcagatgacctctctgtagggacactgtgttatcaaccattaagaagaaagaaccacaagcctcccaagtatttgggttctatcttagggttgaaatctggtcattattccctctacccttggaatcagagcaatgtgtcttctttcctccaacctcttaccttagatgcatcctggttatctggaagcatgggaaagaaggctacttatctctttgtatgtggctccagtctgtgaggatacataacattttctctacaatgaatctgtgctaatattttgccttctttctttcttttcttttcacccttagagacagggtttcactatgttgcccaggctggtctcaaactcctgggctcaagcaatcctcctgcctcagcttcctgagtagctggaaccacaggtgtgtgctaccgtgcctggcacttttttgccttcttaatggagatattcagttttctttttttcatttaaacaaagaaaaaaaatgtatctactctaccttccctctgctctcctccctccctatcctacttgcccatatgagcacggctccccatggccacatactcctgcaaagcttttatgctgcttcgcttttctctaaacagatctgatattgctgctcctgtggttttctcaaaattaactttgccgtggtttttaaaaaggaatcaaaatgcattgttgcattaagctttttcaataaaggaaaattacggaaggaaaataggcaacaccagcaaattatatgtggacaggttctaaactctatatatacatatatatatatatatctatatatctatatacgtaatcatctagttctgtcatcttactgaaaggaataacacttctaaagatcaccatttctgagaagttcttggaaatctttatgtctaagtgattgtattagatcagcaataatgactatgtaatctcaaaaaacaaataaaatattcttaacatgg

SEQ ID NO: 22395 - DNA, 4401 bp, Homo Sapiens
gggctggctgcggcggtctcgctcggctgtccgttccttgctggagaatttggccacaaagagctgccaagatagctgggccaggaagaaagcgccgcagccctgacccagacgctgttgccgaccccggggcactctggctgtcgaccaagcggctcaagatgtctggcggggccagtgccacaggcccaaggagagggcccccaggactggaggacaccactagtaagaagaagcagaaggatcgagcaaaccaggagagcaaggatggagatcctaggaaagagacagggtctcgatatgttgcccaggctggtcttgaacctctggcctcaggtgatccttctgcctcagcctcccatgcagctgggatcacaggctcacgccaccgtacccggctgttctttccttcatcgtcagggtcagcatccactcctcaagaggagcagaccaaagagggagcttgtgaagaccctcatgatctcttggctactcccactccagagttgttgctcgattggaggcagagtgcagaagaggtgattgtcaagcttcgtgtgggagtaggtcccctgcagctggaggatgtagatgctgctttcacagatacagactgtgtggtgcggtttgcaggtggtcagcagtggggtggtgtcttctatgctgagataaaaagctcttgtgctaaagtgcaaacccgcaagggcagtctcctgcacctgacactgcccaaaaaggtgcctatgctcacgtggccctccctcctggttgaggctgatgaacagctttgcataccaccgctgaactcccaaacctgcctcctgggctcagaggagaatttagcccctttggcaggagagaaagcagtgcctcccgggaatgacccagtctctccagccatggtccggagcagaaaccctgggaaagatgactgtgccaaggaggagatggcagtggcagcagatgctgcaaccttggtggatgagcccgagtcgatggtgaacctggcgtttgtcaagaatgactcgtatgagaagggcccggattcagtggtggtgcacgtgtacgtgaaggagatctgcagggacacctcaagagtacttttccgtgagcaggacttcacgctcatcttccagaccagggatggaaacttcctgaggctgcacccgggctgtgggccccacaccaccttccgttggcaggtgaagctcaggaatctgattgagccagagcagtgcaccttctgtttcacggcttctcgcatcgacatctgccttcgtaagaggcagagtcagcgctgggggggcctggaggccccggctgcacgagtgggtggtgcaaaggttgccgtgccgacaggtccaacccctctggattcaaccccaccaggaggtgctccccaccccctgacaggccaggaggaggcccgggctgtggagaaggataaatccaaggcacgatctgaggacacagggctagacagtgtggcaacccgcacacccatggagcatgtaaccccaaagccagagacacacctggcctcgcccaagcctacatgcatggtgcctcccatgccccacagcccagttagtggagacagcgtggaggaggaggaagaggaagagaagaaggtgtgtctgccaggcttcactggccttgtcaatttaggcaacacctgcttcatgaacagcgtcattcagtctctgtccaacactcgggaactccgggacttcttccatgaccgctcctttgaggctgagatcaactacaacaacccactagggactggtgggcgtctggccattggctttgccgtgctgcttcgggcgctgtggaagggcacccaccatgccttccagccttccaagttgaaggccattgtggcgagtaaggccagccagttcacaggctatgcacagcatgatgcccaggagttcatggctttcctgctggatgggctgcacgaggacctgaatcgcattcagaacaagccctacacagagaccgtggattcagatgggcggcccgatgaggtggtagctgaggaagcatggcagcggcacaagatgaggaatgactctttcatcgtggacctatttcaggggcagtacaagtcgaagctggtgtgccctgtgtgtgccaaggtctccatcacttttgacccgtttctttatctgccggtgcccttgccacaaaagcaaaaggttctccctgtcttttattttgcccgagagccccacagcaagcccatcaagttcctggtgagcgtcagcaaggagaactccactgcgagcgaagtattggactccctctctcagagtgttcatgtgaagcctgagaacctgcgtttggcggaggtaattaagaatcgttttcatcgtgtgttcctaccctcccactcactggacactgtgtccccatctgatacgctcctctgctttgagctgctatcctcagagttggctaaggagcgggtagtggtgctagaggtgcaacagcgcccccaggtgcccagcgtccccatctccaagtgtgcagcctgccagcggaagcaacagtcggaggatgaaaagctgaagcgctgtacccggtgctaccgtgtgggctactgcaaccagctctgccagaaaacccactggcctgaccacaagggcctctgccgacctgagaacattggctaccccttcctggtcagtgtacctgcctcacgcctcacttatgcccgcctcgctcagttgctagagggctatgcccggtactctgtgagtgtattccagccaccctttcagccaggccgcatggccttggagtctcagagccctggctgcaccacactgctctccacaggttccctggaggctggggacagcgagagagaccccattcagccacctgagctccagctggtgacccctatggctgagggggacacagggcttccccgggtgtgggcagcccctgaccggggtcctgtgcccagcaccagtggaatttcttctgagatgctggccagtgggcccattgaggttggctccttgccagctggcgagagggtgtcccgacccgaagctgctgtgcctgggtaccagcatccaagtgaagctatgaatgcccacacaccccagttcttcatctataaaattgattcatccaaccgagagcagcggctagaggacaaaggagacaccccactggagctgggtgacgactgtagcctggctctcgtctggcggaacaatgagcgcttgcaggagtttgtgttggtagcctccaaggagctggaatgtgctgaggatccaggctctgccggtgaggctgcccgggccggccacttcaccctggaccagtgcctcaacctcttcacacggcctgaggtgctggcacccgaggaggcctggtactgcccacagtgcaaacagcaccgtgaggcctccaagcagctgttgctatggcgcctgccaaatgttctcatcgtgcagctcaagcgcttctcctttcgtagttttatctggcgtgacaagatcaatgacttggtggagttccctgttaggaacctggacctgagcaagttctgcattggtcagaaagaggagcagctgcccagctacgatctatatgctgtcatcaaccactatggaggcatgattggtggccactacactgcctgtgcacgcctgcccaatgatcgtagcagtcagcgcagtgacgtgggctggcgcttgtttgatgacagcacagtgacaacggtagacgagagccaggttgtgacgcgttatgcctatgtactcttctaccgccggcggaactctcctgtggagaggccccccagggcaggtcactctgagcaccacccagacctaggccctgcagctgaggctgctgccagccaggcttcccggatttggcaggagctggaggctgaggaggagccggtgcctgaggggtctgggcccctgggtccctgggggccccaagactgggtgggccccctaccacgtggccctaccacaccagatgagggctgcctccggtactttgtcctgggcaccgtggcggctttggtggccctcgtgctcaacgtgttctatcctctggtatcccagagtcgctggagatgagctcgcctgcaggcagctgctgtgagctggcctacctgcctgccccaggccatgcctgcctttgttgtggggaacacctctgggctttgggcctcagcttatgcatctggtgggagagggtggggaggttgtggcccctgcaggggcagagtatcctagggtgtgtatccatctggctgtctgtccattcatcctgctgctctgacccttggcctcaggcttggccctgcccaagctacttcctgtacttaaaagtgttaataaaaccagactattcaggccc

SEQ ID NO: 22396 - DNA, 4434 bp, Homo Sapiens
atgccggccgtgtccaagggggacgggatgcggggcctggcggtcttcatctcggatatccgcaactgtaaaagtaaagaagcagaaataaaaaggataaacaaggaactggcaaatatcagatcaaaatttaaaggtgacaaggctcttgatggctatagtaaaaaaaagtacgtctgcaagttgctcttcatctttctccttggtcatgacattgactttggacacatggaggctgtgaacctgctgagttcaaacagatacacggaaaagcagatcggctaccttttcatctctgtgttggtgaactcaaacagtgagctgatccgcctgatcaacaacgccatcaagaatgacctggccagccgcaaccccaccttcatgggcctggccctgcactgcatcgccagcgtgggcagccgggagatggccgaggccttcgccggggagatccctaaggtcctcgtagccggagacactatggacagcgtgaagcagagcgcggccctgtgcttgctgcgcctgtacaggacgtcccccgatcttgtccccatgggcgactggacatcccgagtggtgcacctgctcaatgaccagcacttgggtgtggtaactgcagccacaagtctgatcaccactttagcacagaagaacccagaagagtttaaaacctccgtgtctctggctgtctctaggctaagcagaatcgtgacgtctgcatccacagatctccaggattacacttactattttgtcccggctccctggctgtctgtcaaactgctgagactgctgcagtgctacccacccccagaccctgcagtgcgaggccgcctgactgagtgcctggagaccatcctgaacaaagcccaagaaccgcccaagtcgaagaaggtccagcactccaacgcgaagaatgccgtgcttttcgaggccatcagcttaatcattcaccatgacagtgagccgaacctgctcgtccgtgcctgcaaccagttgggccagtttctgcagcaccgcgagaccaacctgcgctacctggccctggagagcatgtgcacgctggccagctctgagttctcccatgaggctgtcaagacgcacatcgagacggtcatcaacgccctgaagactgagcgggacgtgagcgtgcggcagcgggccgtggacctcctctacgccatgtgcgaccgcagcaacgccccacagatcgtggccgagatgctgagctatctggagacagctgactactccatccgagaagagattgtgctgaaggtcgccatcctggctgagaagtacgcggtggactacacctggtatgtggataccatcttgaacttgatccgaattgctggtgattacgtgagtgaagaggtgtggtaccgagtcattcagatcgtcatcaaccgggacgacgtgcagggctacgcggccaagactgtgttcgaggctcttcaggctcccgcgtgccacgagaacctggtcaaagtgggcggctacatcctgggggagtttggaaacttgatagctggagacccgagatccagcccgctgatccagttccacctgctgcactccaagttccacctgtgcagcgtccccacccgcgcgctgctcctgtccacctacatcaagttcgtgaacctcttcccggaggtgaagcccaccatccaggacgtgctgcgcagcgacagccagctcaggaacgcagacgtggagctgcagcagcgtgctgtggagtacctgcggctcagcaccgtggccagcaccgacattctggcgaccgtgctggaggagatgcccccattcccggagcgggagtcctccatcttggcaaagctcaagaagaagaagggccccagcacggtgacagacctggaggacaccaagcgggacaggagtgtggacgtgaacgggggtcctgagcctgccccagccagtaccagcgccgtgtctacgccttctccgtcggcagacctgctgggtctcggggctgccccccctgcccccgcgggccccccaccctcctccggcggcagcgggctgctcgtggacgtgttctcagactcggcctctgtggtcgcgcctctcgctcctggctccgaagacaactttgccaggtttgtttgtaaaaacaatggtgtgttgtttgaaaaccagctgcttcaaattggacttaagtctgaatttcggcagaatttaggtcggatgtttatcttttatggtaataagacctccacgcagttcctaaactttaccccaacactaatctgttcagacgaccttcagcctaacctgaacctgcagaccaagcccgtggacccgaccgtggaggggggcgcgcaggtgcagcaggtggtcaacatagagtgcgtgtccgacttcacggaggcgccagtcctcaacattcagttcaggtatgggggcaccttccagaacgtgtctgtgcagctgcccatcactctcaacaaattcttccagccgacagaaatggcttctcaggatttctttcaacgttggaagcagttgagcaatccacagcaggaagtgcagaacatcttcaaagcaaagcacccaatggacacagaagtcaccaaagccaagatcattggatttggttctgcacttcttgaagaagttgatcctaatcctgcgaatttcgtgggagctggaatcatccacacgaaaaccacccagattggatgcctgctgcgcttggagccgaacctgcaagcccagatgtaccggctcacgctgcgcacaagtaaggaagccgtttctcagagattatgtgaattgctctcagcgcagttttagtcctgaggatggaagaccaggctcgtgtgtcttgtgttgtcttcgtctgtgccgtttgtcttcgtggctatcctgcagatgagcaccgtgtccagtgccacagcacaaggcgcctccccgccccaccgccccacacctctcccctttgggctggacgggaacacacgtgtgtggctcaggaggaaaagctcagcctggactgtggcagccacggcagaaggtggatcttgggatcaatttttataaaaatcgagacagttctgtggttaaatctacaaattaaagggaaattagaagttggcgtgaacgtggcgtttgtgggagtgtcactgagatggcccgtgctgccgcccaccccgcctcggagcctctgggagcagcagtgccactgtgcatggcgtgggctgagccttggtgtgtggccgtcctggtggctgcacacctggcgtcgtcctgggcccttgggaggagcacagctgaccctggttttgctgcagtcccagctggactgttttcccaggcaggattttaatctagaatttagaaacatttgtatttgtaatgacttctggcaaaagcacgtgtcctggccggatgtaactgttctcctttcccagctcctgtttgtgaagggcgtctgttatgctcctgcagtcgccgaggccttggatgtgcagccaggggaggagcgtcctgccggccccgcagggcccccaggactccagggtaaagtgtgggccggtggcgcaagactcagaggtgtgctcgtctctttcctgtcagagtgggcgtccccaggccacggtgcaggcctgagtccttccaccggccccgtccagtcgtccctggaggggctgtggaggaaggacgcctctgtgtggtcaggaagtgaaggggccattggccgcatgccatgtgccacctgcggcttgtgtctcacctgtcatctggactcagcacccaggctgcacatctgacacctgagaggcgagagagtggggccggcctaggagccaaggctggggccttgcgctctgtccccaggatggtggccttgtttgtcctaaacacacccagcacaggttctggcttcctgacatgctgtggaggcagggagggtgggtggccacatgtgcttgagggttttcaccctggccctcagttgcctgctgtgcgggtccctggggcagctgcaggggctcacggacccatcagggtctccacagctcccctgcagtgtgtgcaccccacaatgtctgcggctcttcttccggcgtgtcgggctttgatcacagcatagccacgtcagtggcgtgcgcctctcgcacaggccattctgggtctggtggtgccaggtgccgtgacacgccgtgctgggcttgtgctgcagctgggtggtgtggccctcattctcatgttccagctgctgggcagtgctctgcctgtgtgctgcgcctgcaggctgcgtgtgctgccgtggatctcctgcatcccttgacccctcccgccatcagaggaaaggctgctccccgaggcaccgcttccctgtgcggcgctgcagaggggccctcagtgtggcactcctcgtcaaagaaaaataaaggctagaactgc

SEQ ID NO: 22397 - DNA, 5896 bp, Homo Sapiens
cccggcgcccgggcctgaggactggctcggcggagggagaagaggaaacagacttgagcagctccccgttgtctcgcaactccactgccgaggaactctcatttcttccctcgctccttcaccccccacctcatgtagaagggtgctgaggcgtcgggagggaggaggagcctgggctaccgtccctgccctccccacccccttcccggggcgctttggtgggcgtggagttggggttgggggggtgggtgggggttgctttttggagtgctggggaacttttttcccttcttcaggtcaggggaaagggaatgcccaattcagagagacatgggggcaagaaggacgggagtggaggagcttctggaactttgcagccgtcatcgggaggcggcagctctaacagcagagagcgtcaccgcttggtatcgaagcacaagcggcataagtccaaacactccaaagacatggggttggtgacccccgaagcagcatccctgggcacagttatcaaacctttggtggagtatgatgatatcagctctgattccgacaccttctccgatgacatggccttcaaactagaccgaagggagaacgacgaacgtcgtggatcagatcggagcgaccgcctgcacaaacatcgtcaccaccagcacaggcgttcccgggacttactaaaagctaaacagaccgaaaaagaaaaaagccaagaagtctccagcaagtcgggatcgatgaaggaccggatatcgggaagttcaaagcgttcgaatgaggagactgatgactatgggaaggcgcaggtagccaaaagcagcagcaaggaatccaggtcatccaagctccacaaggagaagaccaggaaagaacgggagctgaagtctgggcacaaagaccggagtaaaagtcatcgaaaaagggaaacacccaaaagttacaaaacagtggacagcccaaaacggagatccaggagcccccacaggaagtggtctgacagctccaaacaagatgatagcccctcgggagcttcttatggccaagattatgaccttagtccctcacgatctcatacctcgagcaattatgactcctacaagaaaagtcctggaagtacctcgagaaggcagtcggtcagtcccccttacaaggagccttcggcctaccagtccagcacccggtcaccgagcccctacagtaggcgacagagatctgtcagtccctatagcaggagacggtcgtccagctacgaaagaagtggctcttacagcgggcgatcgcccagtccctatggtcgaaggcggtccagcagccctttcctgagcaagcggtctctgagtcggagtccactccccagtaggaaatccatgaagtccagaagtagaagtcctgcatattcaagacattcatcttctcatagtaaaaagaagagatccagttcacgcagtcgtcattccagtatctcacctgtcaggcttccacttaattccagtctgggagctgaactcagtaggaaaaagaaggaaagagcagctgctgctgctgcagcaaagatggatggaaaggagtccaagggttcacctgtatttttgcctagaaaagagaacagttcagtagaggctaaggattcaggtttggagtctaaaaagttacccagaagtgtaaaattggaaaaatctgccccagatactgaactggtgaatgtaacacatctaaacacagaggtaaaaaattcttcagatacagggaaagtaaagttggatgagaactccgagaagcatcttgttaaagatttgaaagcacagggaacaagagactctaaacccatagcactgaaagaggagattgttactccaaaggagacagaaacatcagaaaaggagacccctccacctcttcccacaattgcttctcccccaccccctctaccaactactacccctccacctcagacaccccctttgccacctttgcctccaataccagctcttccacagcaaccacctctgcctccttctcagccagcatttagtcaggttcctgcttccagtacttcaactttgcccccttctactcactcaaagacatctgctgtgtcctctcaggcaaattctcagccccctgtacaggtttctgtgaagactcaagtatctgtaacagctgctattccacacctgaaaacttcaacgttgcctcctttgcccctcccacccttattacctggagatgatgacatggatagtccaaaagaaactcttccttcaaaacctgtgaagaaagagaaggaacagaggacacgtcacttactcacagaccttcctctccctccagagctccctggtggagatctgtctcccccagactctccagaaccaaaggcaatcacaccacctcagcaaccatataaaaagagaccaaaaatttgttgtcctcgttatggagaaagaagacaaacagaaagcgactgggggaaacgctgtgtggacaagtttgacattattgggattattggagaaggaacctatggccaagtatataaagccaaggacaaagacacaggagaactagtggctctgaagaaggtgagactagacaatgagaaagagggcttcccaatcacagccattcgtgaaatcaaaatccttcgtcagttaatccaccgaagtgttgttaacatgaaggaaattgtcacagataaacaagatgcactggatttcaagaaggacaaaggtgccttttaccttgtatttgagtatatggaccatgacttaatgggactgctagaatctggtttggtgcacttttctgaggaccatatcaagtcgttcatgaaacagctaatggaaggattggaatactgtcacaaaaagaatttcctgcatcgggatattaagtgttctaacattttgctgaataacagtgggcaaatcaaactagcagattttggacttgctcggctctataactctgaagagagtcgcccttacacaaacaaagtcattactttgtggtaccgacctccagaactactgctaggagaggaacgttacacaccagccatagatgtttggagctgtggatgtattcttggggaactattcacaaagaagcctatttttcaagccaatctggaactggctcagctagaactgatcagccgactttgtggtagcccttgtccagctgtgtggcctgatgttatcaaactgccctacttcaacaccatgaaaccgaagaagcaatatcgaaggcgtctacgagaagaattctctttcattccttctgcagcacttgatttattggaccacatgctgacactagatcctagtaagcggtgcacagctgaacagaccctacagagcgacttccttaaagatgtcgaactcagcaaaatggctcctccagacctcccccactggcaggattgccatgagttgtggagtaagaaacggcgacgtcagcgacaaagtggtgttgtagtcgaagagccacctccatccaaaacttctcgaaaagaaactacctcagggacaagtactgagcctgtgaagaacagcagcccagcaccacctcagcctgctcctggcaaggtggagtctggggctggggatgcaataggccttgctgacatcacacaacagctgaatcaaagtgaattggcagtgttattaaacctgctgcagagccaaaccgacctgagcatccctcaaatggcacagctgcttaacatccactccaacccagagatgcagcagcagctggaagccctgaaccaatccatcagtgccctgacggaagctacttcccagcagcaggactcagagaccatggccccagaggagtctttgaaggaagcaccctctgccccagtgatcctgccttcagcagaacagatgacccttgaagcttcaagcacaccagctgacatgcagaatatattggcagttctcttgagtcagctgatgaaaacccaagagccagcaggcagtctggaggaaaacaacagtgacaagaacagtgggccacaggggccccgaagaactcccacaatgccacaggaggaggcagcagagaagaggccccctgagccccccggacctccaccgccgccacctccaccccctctggttgaaggcgatctttccagcgccccccaggagttgaacccagccgtgacagccgccttgctgcaacttttatcccagcctgaagcagagcctcctggccacctgccacatgagcaccaggccttgagaccaatggagtactccacccgaccccgtccaaacaggacttatggaaacactgatgggcctgaaacagggttcagtgccattgacactgatgaacgaaactctggtccagccttgacagaatccttggtccagaccctggtgaagaacaggaccttctcaggctctctgagccaccttggggagtccagcagttaccagggcacagggtcagtgcagtttccaggggaccaggacctccgttttgccagggtccccttagcgttacacccggtggtcgggcaaccattcctgaaggctgagggaagcagcaattctgtggtacatgcagagaccaaattgcaaaactatggggagctggggccaggaaccactggggccagcagctcaggagcaggccttcactgggggggcccaactcagtcttctgcttatggaaaactctatcgggggcctacaagagtcccaccaagagggggaagagggagaggagttccttactaacccagagacttcagtgtcctgaaagattcctttcctatccatccttccatccagttctctgaatctttaatgaaatcatttgccagagcgaggtaatcatctgcatttggctactgcaaagctgtccgttgtattccttgctcacttgctactagcaggcgacttaggaaataatgatgttggcaccagttccccctggatgggctatagccagaacatttacttcaactctaccttagtagatacaagtagagaatatggagaggatcattacattgaaaagtaaatgttttattagttcattgcctgcacttactgatcggaagagagaaagaacagtttcagtattgagatggctcaggagaggctctttgatttttaaagttttggggtggggggttgtgtgtggtttctttcttttgaattttaatttaggtgttttgggtttttttcctttaaagagaatagtgttcacaaaatttgagctgctctttggcttttgctataagggaaacagagtggcctggctgatttgaataaatgtttctttcctctccaccatctcacattttgcttttaagtgaacactttttccccattgagcatcttgaacatactttttttccaaataaattactcatccttaaagtttactccactttgacaaaagatacgcccttctccctgcacataaagcaggttgtagaacgtggcattcttgggcaagtaggtagactttacccagtctctttccttttttgctgatgtgtgctctctctctctctttctctctctctctctctctctctctctctctgtctgtctcgcttgctcgctctcgctgtttctctctctttgaggcatttgtttggaaaaaatcgttgagatgcccaagaacctgggataattctttactttttttgaaataaaggaaaggaaattcagactcttacattgttctctgtaactcttcaattctaaaatgttttgttttttaaaccatgttctgatggggaagttgatttgtaagtgtggacagcttggacattgctgctgagctgtggttagagatgatgcctccattcctagagggctaataacagcatttagcatattgtttacacatatatttttatgtc

SEQ ID NO: 22398 - DNA, 1433 bp, Homo Sapiens
tagtgtcctcccttttcagtccgcgtccctccctgggccgggctggcactcttgccttccccgtccctcatggcgctgctccgacgcccgacggtgtccagtgatttggagaatattgacacaggagttaattctaaagttaagagtcatgtgactattaggcgaactgttttagaagaaattggaaatagagttacaaccagagcagcacaagtagctaagaaagctcagaacaccaaagttccagttcaacccaccaaaacaacaaatgtcaacaaacaactgaaacctactgcttctgtcaaaccagtacagatggaaaagttggctccaaagggtccttctcccacacctgaggatgtctccatgaaggaagagaatctctgccaagctttttctgatgccttgctctgcaaaatcgaggacattgataacgaagattgggagaaccctcagctctgcagtgactacgttaaggatatctatcagtatctcaggcagctggaggttttgcagtccataaacccacatttcttagatggaagagatataaatggacgcatgcgtgccatcctagtggattggctggtacaagtccactccaagtttaggcttctgcaggagactctgtacatgtgcgttggcattatggatcgatttttacaggttcagccagtttcccggaagaagcttcaattagttgggattactgctctgctcttggcttccaagtatgaggagatgttttctccaaatattgaagactttgtttacatcacagacaatgcttataccagttcccaaatccgagaaatggaaactctaattttgaaagaattgaaatttgagttgggtcgacccttgccactacacttcttaaggcgagcatcaaaagccggggaggttgatgttgaacagcacactttagccaagtatttgatggagctgactctcatcgactatgatatggtgcattatcatccttctaaggtagcagcagctgcttcctgcttgtctcagaaggttctaggacaaggaaaatggaacttaaagcagcagtattacacaggatacacagagaatgaagtattggaagtcatgcagcacatggccaagaatgtggtgaaagtaaatgaaaacttaactaaattcatcgccatcaagaataagtatgcaagcagcaaactcctgaagatcagcatgatccctcagctgaactcaaaagccgtcaaagaccttgcctccccactgataggaaggtcctaggctgccgtggcccctggggatgtgtgcttcattgtgccctttttcttattggtttagaactcttgattttgtacatagtcctctggtctatctcatgaaacctcttctcagaccagttttctaaacatatattgaggaaaaataaagcgattggtttttcttaaggt

SEQ ID NO: 22399 - DNA, 2438 bp, Homo Sapiens
ccggcgggggcgccgcggagagcggagggcgccgggctgcggaacgcgaagcggagggcgcgggaccctgcacgccgcccgcgggcccatgtgagcgccatgcggcgccgcgcagcccggggacccggcccgccgcccccagggcccggactctcgcggttgccgctgctgccgctgccgctgctgctgctgctggcgctggggacccgcgggggctgcgccgcgcccgcacccgcgccgcgcgccgaggacctcagcctgggagtggagtggctaagcaggttcggttacctgcccccggctgaccccacaacagggcagctgcagacgcaagaggagctgtctaaggccatcacagccatgcagcagtttggtggcctggaggccaccggcatcctggacgaggccaccctggccctgatgaaaaccccacgctgctccctgccagacctccctgtcctgacccaggctcgcaggagacgccaggctccagcccccaccaagtggaacaagaggaacctgtcgtggagggtccggacgttcccacgggactcaccactggggcacgacacggtgcgtgcactcatgtactacgccctcaaggtctggagcgacattgcgcccctgaacttccacgaggtggcgggcagcaccgccgacatccagatcgacttctccaaggccgaccataacgacggctaccccttcgacggccccggcggcaccgtggcccacgccttcttccccggccaccaccacaccgccggggacacccactttgacgatgacgaggcctggaccttccgctcctcggatgcccacgggatggacctgtttgcagtggctgtccacgagtttggccacgccattgggttaagccatgtggccgctgcacactccatcatgcggccgtactaccagggcccggtgggtgacccgctgcgctacgggctcccctacgaggacaaggtgcgcgtctggcagctgtacggtgtgcgggagtctgtgtctcccacggcgcagcccgaggagcctcccctgctgccggagcccccagacaaccggtccagcgccccgcccaggaaggacgtgccccacagatgcagcactcactttgacgcggtggcccagatccgcggtgaagctttcttcttcaaaggcaagtacttctggcggctgacgcgggaccggcacctggtgtccctgcagccggcacagatgcaccgcttctggcggggcctgccgctgcacctggacagcgtggacgccgtgtacgagcgcaccagcgaccacaagatcgtcttctttaaaggagacaggtactgggtgttcaaggacaataacgtagaggaaggatacccgcgccccgtctccgacttcagcctcccgcctggcggcatcgacgctgccttctcctgggcccacaatgacaggacttatttctttaaggaccagctgtactggcgctacgatgaccacacgaggcacatggaccccggctaccccgcccagagccccctgtggaggggtgtccccagcacgctggacgacgccatgcgctggtccgacggtgcctcctacttcttccgtggccaggagtactggaaagtgctggatggcgagctggaggtggcacccgggtacccacagtccacggcccgggactggctggtgtgtggagactcacaggccgatggatctgtggctgcgggcgtggacgcggcagaggggccccgcgcccctccaggacaacatgaccagagccgctcggaggacggttacgaggtctgctcatgcacctctggggcatcctctcccccgggggccccaggcccactggtggctgccaccatgctgctgctgctgccgccactgtcaccaggcgccctgtggacagcggcccaggccctgacgctatgacacacagcgcgagcccatgagaggacagaggcggtgggacagcctggccacagagggcaaggactgtgccggagtccctgggggaggtgctggcgcgggatgaggacgggccaccctggcaccggaaggccagcagagggcacggcccgccagggctgggcaggctcaggtggcaaggacggagctgtcccctagtgagggactgtgttgactgacgagccgaggggtggccgctccagaagggtgcccagtcaggccgcaccgccgccagcctcctccggccctggagggagcatctcgggctgggggcccacccctctctgtgccggcgccaccaaccccacccacactgctgcctggtgctcccgccggcccacagggcctccgtccccaggtccccagtggggcagccctccccacagacgagccccccacatggtgccgcggcacgtcccccctgtgacgcgttccagaccaacatgacctctccctgctttgtaaaaaaaaaaaaaaaaaaa

SEQ ID NO: 22400 - DNA, 2025 bp, Homo Sapiens
ggagcgggcgccgggaccgggaatccccgagctgcgccttctggggacgcggcccgggctacgtcggggccgtccgtggggagcggggtcctggaggctgcgcggggctgaggcggcctcgatttgggaactgcctgaagatgccggcctaagcctggagtccaggcatggacttccccacaatttcccgatccccttcggggcctccagccatggacttggaggggcccagggacattcttgtgccttcggaggacctcacccctgacagccagtgggaccctatgccaggaggccccggcagcctcagtcggatggaacttgatgagtcaagccttcaggagctggtgcagcagtttgaagctctgccaggcgatctggtgggcccatccccaggtggagccccctgtcccctacacattgccacaggccatggcctggcctcccaggagattgctgatgcccacgggctcctgtctgccgaagctggccgggatgacctgctgggcctcttgcactgcgaggaatgcccgccttcccagactggtcctgaagagcctctagagcctgccccccgactgttgcagccccctgaggacccagatgaggattctgactccccagaatgggtggagggggcctctgctgagcaggagggcagcaggagctcaagcagttccccggaaccctggctggagacggtgcctctagtcacacctgaagagccacccgctggtgcccagagccccgagaccctggcttcctaccctgccccccaggaggtgcctggtccctgtgaccatgaagacctcctggacggtgtcatatttggggccaggtacctggggtccacccagctggtgtcggaacggaacccgcccaccagcacgcgcatggcccaggcccgggaggccatggaccgcgtcaaggcccccgatggggagacccagcccatgacggaggtggacctgttcgtctccaccaagaggatcaaggtcttgacagcggactcccaggaggccatgatggaccacgccctgcataccatctcctacacagccgacatcggctgcgtgctggtgctgatggcgcggcggcggctggcacggaggccggcaccccaggaccacggccgccgcctctacaagatgctctgccacgtattctacgcggaggacgcccagctcatcgcccaggccattggccaggccttcgccgccgcctacagccagttcctacgggaaagcggtattgaccccagccaggtgggcgtgcacccgagcccaggcgcctgccacctccataatggggacctggaccacttctccaacagtgacaactgccgggaggtgcacctcgagaagcggcgaggggagggcctgggcgtggccctggtggagtcgggctggggctccctgctgcccacagccgtcatcgccaacctgctgcacggggggcctgctgagcgctcgggggccctcagcatcggggaccgcctgaccgccatcaacgggaccagcctggtggggctgcccctggctgcgtgccaggccgctgtccgcgagacgaagtcgcagacgtcggtgacactcagcatcgtccactgccctcccgtcaccaccgccatcatccaccggccccacgcccgcgagcagctgggcttctgcgtggaggacggcatcatctgcagcctcctccgtggtggcatcgccgagcgtgggggcatccgcgtcggccaccgcatcattgagatcaatgggcagagtgtggtggccacgccacacgcccgcatcatcgagctgctcaccgaggcctatggcgaggtgcatatcaagacgatgccagctgccacatatcgcctccttacaggccaggagcagcccgtgtacctgtgaccacctcatcccttgcctgccactgtgccttcgcctccatggccccggagccccatcctgggcctgccctggctggccaggaccccagcggttcttggtcctgtatgatttcctaatataaaaacagtaa

SEQ ID NO: 22401 - DNA, 2373 bp, Homo Sapiens
tggcctcttcaccctggtgacctctgttccgtattctgtcactgagagacgccctgggacatctgtggtggcttttgtcgcgctgggacctaccctggctacgggagttgggaggacccgggacaccgcacagccgggaaatggactcagtggcctttgaggatgtggctgtgaacttcacccatgaggagtgggctttgctgggtccatcacagaagaatctctacagagatgtgatgcgagaaaccattaggaacctgaactgtataggaatgaaatgggaaaaccagaacattgatgatcagcaccaaaatctcaggagaaatccaaggtgtgatgtggtagagagatttggtaaaagtaaagatggtagtcagtgtggagaaaccttaagccagattcgaaatagtattgtaaacaagaacactcccgccagagtagatgcatgtggaagcagtgtgaatggagaagtcataatgggtcattcatccctgaattgctacatcagagttgatactggacacaaacaccgggagtgtcatgaatatgcagagaagtcatatacacataagcagtgtgggaaaggcttaagttatcgccactcctttcaaacatgtgaaaggcctcacgctggaaagaaaccctatgattgtaaggaatgtggaaaaaccttcagttctcctggaaaccttcgaagacatatggtagtaaaaggtggagatggaccttataaatgtgaattgtgtgggaaagcctttttttggcccagtttattacgtatgcatgaaagaactcacactggagagaaaccatatgaatgtaagcagtgttctaaagccttccctgtttacagttcctatctaagacatgaaaaaatacacactggggagaaaccgtatgaatgtaagcagtgttctaaagccttccctgattacagttcatatctaagacatgaaagaactcacactggagagaaaccctacaaatgtaaacaatgtgggaaagccttcagtgtttccggttcccttcgagtacatgaaagaattcacactggagagaaaccctatacatgtaaacagtgtgggaaagcgttttgtcatcttggaagctttcaaagacacatgataatgcacagtggagatggacctcataaatgtaagagatgtgggaaaggctttgattttcctggttcagcacgaattcatgaaggaactcacactctagagaaaccctatgaatgtaagcaatgtgggaaattgttatctcatcgctcaagctttcgaagacacatgatggcacacactggagatggccctcataaatgcacagtatgtgggaaagcctttgattctcctagtgtatttcaaagacatgaaaggactcacactggagagaaaccctatgaatgcaagcaatgtgggaaagccttccgtacttccagttcccttcgaaaacatgaaacaacacacactggagagcaaccctataaatgtaaatgtggaaaagcttttagtgatttattttcctttcaaagtcatgaaacaacacacagtgaagaggagccttatgaatgtaaggagtgtgggaaagcatttagttcttttaaatacttttgtcgccatgaaaggactcacagtgaagaaaaatcttatgagtgtcaaatttgtgggaaagccttcagtcgtttcagttacttaaaaactcatgaaaggactcacacggcagagaagccatatgaatgtaagcaatgcaggaaagcattcttttggccctctttccttctaagacatgaaaggactcacactggagaaagaccctatgaatgtaaacactgtggtaaagccttcagtcgttccagtttctgtcgagaacatgaaagaactcacactggagagaagccctatgaatgactcagtgacctttgaagatgtggctgtgaacttcacccaggaggaatggactttgctggatccttcacagaaaaaactctacagagacgtgatgtgggaaaccttcaggaacctggccactataggaacaaaacaaaaagaatggaacattgaagagcagtacaaaaaccaggggagaaatctcagaaatcatatggtagagagactctgtgaaagtaaagaaggtagtcatggcggagaaggtttcagccagattgcaaatctcagtctgaacaagaaaactccttctggaggaaagctttgggaaagcagtgtatgtggaaaagtcttgagccatcattcatcccttaacaggcacattagatcttacaccagacacaaactgtataagtgtcaggaatatggagagaagccatataaatgtaagaaatgtgggaaacccttcagttatctgcagtcttta

SEQ ID NO: 22402 - DNA, 1577 bp, Homo Sapiens
tatgtggaccggatataagatcttaatcttctcttatcttactacagaaatctggatggagaagcagtatttatctcaaagagaagtggacctagaggcttatttcactaggaatcacaccgttttgcaaggtactcgattcaaaagagccattttccaagggcaatactgtagaaattttggctgttgtgaagacagagatgatggctgtgtcactgagttctatgcggcgaatgcgttgtgctactgtgataaattctgtgacagagaaaattctgattgctgtcctgactacaagtccttttgccgtgaagagaaagaatggcctcctcacacacagccttggtatccagaaggttgcttcaaagatggtcaacattatgaagagggatcagtaattaaagaaaactgcaactcctgcacatgctcaggacagcaatggaaatgttcccagcatgtatgccttgttcgtccagaattaattgaacaggtcaataaaggagactatggatggacagcacagaattacagccaattttggggaatgactttagaagatggttttaaatttcgccttggcactttgccacctagtctcatgctcctgagcatgaatgaaatgacagcttctttacctgcaacaactgatcttccagagttttttgttgcttcttataaatggcctggatggactcatggcccattggatcaaaaaaattgtgctgcatcctgggcattttccactgcaagtgtggctgctgaccgaatagcaattcagtctaagggtcgatacacggccaatctatcccctcagaatttgatctcttgctgtgccaagaaccgtcatggatgcaatagtggaagcatcgatagggcttggtggtacctgagaaaacgtggactggtatcccacgcatgctacccacttttcaaagaccaaaatgctaccaacaatggatgtgccatggcaagcaggtctgatgggcgaggaaaacggcatgccacgaagccatgtcccaacaacgtagaaaaatctaacaggatctatcaatgttctcctccatacagagtctcttccaacgaaactgagataatgaaagaaatcatgcaaaatggaccagttcaagccataatgcaagtccatgaagatttcttccattataagacagggatatacagacatgttaccagcacaaataaagaatcagaaaaatatcgaaagcttcagacacatgcagtcaaactcactggatggggcacactgagaggagcacaagggcagaaagaaaaattttggattgctgccaattcctggggaaagtcatggggagagaatggctatttcaggattcttcgaggagtaaatgagtccgacattgaaaagttgattatcgcagcttggggccaactgacgagttctgatgaaccataacatatcattaaatttccataaggtcatgcctttaagtaaccccctaaattgaagtttagcaatatgacattcttggtgacagtggaatctttgtctcttcaccgtgttaacataatctatctattttcttattttcccctctgga

SEQ ID NO: 22403 - DNA, 8337 bp, Homo Sapiens
  misc_feature (31)..(31): n is a, c, g, or t
  misc_feature (37)..(37): n is a, c, g, or t
  misc_feature (41)..(41): n is a, c, g, or t
  misc_feature (60)..(60): n is a, c, g, or t
  misc_feature (74)..(74): n is a, c, g, or t
acaggtggtgatccactacacccggcatacntttttntttntttgaagtcgatctcgagnaaataaaaataaantaatttagtctgtgtcatgcaatctttgggatatacttataccagaaaaaagtatttccgagatccaaacctaaccagatgcgtttacttttacctgccacatggtggcccccccatccttcggtgggcaggggagggtggggggtggcccaggataacccgccctgtgcctacaggcaggcaggtgctccgggatcacaactgtctgcagacgctgctgcagcatctgacttcgcacagcctgaccatcgtgagcaacgcgtgcggcacgctctggaacctgtcggcccgcagcgcccgtgaccaggagctgctgtgggacctgggcgccgtgggcatgctgcgtaatctggtgcactccaagcacaagatgatcgccatgggcagcgccgccgccctgcgcaacctgctggcccatcggcccgccaagcaccaggcggccgccaccgccgtgtccccaggcagctgcgtgcccagcctgtacgtgcgcaagcagcgggcgctggaggccgagctggacgcacggcacctcgcgcaggcgctggagcacctggagaagcagggcccgccggcagccgaggccgccactaagaagccgctgccgcccctgcgacacctggacggcctggcccaagactatgcttccgattcgggctgctttgacgacgacgatgcaccgtcatccctggctgcggccgcggccaccggggagccagccagccctgccgcgctgtccctcttcctgggcagccccttcctgcaggggcaggcgctggctcgcaccccgcccacccgccgaggcggcaaggaggcagagaaggacaccagtggggaggcagccgtggcggccaaggccaaggccaagctggcgcttgcagtggcgcgcatcgaccagctggtggaggacatctccgccctgcacacctcgtccgacgatagcttcagcctcagctctggagacccgggacaggaggcgccacgggagggccgcgcccagtcctgctcgccatgccgcggcccggagggcgggcggcgagaggcaggaagccgggcgcacccgctgctgcggctcaaggcggcccacgccagcctctccaacgacagcctcaacagcggcagtgccagcgacgggtactgcccacgcgaacatatgctgccctgcccgctggccgcactggcttcgcgccgcgaggaccccaggtgtgggcagcctcggcccagccggcttgaccttgacctgcccggctgccaggccgagcccccggcccgcgaggccacctccgccgacgcccgcgtgcgcaccatcaagctgtcgcctacctatcagcacgtgccactgcttgagggtgcctcaagggcgggtgcagagcccctcgcggggcctggaatctctccaggggcccggaagcaggcctggctgccggcagaccacctgagcaaggttcccgagaagctggcggctgccccgctgtctgtggccagcaaggcactgcagaaactggcggcgcaagaggggccactctcgctgtcccgatgcagctccctttcctcgctgtcctcggccggccgcccaggccccagcgagggtggtgacctggatgacagtgactcctccctggaggggctggaggaggccggccccagcgaggctgagctggacagcacgtggcgggcgcccggggccacctcgctgcccgtagccattccggctccccggcgtaaccgaggccggggcctgggggtggaagacgccacgccgtccagctcgtcggagaactacgtgcaggagacaccgcttgtgctgagccgctgcagctctgtgagctcgctgggcagcttcgagagcccgtccatcgccagctccatccccagtgaaccttgcagcgggcagggcagcggcaccatcagccctagcgagctgcccgacagccccggacagaccatgcctcccagccggagcaagacgccaccgctggcgcccgcgccacagggtccccccgaggccacccagttcagcctgcagtgggagagctacgtgaagcgcttcctggacatcgccgactgccgggagcgctgccggctgccatctgagctggacgcaggcagcgtgcgctttaccgtggagaagccagacgagaacttctcgtgcgcctccagcctcagcgcgctggccttgcacgagcactacgtgcagcaggacgtggagctgcggctgctgccctcggcctgccccgagcgcggcgggggcgccgggggcgccggcctccattttgcagggcaccggcggcgggaggaggggccggcgcccacgggttctcgccctcgcggcgccgcggaccaggagctggaactgctgcgggagtgcctgggagccgccgtgcctgcccggctgcgcaaggtggcctccgcgctggtgccaggtcgccgcgcactccccgtgcccgtctacatgttggtgcccgccccggccccggcccaggaggacgactcctgcactgactccgcggagggcacgccggtcaacttctctagcgccgcctcgctcagcgacgagacgctgcagggaccccccagggaccagcccgggggaccagcgggcaggcaaagacccaccggccgccccacctctgccagacaggccatggggcaccggcacaaggcgggaggcgccggccgcagcgcggagcagtctcggggcgcgggcaagaaccgagcagggctggagctgcccctgggccggcccccgagcgcccccgcagacaaggacggctcaaagcccggccggacccgcggggacggggcgctccagtcgctgtgcctcacgacgcccactgaggaggccgtgtactgcttctacggcaacgactcggacgaggagcccccggcggccgcgcccacgccaacccaccggcgcacatcggccatccctcgcgcttttacgcgggagcgtccgcagggccggaaggaggcccctgccccgtccaaggctgcaccagctgccccgccgcccgcccggacccagcccagcctcattgctgacgagaccccgccctgctactccctgagctcctccgccagctccctcagcgagcccgagccctcggagccgccggccgtccatccacgaggccgggagcccgcggtcaccaaggacccgggcccaggaggcggacgcgacagctcgcccagcccgcgggccgcggaggagcttctgcagcggtgcatcagctcggccctgcccaggcgccggccccccgtgtctggcctgcggcgccgcaagccccgagccacccggctggatgagcggcccgcagaggggtcccgggaacgcggcgaggaggcagcgggctcggaccgggcctccgacctggatagcgtggagtggcgcgccatccaggagggcgccaattcaattgtcacgtggctgcaccaggcagcagctgccacgcgggaggcctcgtccgagtccgactccatcctgtccttcgtatccgggctgtcagtgggatccaccctacagccccccaagcacaggaagggacgacaggcggagggagaaatgggcagtgcccggcggccagagaaaaggggcgcagcctcagtcaagaccagcgggagcccccgttcccctgcaggccccgagaagccacgtggcacacagaagaccacgcccggggtgccagctgtgctccggggacgaacagtgatctacgtccccagcccggcaccccgtgcccagcccaaagggacccccggcccccgcgccacaccgcggaaggtggcgcccccttgcctggcacagcccgcggctccagccaaagtcccgagccccgggcagcagcggtcgcggagcctacaccggcctgccaagacctcggagctggcgacgctgagccagccccccagaagcgccacaccgcccgcccgcctcgccaagaccccctcctccagctcctcccagacctcgcccgcctcccagcccctgcccagaaagcgccccccggtcacccaggctgctggggccctgcccggccccggagcctccccggtgcccaaaacgccggcgcgcacccttctggcgaagcagcacaagacgcagagatcgcccgtgcggatcccgttcatgcagaggccggcccggcgtgggccgccaccgctggctcgggcagtcccggagccgggccccaggggccgggcggggaccgaggcgggcccgggggcgcgcgggggccgcctgggcctggtgcgtgtggcctcagccctctccagcggcagcgagtcctccgaccgctcgggcttccggcgacagctaaccttcatcaaggagtcgccgggcttgcggcgccgccgctccgagctgtcctcggccgagtccgcggcctctgccccccagggcgcctcgccccgccgcggccggcccgcgctgcccgccgtcttcctctgctcctcgcgctgcgaagagctccgagcggcaccccggcagggcccggccccggcccggcagcggccccccgcggcccgacccagccctggcgagcgccctgcccggcgcaccacctccgagagcccgtcccgcctgcctgtgcgcgcgcccgccgcccggccggagactgtcaagcgctacgcgtcgctgccgcacatcagcgtggcccgcaggcccgacggcgccgtccccgcggcccctgcctcagccgacgccgcgcgccgcagcagcgacggggagccccggccgctccccagggtggccgcgccgggcacgacctggcggcgcatccgagatgaggacgtgccccacatcctgcgcagcacgcttcccgccacggccctgccactgcggggctccacgcccgaggacgccccggccgggcccccgccgcgcaagaccagcgacgccgtggtccagaccgaggaggtcgccgcccccaagaccaactccagcacgtccccgagcctggagaccagggagccccccggggcccccgccggcggccagctctccctcctcggcagcgacgtggacggtcccagcctcgccaaggctcccatctccgcacccttcgtgcacgagggcctgggggtcgccgtggggggcttccccgccagccggcacggctcccccagccgctcggcccgagtaccccccttcaactatgtgcccagccccatggtggtcgcagccaccaccgactcggccgcggagaaagccccggccactgcctccgccaccctcctggaatagtggcctaggccggccttctggaacgttctctcccggccctgcggcgcggtctggctgccccatgggcctgcgctgtagacgtcccccataggtcgccccagggcctctgcccacccgagccccaccactctcagaacccccgcccagcgcacggcgacctcgcgcctcaccggaagaccttgcctctgtgccgcggaggtccaggaggaaacggggcggccgctaggcctcaagtcccgaccgtggagcgctggcaagggcgtcctggcccagccctgagcgcgcggcccttcccctgtcggaagccgttgcttgaccccgggcgagggaggcggtagcctccgggtccgggtctgggtctgggtccgctgcttcgcagggacagcgctggggaggtgacggcgcccgccgcaggtggggcgaggctgggggagggcggcgccgcggcgggcctgccagctgggggcctttgcggcgcgcaggggcgaagcctgtaatcactgcagccgccggtaattcgctaatgagggctttgcagggattgttttcattctcagccccagctgtgggagtgcgggtgggggtgtggccgagccccggcaggaagccccgcccagacggtgttcagggaacccggagcccaagcgctccggcggagcccaaaagggtgggggtgggaggggcagaggccaacggatccccctgcctgtcgcaccccttggcgggagacgggaaggcagcgggctgcgtacgatgggacctggtgcagacgccgggccggctgacatttggaccccatcccagaggagatgctggctaccagctggggcgaccccaagggtcgctggagtcagtatcggcccggcgcagccgcggcgggcgaggccaatggaaaggagactgaggggagtcccggcagtgagcccgaggccctgggacctggagcccgcgctggcctctccccagcggagcctgcacgttacggagaccatcacatgtgggcgtggtcagtgcccaggaccgcaccgctgctcatcttgtcccttttcaattcccttctggttcatgatgcataaagcgctaggccctagaactccagaaacagcacagctggggcggggacccagccttgccctccacccgaggctctgggacaaggcgggaggttcgggggccttccggcaggtgaacgcagggctggagagtatttggtgccagatgaggtgaaagcttatagaagggcctgaggggctcggctgcctcatcccctggcgggggaggctgggagctgggcctcctgcgtggggtgggactcgcaggggccgggtctccgtgactggggcaacgcctcgtcctgcagagggagccgacaacctcttttctgcagaaaagctccagcaggcgctgccttcacccacggatctgcccaggctgaaggcacacgctcaatgccccacgtgccttctccaggaggaacgaaccagggtttgagggttgggtggatggagctcaaaaggaaaccccagccccaccacggatgacccatccctcccgtcccatccccagcatgggcaaggccagcctttctggcaaaaggagctgtcctcaactcagggccgctgtgagcaaagctgaccccagcccccacccccagttaacactgctgcttctctgaatgcatgtcaccctgcaccccatgctccgggcccacaccctgcaggacaaggagctccagacaggacgtccataagtcaccgaggtgtgccacccagcaggtgctggaggtgcccaatgctccctcctaggacctcgcagccaggcaaggctgtcaggttgttttgggggaaaagggggtcatggatggctgaacaaaaagcggggaaaatgcaggctgagtggggcgacctcctgcctgccaggagccccctttcaggacacagcgggggtctcacacttgctgtccccatccatggcccgagggggaacctggtggtctcttctgagcttttggacttggggatgccaaacacgtgctcaccctcacactcgccccggcccgctgcgcccctaattgccaaagggtagggaaatggcgaagccagccaccaggtcgctggtgacagggccagggttatgcaggaaggtggtgcggcattgccttccacatatgtaagtctctgggcggcgccctcccagctccctgcctctgtttccccatgtgggccgtggggaactcccagagctacctcttgggggagcgtggtggcagcgatgatggggagacgcctggaagctcacagaacttgggtctggctggctcctgcccgtgacgccttgcccagcagcaaggtgcgcaacatggctgccagccccgcctcccacccccaccccgagtcctgagctcactttcgccttctccatcccctgccgtgggggccacagccacacctcaccgcccagtccagctgtgctccagaaggggacaggcagtccgcggtctctggacaatcaactcaaggtacgcccactgcaaggcctccctcccaccgcggcccctgcctggccacctggcctctctgcaccagggtgacaaggggtcctcgtctgccccccaatgctccagggccagtcctaaggagctgagggtctgaggacgcagggagggtggaggtgtcctgaggctgatggacagtgaccgccactggcccccaacatgaccacacgtgggtgctgaactcggggcgccgtgcccaccggcatggtcctcccgagctccgacagcattacctcacccggccccatctgttgccccggtccagccctgatggcgcgcgcctggtctgtctgattcccctagccgccaccccacgtttctgtaccgggtttctgcagtgttaaacggacgtgtaaatagtggtaaatagtgaaagcctgtccttccctaaatgtaaagccatctgtccggcgtaaggacgacaccgtcagctgtccgactcgcacacatttaataaactgagctcttgc

SEQ ID NO: 22404 - DNA, 6830 bp, Homo Sapiens
ccacggtaaggggatgacgtagctttgccaaagacttagaagctaagcagaaaatgagcttaacatcctggtttttggtgagcagtggaggcactcgccacaggctgccacgagaaatgatttttgttggaagagatgactgtgagctcatgttgcagtctcgtagtgtggataagcaacacgctgtcatcaactatgatgcgtctacggatgagcatttagtgaaggatttgggcagcctcaatgggacttttgtgaatgatgtaaggattccggaacagacttatatcaccttgaaacttgaagataagctgagatttggatatgatacaaatcttttcactgtagtacaaggagaaatgagggtccctgaagaagctcttaagcatgagaagtttaccattcagcttcagttgtcccaaaaatcttcagaatcagaattatccaaatctgcaagtgccaaaagcatagattcaaaggtagcagacgctgctactgaagtgcagcacaaaactactgaagcactgaaatccgaggaaaaagccatggatatttctgctatgccccgtggtactccattatatgggcagccgtcatggtggggggatgatgaggtggatgaaaaaagagctttcaagacaaatggcaaacctgaagaaaaaaaccatgaagctggaacatcagggtgcagcatagatgccaagcaagttgaggaacaatctgcagctgcaaatgaagaagtactttttcctttctgtagggaaccaagttattttgaaatccctacaaaagaattccagcaaccatcacaaataacagaaagcactattcatgaaatcccaacaaaagacacgccaagttcccatataacaggtgcagggcatgcttcatttaccattgaatttgatgacagtaccccagggaaggtaactattagagaccatgtgacaaagtttacttctgatcagcgccacaagtccaagaagtcttctcctggaactcaagacttgctggggattcaaacaggaatgatggcacccgaaaacaaagttgctgactggctagcacaaaacaaccctcctcaaatgctatgggaaagaacagaagaggattctaaaagcattaaaagtgatgttccagtgtacttgaaaaggttgaaaggaaataaacatgatgatggtacgcaaagtgattcagagaacgctggggctcacaggcgctgtagcaaacgtgcaactcttgaggaacacttaagacgccaccattcagaacacaaaaagctacagaaggtccaggctactgaaaagcatcaagaccaagctgttactagctctgcgcatcacagaggggggcatggtgttccacatgggaaattgttaaaacagaaatcagaggagccatcggtgtcaatacccttcctacaaactgcattattaagaagttcagggagtcttgggcacagaccaagccaggagatggataaaatgttaaaaaatcaagcaacttctgctacttctgaaaaggataatgatgatgaccaaagtgacaagggtacttataccattgagttagagaatcccaacagtgaggaagtggaagcaagaaaaatgattgacaaggtgtttggagtagatgacaatcaggattataataggcctgttatcaacgaaaaacataaagatctaataaaagattgggctctcagttctgctgcagcagtaatggaagaaagaaaaccactgactacatctggatttcaccactcagaggaaggcacatcttcatctggaagcaaacgttgggtttcacagtgggctagtttggctgccaatcatacaaggcatgatcaagaagaaaggataatggaattttctgcacctcttcctttagagaatgagacagagatcagtgagtctggcatgacagtgagaagtactggctctgcaacttccttggctagccagggagagagaaggagacgaactcttccccagcttccaaatgaagaaaagtctcttgagagccacagagcaaaggttgtaacacagaggtcagagataggagaaaaacaagacacagaacttcaggagaaagaaacacctacacaggtataccagaaagataaacaagatgctgacagacccttgagtaaaatgaacagggcagtaaatggagagactctcaaaactggtggagataataaaaccctacttcacttaggcagctctgctcctggaaaagagaaaagtgaaactgataaggaaacttctttggtaaagcaaacattagcaaaacttcaacaacaagaacaaagggaggaggctcagtggacacctactaaattgtcttccaaaaatgtttcaggtcagacagataaatgtagggaggaaacttttaaacaagaatcacaacctccagaaaaaaattcaggacattctacaagcaaaggagacagagtggcacaaagtgagagcaagagaagaaaagctgaggaaattctgaaaagtcagactccaaagggaggagacaagaaggaatcctccaagtcattagtgcgacaagggagcttcactatagaaaaacccagcccaaacatacccatagaacttattccccatataaataaacagacttcctctactccttcttctttagcattaacatctgcaagtagaatacgagaaagaagtgagtctttggatcctgattctagtatggacacaacccttattctaaaagacacagaagcagtaatggcttttctagaagctaaactacgtgaagataataaaactgatgaaggaccagatactcccagttataatagagacaattctatttcaccagaatctgatgtagatacagctagtacaatcagtctggttactggagaaactgaaagaaagtcaacccaaaagcgaaagagtttcactagcctctataaagataggtgttccacaggttctccttccaaagatgttacaaaatcatcatcttcaggtgctagggaaaaaatggaaaagaaaacaaaaagtcgttccacagatgtgggttcaagagcagatggtcgtaaatttgttcagtccagtgggagaataagacagccctcagtagacttaacagatgatgaccaaacctctagtgtacctcattctgccatctctgatattatgtcatctgatcaagaaacttactcttgtaaacctcatggacggactccacttacctcagctgatgagcatgtacattccaaactggaaggaagtaaagtaacgaaatctaagacttctccggtggtatctggttcatctagtaaatcaaccacccttccaaggccacgacctaccaggacttccctcttgcgcagagcacgacttggtgaagcttcagacagtgaacttgctgatgctgacaaagcatctgttgcttctgaagtatccacaacaagttctacatcaaaacctcccacaggaaggcgtaacatctctcggattgatttattggctcagcctcgtagaacacgacttggctcactgtcagctcgtagtgactctgaagcaacaatttctagaagtagtgcctcttcgaggaccgcagaagccatcattagaagtggagccagactagtaccatcagataaattttctcctagaattagagctaacagtatctctcgactctcagactccaaggtcaaaagtatgacctcagctcatggctctgcttcagtaaattcaagatggaggcgctttcctactgattatgcttccacctcagaagatgaatttggatcaaaccgtaattcccctaaacatacccgtctacgtacttctccagccctgaaaaccactcgcttgcagagcgctggatcagcaatgcctactagttcttcattcaaacaccggattaaagagcaggaagactacatccgagattggactgctcatcgagaagagatagccaggatcagccaagatcttgctctcattgctcgggagatcaacgatgtagcaggagagatagattcagtgacttcatcaggcactgcccctagtaccacagtaagcactgctgccaccacccctggctctgccatagacactagagaagagttggttgatcgtgtttttgatgaaagcctcaacttccgaaagattcctccattagttcattccaaaacaccagaaggaaacaacggtcgatctggtgatccaagacctcaagcagcagagcctcccgatcacttaacaattacaaggcggagaacctggagcagggatgaagtcatgggagataatctgctgctgtcatccgtctttcagttctctaagaagataagacaatctatagataagacagctggaaagatcagaatattatttaaagacaaagatcggaattgggatgacatagaaagcaaattaagagccgaaagtgaagtccctattgtgaaaacctcaagcatggagatttcttctatcttacaggaactgaaaagagtagaaaagcagctgcaagcaatcaatgctatgattgatcctgatggaactttggaggctctgaacaacatgggatttcccagtgctatgttgccatctccaccgaaacagaagtccagccctgtgaataaccaccacagcccgggtcagacaccaacacttggccaaccagaagctagggctcttcatcctgctgctgtttcagccgcagctgaatttgagaatgctgaatctgaggctgatttcagtatacatttcaatagattcaaccccgatggggaagaggaagatgttacagtacaagaatgactttctcttgattgttgaaaaatcattacctgtggaatggctaggaatattggaagcagcatagtgttgatgtacgcaaaacaagacagcttggtcagctacaatcttggaatccctgtcttcttaattttatttatttatttttgacgtataatgtagtatatcaatcctttcaaactatttagataaccacttgatgcacaaataggaaaaagcagattgtggcagtgtcgccttttgtggttttatgattttcaaattgaatttaatgattacaccctttcccttcatagatcttttttcttttttttaagccatgctgtgacctacaagcaaactaaatagccaacatttctgaacccctaagtctcctgtgccaagctgctccctgaaatggacttcttcatctgtacagatttgttaaaccattctatttgcttcttaataataggatttatattagtactcattaccattggacacaatgacataagtactctccacagtaaagcagacctttcacaacagtcactctgtgtcctaaaattttccaacatagatgtgatttatataactttgttgatacgtaaattgtcttggggtttacggaaattaactattatgtttgcactaagatttgctgggagtggtaggtggacatatctatatatcaataaggactaaccgtcttttttgtacataggggattgataatactgtatttgttttaagcccacagtgtttttactccactttcaaaaagtcaatttgggcactttttttcatttttttttaatgggaataagatttggtctctcattttaggttaaatgataactagaaagattaaactagacagatagtttaggtggagtatatttttaaaactcagaacatgtatattggtcctgtgttaccaagtttatatgtgacagttgaaaaagaaattcccttgaaatgatcatgaggttaaaattttcttcattaggggacttggagaaccagtagtcgtaagattagttgatagtttcactcccaagcaatgaattgcttctgtgtgtttccctgtaggactcaatagtaaatgctgtctgtcttacacatttataaggaccctgcaagacgacgacaaaggcctttggcctgtgctactaaacaagaagcctatgaaaaatttcttctttaaacttgttttttctctttccagtaagttcacatttggataattttaaaaagaaaagtaattacctttgtgtttccagaacactataattggggtgtatcttaattcagttaaatattattagtagacctggattttcccccttgaccccatcagtctataaaggttaaactgcaacttttatgaaatggtctttaatatttccacaataatcctgtgctatatttgttttaagaaacaaagtaactctatacacttcaagactttacaggattttttaaatcctgtattgttggatcaattaataaagatgcaaaaaaactttatagagatgtaaaaacaaaactataatggatctcctatttttctttaaatacaaaaaaaaaaaggtaaatgaactattctccttgtaaagctaaattccccattctgtctaataaaggaagactgaaaaaaggttttaaagaacataaatggaaagatacaaatgctttgaaggaataaacgaaatgttaaaacagggtcaatccatttgaagaaaaagttggacaaaataatcagcattgctccctcttttatttaatatttgggtactgattatatccacatggaagtagaaggtaaggagtttaggaaaatactagaatctactctgcttacattcttgtttaagtgtttacacagtttggttcaattataaacatttggccttttactatgttatttttattttgtatgaatacattatcctccttatttatttttgttacatttattacttatgttattttgttatgcatttacaactccatttttaaataaagtgtttctggaacttt

SEQ ID NO: 22405 - DNA, 6456 bp, Homo Sapiens
ccacggtaaggggatgacgtagctttgccaaagacttagaagctaagcagaaaatgagcttaacatcctggtttttggtgagcagtggaggcactcgccacaggctgccacgagaaatgatttttgttggaagagatgactgtgagctcatgttgcagtctcgtagtgtggataagcaacacgctgtcatcaactatgatgcgtctacggatgagcatttagtgaaggatttgggcagcctcaatgggacttttgtgaatgatgtaaggattccggaacagacttatatcaccttgaaacttgaagataagctgagatttggatatgatacaaatcttttcactgtagtacaaggagaaatgagggtccctgaagaagctcttaagcatgagaagtttaccattcagcttcagttgtcccaaaaatcttcagaatcagaattatccaaatctgcaagtgccaaaagcatagattcaaaggtagcagacgctgctactgaagtgcagcacaaaactactgaagcactgaaatccgaggaaaaagccatggatatttctgctatgccccgtggtactccattatatgggcagccgtcatggtggggggatgatgaggtggatgaaaaaagagctttcaagacaaatggcaaacctgaagaaaaaaaccatgaagctggaacatcagggtgcagcatagatgccaagcaagttgaggaacaatctgcagctgcaaatgaagaagtactttttcctttctgtagggaaccaagttattttgaaatccctacaaaagaattccagcaaccatcacaaataacagaaagcactattcatgaaatcccaacaaaagacacgccaagttcccatataacaggtgcagggcatgcttcatttaccattgaatttgatgacagtaccccagggaaggtaactattagagaccatgtgacaaagtttacttctgatcagcgccacaagtccaagaagtcttctcctggaactcaagacttgctggggattcaaacaggaatgatggcacccgaaaacaaagttgctgactggctagcacaaaacaaccctcctcaaatgctatgggaaagaacagaagaggattctaaaagcattaaaagtgatgttccagtgtacttgaaaaggttgaaaggaaataaacatgatgatggtacgcaaagtgattcagagaacgctggggctcacaggcgctgtagcaaacgtgcaactcttgaggaacacttaagacgccaccattcagaacacaaaaagctacagaaggtccaggctactgaaaagcatcaagaccaagctgttgtgtttggagtagatgacaatcaggattataataggcctgttatcaacgaaaaacataaagatctaataaaagattgggctctcagttctgctgcagcagtaatggaagaaagaaaaccactgactacatctggatttcaccactcagaggaaggcacatcttcatctggaagcaaacgttgggtttcacagtgggctagtttggctgccaatcatacaaggcatgatcaagaagaaaggataatggaattttctgcacctcttcctttagagaatgagacagagatcagtgagtctggcatgacagtgagaagtactggctctgcaacttccttggctagccagggagagagaaggagacgaactcttccccagcttccaaatgaagaaaagtctcttgagagccacagagcaaaggttgtaacacagaggtcagagataggagaaaaacaagacacagaacttcaggagaaagaaacacctacacaggtataccagaaagataaacaagatgctgacagacccttgagtaaaatgaacagggcagtaaatggagagactctcaaaactggtggagataataaaaccctacttcacttaggcagctctgctcctggaaaagagaaaagtgaaactgataaggaaacttctttggtaaagcaaacattagcaaaacttcaacaacaagaacaaagggaggaggctcagtggacacctactaaattgtcttccaaaaatgtttcaggtcagacagataaatgtagggaggaaacttttaaacaagaatcacaacctccagaaaaaaattcaggacattctacaagcaaaggagacagagtggcacaaagtgagagcaagagaagaaaagctgaggaaattctgaaaagtcagactccaaagggaggagacaagaaggaatcctccaagtcattagtgcgacaagggagcttcactatagaaaaacccagcccaaacatacccatagaacttattccccatataaataaacagacttcctctactccttcttctttagcattaacatctgcaagtagaatacgagaaagaagtgagtctttggatcctgattctagtatggacacaacccttattctaaaagacacagaagcagtaatggcttttctagaagctaaactacgtgaagataataaaactgatgaaggaccagatactcccagttataatagagacaattctatttcaccagaatctgatgtagatacagctagtacaatcagtctggttactggagaaactgaaagaaagtcaacccaaaagcgaaagagtttcactagcctctataaagataggtgttccacaggttctccttccaaagatgttacaaaatcatcatcttcaggtgctagggaaaaaatggaaaagaaaacaaaaagtcgttccacagatgtgggttcaagagcagatggtcgtaaatttgttcagtccagtgggagaataagacagccctcagtagacttaacagatgatgaccaaacctctagtgtacctcattctgccatctctgatattatgtcatctgatcaagaaacttactcttgtaaacctcatggacggactccacttacctcagctgatgagcatgtacattccaaactggaaggaagtaaagtaacgaaatctaagacttctccggtggtatctggttcatctagtaaatcaaccacccttccaaggccacgacctaccaggacttccctcttgcgcagagcacgacttggtgaagcttcagacagtgaacttgctgatgctgacaaagcatctgttgcttctgaagtatccacaacaagttctacatcaaaacctcccacaggaaggcgtaacatctctcggattgatttattggctcagcctcgtagaacacgacttggctcactgtcagctcgtagtgactctgaagcaacaatttctagaagtagtgcctcttcgaggaccgcagaagccatcattagaagtggagccagactagtaccatcagataaattttctcctagaattagagctaacagtatctctcgactctcagactccaaggtcaaaagtatgacctcagctcatggctctgcttcagccctgaaaaccactcgcttgcagagcgctggatcagcaatgcctactagttcttcattcaaacaccggattaaagagcaggaagactacatccgagattggactgctcatcgagaagagatagccaggatcagccaagatcttgctctcattgctcgggagatcaacgatgtagcaggagagatagattcagtgacttcatcaggcactgcccctagtaccacagtaagcactgctgccaccacccctggctctgccatagacactagagaagaggtaggagatcttcatggagaaatgcataagttggttgatcgtgtttttgatgaaagcctcaacttccgaaagattcctccattagttcattccaaaacaccagaaggaaacaacggtcgatctggtgatccaagacctcaagcagcagagcctcccgatcacttaacaattacaaggcggagaacctggagcagggatgaagtcatgggagataatctgctgctgtcatccgtctttcagttctctaagaagataagacaatctatagataagacagctggaaagatcagaatattatttaaagacaaagatcggaattgggatgacatagaaagcaaattaagagccgaaagtgaagtccctattgtgaaaacctcaagcatggagatttcttctatcttacaggaactgaaaagagtagaaaagcagctgcaagcaatcaatgctatgattgatcctgatggaactttggaggctctgaacaacatgggatttcccagtgctatgttgccatctccaccgaaacagaagtccagccctgtgaataaccaccacagcccgggtcagacaccaacacttggccaaccagaagctagggctcttcatcctgctgctgtttcagccgcagctgaatttgagaatgctgaatctgaggctgatttcagtatacatttcaatagattcaaccccgatggggaagaggaagatgttacagtacaagaatgactttctcttgattgttgaaaaatcattacctgtggaatggctaggaatattggaagcagcatagtgttgatgtacgcaaaacaagacagcttggtcagctacaatcttggaatccctgtcttcttaattttatttatttatttttgacgtataatgtagtatatcaatcctttcaaactatttagataaccacttgatgcacaaataggaaaaagcagattgtggcagtgtcgccttttgtggttttatgattttcaaattgaatttaatgattacaccctttcccttcatagatcttttttcttttttttaagccatgctgtgacctacaagcaaactaaatagccaacatttctgaacccctaagtctcctgtgccaagctgctccctgaaatggacttcttcatctgtacagatttgttaaaccattctatttgcttcttaataataggatttatattagtactcattaccattggacacaatgacataagtactctccacagtaaagcagacctttcacaacagtcactctgtgtcctaaaattttccaacatagatgtgatttatataactttgttgatacgtaaattgtcttggggtttacggaaattaactattatgtttgcactaagatttgctgggagtggtaggtggacatatctatatatcaataaggactaaccgtcttttttgtacataggagattgataatactgtatttgttttaagcccacagtgttttactccactttcaaaaagatcaatttggcactttttttcattttttttaatggaaataagatttggtctctcattttaggttaaatgataactagaaagattaaactagacagatagtttaggtggagtatatttttaaaactcagaacatgtatattggtcctgtgttaccaagtttatatgtgacagttgaaaaagaaattcccttgaaatgatcatgaggttaaaattttcttcattaggggacttggagaaccagtagtcgtaagattagttgatagtttcactcccaagcaatgaattgcttctgtgtgtttccctgtaggactcaatagtaaatgctgtctgtcttacacatttataaggaccctgcaagacgacgacaaaggcctttggcctgtgctactaaacaagaagcctatgaaaaatttcttctttaaacttgttttttctctttccagtaagttcacatttggataattttaaaaagaaaagtaattacctttgtgtttccagaacactataattggggtgtatcttaattcagttaaatattattagtagacctggattttcccccttgaccccatcagtctataaaggttaaactgcaacttttatgaaatggtctttaatatttccacaataatcctgtgctatatttgttttaagaaacaaagtaactctatacacttcaagactttacaggattttttaaatcctgtattgttggatcaattaataaagatgcaaaaaaactttatagagatgtaaaaacaaaactataatggatctcctatttttctttaaatacaaaaaaaaaaaggtaaatgaactattctccttgtaaagctaaattccccattctgtctaataaaggaagactgaaaaaaggttttaaagaacataaatggaaagatacaaatgctttgaaggaataaacgaaatgttaaaacagggtcaatccatttgaagaaaaagttggacaaaataatcagcattgctccctcttttatttaatatttgggtactgattatatccacatggaagtagaaggtaaggagtttaggaaaatactagaatctactctgcttacattcttgtttaagtgtttacacagtttggttcaattataaacatttggccttttactatgttatttttattttgtatgaatacattatcctccttatttatttttgttacatttattacttatgttattttgttatgcatttacaactccatttttaaataaagtgtttctggaacttt

SEQ ID NO: 22406 - DNA, 6994 bp, Homo Sapiens
gctgcccggccttgaagagggctccgagatctccgacagaacggatgctctgctcctgagactgtcgctggtggttggcaaagaggtgttttacaccgccctctgggggagcgtcctggccagcccgtccatccgcctccctgcctcagtcttcgtggtgggccacatcaacagggatgcccccggccgggagcagaagtacatgctggggaccaatcaccaactcacggtgaagtctttgcgtgcctccctgttggactcaaatgttcttgtgcaaagaaataatctggaaatcgttctgtttttcttcccattttatacctgtctggattccaatgagagagccatccccctcctcagatctgacatcgtgcgcattctctcagccgccacccagaccctactgagaagggacatgtccctgaacagaagactgtatgcatggttactaggctcagacataaaaggaaataccgttgtgccagaatctgaaatctcaaattcttatgaagaccagtcgtcttatttttttgaaaaatactccaaggatcttttagttgagggtttggctgagatattgcatcagaagttcatagatgctgacgtggaggaacgccatcatgcatacctgaagccttttcgcgtcctcatcagtctgcttgacaagccagaaatagggcctcaagtggttgggaatttgtttctcgaagtcatcagggccttttattcttactgcagagatgcccttggctctgatcttaaacttagctacacccagagtggaaattcgctgataagtgcaatcaaggaaaacagaaatgcctctgagattgtcaaaacggtaaatttgctgataacttctctaagcacagactttctctgggattatatgacaaggtgttttgaggaatgctttagaccagtgaagcagcgttacagcgtgaggaacagcgtcagccctccccccacggtctcggagctctgcgccctcctggtcttcctgctggatgtcattcctttggaactttactctgaggtgcaaacccagtatctccctcaggtgctcggctgcctggtgcagcctcttgctgaggacatggaggccttaagtttacctgaactcacgcatgccttgaagacgtgtttcaaggtgctcagcaaagtccagatgcctccttcctacctcgacacggagtccaccagcggaacctcgagtccagtaaaaggtgaaaacggcaaaataattttggaaacaaaggcagtgattcccggtgacgaagatgcttcgtttccccctctgaagtctgaggacagtgggatcgggctcagtgcctcgtcaccggagctctctgagcacttgagggttcctcgagtttctctggaaagggacgacgtttggaagaagggcgggagcatgcagaggacgtttctttgcatccaagagctaatcgccaactttgccagcaagaacatttttggagtacagctgacagcgtcaggagaagaaagcaagtccgaggagcctgcagggaagagggacagggatgggacgcagagcctggcagccaatgattccagcaggaagaactcttgggagcccaagcccatcactgtgcctcagttcaagcagatgctgtcagacttgttcacagcacgagggtctccattcaagacaaaaagttcagagtcaccatcgtcttcgcccagcagccctgccaggaaaaacgggggagaatgggatgttgagaaggtggtcattgacctggggggttccagggaggaacgcagggaggcctttgccgccgcctgccacctgctgctggattgtgccactttccctgtctacctgtccgaggaagagaccgagcagctctgtgcaacgctcttccagctgccaggagccggtgattccagttttccatcttggctgaagtccctcatgactatttgctgctgtgtgactgactgctacctccagaacgtggccatttccactctgctggaagtgataaaccattcccagtccctggcgcttgtcattgaagacaagatgaaacgctataagagctctggacacaaccctttttttggcaagctgcagatggtgacggttcctcccattgctccagggatattgaaagtcattgcagagaaaacagatttctatcagagggtggctcgcgtgctttggaatcagctgaacaaagagacccgggagcatcacgtcacctgcgtagaattgttctaccggctgcactgcctggcccctacggccaacatctgcgaggacatcatctgccatgccctcctggaccctgacaagggaacaaggctggaagctctgtttagattttccgtgatctggcatctgacaagagagatccaaggcagtcgagtaacatctcacaatcgctcctttgataggtccttgtttgtcgtgctggacagcctggcctgcacggatggtgccatcggtgcggcagcccagggctggctggtgcgtgcgctctccctcggggacgtggctcgcatcctcgaacccgtgctcctgctgctgctgcagccaaaaacccagagaacctccatccactgcctcaagcaggagaactcggccgatgacttgcaccgttggtttaacaggaagaaaacctctttcagagaggcatgcgcagtgcccgagcctcaggagagcggctctgaagagcacctgcctctgagccagttcaccacagtggaccgtgaagccatttgggccgaagtggagaaggagcccgagaagtacccgctgcgaggcgagctgagcgaggaagagctgccctactacgtggagcttccagacaggacggcccacggcgccccggacagcagcgagcacaccgagtctgcagatacaagctcctgccacacggacagcgagaacacgtcctccttctcctccccttcccacgacctccaggagctgagcaacgaagagaactgctgtgcacccatccccatggggggcagggcgtaccccaagcgctcggccctgctggcggccttccagtcagaaagcttcaaggctggggccaagttaagcctggtgcgggtggactcggacaagacgcaggcttctgagtcgttctccagcgacgaggaggcggacttggagctccaggccctcaccacatccaggctgctaaagcagcagcgggaaaggcaggaggccgtcgaggccttgttcaagcacatcctgctctacctgcagccctacgactctcggcgggtcctctatgccttctcggtgctggaggctgtgctcaaaaccaaccctaaggaattcatcgaggctgtgtccaggactagcatggataccagctccaccgcgcacctcaacctcatctccaacctcctcgctcgccaccaggaggccctcattggccagagtttctacggaaagctccagacccaggtccccaacgtgtgcccccactctctgctcctggagctgctcacctacctctgcctgagcttcctgcgctcctactacccttgctatttgaaggtctcgcaccgagacattctcggcaaccgggacgtgcaggtcaaaagtgtcgaggttttgatcaggataatgatgcagctggtctcagtggccaagtcttcggaagggaagaacgtggagttcatccacagcttgctgcagaggtgcaaagttcaggagtttgtcctgctctccctgtcggcgtccatgtacacgagccagaagcgctacgggctggccaccgcccaccacggcagggccctgccagaggacagcctctttgaggagagtctcattaacttgggtcaggaccagatctggagtgagcacccgctgcagattgagctgctgaagctgctgcaggtgctgattgtcttggaacaccacctgggtcgggcccatgaggaggcggaaaaccagcccgacctgtcccgggagtggcagagagccctgaacttccagcaggccatcagcgccctgcagtacgtgcagccccaccccctcacctcccagggtcttctggtctctgcggtggtgaggggtctgcagcccgcctacggttacggcatgcatccggcctgggtgagcttggtcacgcattccttgccctacttcggaaagtccctgggctggacggtgacaccctttgttgtccagatttgcaaaaacttggatgacttggtcaagcagtatgaaagcgaatctgtgaagctctctgtcagcacaacctccaagagggaaaacatttctccagattatccactcacccttctagaaggtctaacgaccattagtcatttttgtcttttggaacaagccaaccaaaacaaaaagaccatggctgcaggtgatcctgccaacttgaggaatgccagaaatgccattttggaagagctgcctcgaactgttaacaccatggcccttctctggaatgttctcagaaaggaggagactcaaaagagacctgtcgatctcctaggggccacgaagggatcctcttccgtttactttaaaaccaccaaaaccataagacaaaaaattttagacttcttaaaccccttgacggcccatcttggggttcagttgacagcggctgttgcggcagtgtggagcagaaagaaagcccagcgtcacagtaagatgaagattatcccaacggcaagtgcatcccagctaacccttgtcgacttggtgtgtgcactcagcaccctgcagactgacacgctgctgcacctggtgaaggaggtggtgaagaggccaccccaagtcaaagggggtgatgagaaatcgcccctagtggacattcctgtgttgcagttttgctatgcttttctccaaaggctcccagtaccagccttgcaagagaacttttcttcactgttgggagtattgaaagagtctgtacagttgaatctagccccacctgggtattttctgcttctcagcatgctgaatgactttgtaacaagaactcccaacctggaaaacaagaaggaccaaaaagacctgcaggaaatcactcagaaaatcctagaagctgtggggaacattgccggctcttccttggagcaaaccagctggctaagcagaaacctggaagtgaaggcccaacctcaggcctctctagaagaatctgatgctgaggaggacctgtatgatgctgctgcagcttcagcaatggtgtcttcatccgccccgtcggtgtacagcgtgcaagccctctctctcctggcagaggtactggcttccctcctggacatggtttatcgaagtgatgagaaggagaaagctgtgccgttaatctcccgtctgctttactatgtttttccatacttacgcaaccacagtgcctacaatgctcccagcttccgggctggcgctcagctgctgagctccctgagtggctatgcctacacaaagcgagcctggaggaaggaggtcctggagctgtttctcgaccccgctttctttcagatggatacttcctgtgttcattggaagtccattattgaccatcttttgactcatgagaaaacaatgtttaaggatttaatgaacatgcagagcagttctttgaaactattctcaagttttgaacagaaagccatgctgttaaagcgccaggcttttgctgtcttcagtggagaacttgatcaataccacctttaccttccactgatacaagaacgcctgacagacaatctcagagttggacagacatccatagttgctgctcagatgtttctttttttcagagttttgctgctaagaatatctcctcaacatttgacttcattgtggccaataatggtctctgaattgattcagacattcacacagcttgaagaagatctaaaagatgaagatgagtcattgagaagcaccaacaaagtaaacagaacgaaagtttcagtcccggatgcaaatggaccctcagtggaggagataccccagagtgaactcatcttgtatttatcagcttgcaaattcttggacacagcgctttcttttccacctgacaagatgccattatttcaaatttataggtgggcatttattccagaagtggacacagagggccctgccttcctgtcggatgtagaggagaatcaccaagaatgcaaaccccacactgtcaggattctagaacttctaaaattaaagtttggggaaatcagtagctctgatgagatcaccatgaagagtgaattcccgcttctgcgccaacattctgtttccagcatcaggcagttgatgccattcttcatgactctaaatggtgcatttaagacccagagacagctgcctgctgatagcccaggaactccattcttggactttcctgtcacagatagcccaaggatcttaaaacaactggaagaatgcatcgaatatgattttctggaacatccagaatgttaaccatgtgagagagaatatgtttaatccatgtattggtactttactgaaaaccaggttatattctaaagaagaaagaaggcaggatagtgcttttgaacaagcctatttccattttgaaagtagatttcaggctaggtgcggtggctcacacctgtaatctcagcactttgggaggccaaggcaggcagatcacttgaggtcaggagttcgagaccagcctgaccaacatggtgagaccctgtctctactaaaaatacaaaaattagctgggtgtggtggcggcgcctgtaatcccagctacttgggaggctaaggcatgagaattgcttgaacccaggaggtggaggctgcagtgagccgagatcacgacactgcactccagctgtgtgacagaatgagaccatctccaaaaaaaaaaaaaagtagatttcagataatttactgttcagcaacaggacacacctccctaaatgccttgtaatatatttgaatctgattctgcatttcttcctcaatttatgtaatgaaaataaaattaatatatcatct

SEQ ID NO: 22407 - DNA, 5650 bp, Homo Sapiens
ggcgcggtcgaggcccggaggcggcggcgcaggaggaagcggaggaggtcgggcgctcggggcccgggaggcgggccgcgcagcgccgcagccccgggctcgccatgctcctggcctcggccgtggtggtctgggaatggctgaacgagcacggccgctggcgtccctacagcccagcggtgagccaccacatcgaggcggtggtccgcgccggcccccgcgcggggggcagcgtggtgctgggccaggtggacagccgtctcgcgccctacatcatcgacctgcagtccatgaaccagttccgccaagacacgggaactctccgcccagttcgccgcaactactacgacccctcctcggcccctgggaagggcgtggtgtgggagtgggagaacgacaatggctcctggacgccctacgacatggaagtgggcatcaccatccagcatgcctatgagaagcagcacccctggatcgacctcacttccattggctttagctacgtaattgacttcaacaccatgggccagatcaaccgtcagacccagcgccaacgccgcgtccgccggcgcctcgacctcatctaccccatggtcacagggaccttgcctaaggctcagtcctggccagtcagccctgggccagccacctcgccccccatgtccccctgctcctgtccccagtgtgtcttggtgatgagtgttaaggcagccgtggtcaatggcagcactgggcccctacagctgccagtgacccgcaagaacatgccgcctcctggagtggtcaagctacccccactgccaggctctggggccaagccactggacagcacaggcaccattcgaggcccactgaagaccgccccatcgcaggtgatccggagacaagcctccagcatgcccactgggacaaccatgggctctcctgccagtcccccaggacccaacagcaagaccggaagggtggccctggccaccttgaatcgtaccaacctgcagcgactggccattgcccagtcccgggtgctgatcgcctctggggtccccacagtcccagtgaagaacctaaatgggtccagtcctgtcaaccctgccttggcaggaatcactgggatcctcatgagtgcagcggggctgcctgtgtgtctcaccaggccaccaaagctggtcctacacccaccccccgtcagcaagagtgaaataaaatccatcccaggggtttccaacacaagccgcaagaccaccaaaaaacaagccaagaaaggtaaaaccccagaggaagtgctaaaaaaatatctacagaaagtccggcacccaccagatgaggactgcaccatctgtatggaacgcctcacggccccctcaggctacaagggcccgcagcctacggtaaaacctgacctggtagggaagctgtccagatgcggccacgtctaccacatctactgcttggttgccatgtacaacaatgggaacaaggatggaagtttgcagtgtccaacctgcaagaccatttatggggtgaagacaggcacccaacctccagggaagatggagtaccacctcatcccccactccttgcctggccacccagactgcaaaaccatccggatcatctacagcatcccccccggcattcagggaccggaacacccgaatcctgggaagagtttcagcgcccgaggcttcccacgacactgttaccttccggacagcgagaaagggagaaaagttctgaagctgctgctcgtggcctgggatcgccgcctcatttttgccattggcacctccagcaccacaggcgagtcagacaccgtcatctggaatgaggtccaccacaagacagagtttggctctaatctcactggccatggctacccagatgccaattacctggataatgtgctggctgaactggctgcccagggcatctctgaggacagcactgcccaggagaaggactgaggccagaaaagctttgaggtgggaggggccatggagactgcaggacaggaagtgaggagagtgagtcaatgtagaagaagttggtgtcctgccctcccaactttctatcctcccctcctgccctgtgtccatccctcatccctcccaaccacagtgggagccagactgaatatagcgacatcattcataaatctcatccaacacaaagggagatgggatgagggccatcctgggtctgttcccatggagtttttggtgctgggtaggcaggaatcccctccctaccccacctcccaagtaggggcatggtcagcacacctagggtatgggcagtgcttaggcactccatatcctggctttgggaagccggggtttcttgcctcagccggcttcttgctacttccactctgctttgagactggagtttctgctattctccctctgctggaggcagggagctctcactgtgcaaggttggggggtgggcaaaggggtgaatcactaaactgctgtgacatcagaaactgatgccttggtgtagagcaaggaagcacttcttcccaagagggtcggagaaggaaaagcctctgggagcacattctgctgtcatcacagtccttggcttctctgggccctcctctcctcctcacagctctcacctgtccaaagaggcatctggttctctcatgtggatggatggactctggggttcctctttggagtggcatcccatgatgctgtttctagaccctctctgatcaaaccagagcctgcatcccactgagcatctgaactgtcctcagggagaggagcccacagccttcttcccaactcattctagaccagctcaaagattccatgagtttcatcgagtcactgtgagtggagcccatgctgggctctgtgccctctgtgtctgtgcatgcgcgtgtgtgtgtgggcgtgtgtgcattgctgggccagcttgaagggaaggcccgtcatgtccctgcactctgttttgcaagatgccaaaccccagttctgatggggctccaacagccaggctgtggtcctttgacgttcctcacctgttgccaacctatcccgtagtgaactgaaaccccaatgaagacagaactgtgcctggggagatgcaatgaggtgagggctgaactcatccttttatatttcttttcaagattggatcagagctcatctccatccagtcttgtttctatgaaggcttcaatctgtttccatgcaaatttgctaatcagagcccagagctgctgggtccctcatctccctcatctattatagattgacttacagcagggagagaatctctttagctcattcctaatggggttgggatcacaatatggtctggtccaatctgcatcttgttgtgtcccaagaccctatctcctccccaacattcttattgcctttggctcccagtaaggaacgaattgggggccagggaggagaacaggggggatcaagaagggaaacccaattccccctttgaaagtgggttctttgaactatgtgtttgggggaagttcctctggatactaatttgaatttatatacctcatgttttgggggtttgacgtatatatatatatatatatatatatatgcatatatatttcataatatttggaaggtttttgatgctagaaaaatggaaacaagagaaccttcaaaaatggtacttagatgggaactggaggccaatctttcataaagccagccccatagctgcttgctgttaggcctccagccattttgacattggggtggatagtcgattcacctgcctgtcagtcgattcacctgcctgtcacccagttctgtggatgtgctggtgctgagcctttgctctctttccaaatggttacagggatgttgatcagctccaccagagggagctctgatgggaggaattgctctgccatccttgtccctgtgtctcctgtcggcaggcagccattgtatctcaccagcagaccaggagactggtcccaaggttactgcaccacagggcaatttcctgccatagttaggaaggaaacacctgaactaaatggaagagacatccctgcggtgtttaatatcacacccatgccctttgtcaggttaccatgtacagagattacttggagagcctcatgccgtctctaccttcgcacactggtcaagtatctgctgagcttcttggccgcaaggatgcagaaataggctgagggtccatgggaagaaagacacaatgaggcagtaggaggtggggaagaaaagaagacagactttcaaaatggaattaggcactggggagagatcagtttccccacatcagggagaagaaggtataggtggggaagggggtggccaggagcagaaggaagaagactcaagatggaaagggagccgctgtgcctgtggcaataccacttggagaggtcgacttcataccttcaagccttttcccctgggcttttgattgtgtctgtgccccctttcttgtcctctctgcagatgcccagtaggggctacctcatcctcgtgctgttcttgtgtggctttctgggcagtagggatcttgaatttcctttctaacactgtgcccggcaaggcggggagcattcctctgccctttgtcttgtgccaacctggaaaggtgcagtctagatttcagtgagaaccctgccagctgagccctgtgcatctactaccttgacacagagtgttttcccactagaagctctgctctgctctcctggcccaagtaggggattccatgccttccctttcatggtcttagcaccagcagcctagtttctcccttccagagtctccagggatgacaaattggattggagacaaacctcgtcagatgctcatcccctaaaaggttaattgtgtatttgtggctgcgtgtgcctttgtgttttcattctcttcccatttttgtacattttggtcttctctgtggttttatacttggtcaaaagtactcgtcttggtattgcactgttgtgtgcatgagaaaactgggggaaggctcactggtacaagaaaggacccctgacccctttccttctctgtggtccccggcattagattgggggttctgggagaggcaggtgaatgtcctaagtgaattgttctgtttgtaactggaatgtttttgaagtctttggtgttgctccgtgaaaggacatcgccacctggtgctcatgaggtgtctttgcagaacaataaatggcaaatgaacaaccacaaaattgttactcttgttggccttctgctgtttgtagattagtgcacctatctgtgagggatttgggttacctccctgagtctgtaagcaaccacaagccctgccactgggtgggggaagtccctccccaaccacttaaaaacaaattttccacatattacccacccacacatttgacctggctagactctttgtttgcctaaaggaacagaccacattgctgggaaaatgagtaagtgaacgtgtgggagaaaaacacttttagaatcacgaatattcacttttaaaggtctctttgcctggctgcaatatagtgtgtgtttaaattatttacaggctgttgtttctcaaataaatgtttaatattaatcattcccaaactgacaagaacacaaaaataaaatgcaaatacagagcc

SEQ ID NO: 22408 - DNA, 5634 bp, Homo Sapiens
ggagcgacgccgctcgggtcagtcggcggccggactgggaagatggacgcagctactctgacctacgacactctccggtttgctgagtttgaagattttcctgagacctcagagcccgtttggatactgggtagaaaatacagcattttcacagaaaaggacgagatcttgtctgatgtggcatctagactttggtttacatacaggaaaaactttccagccattggggggacaggccccacctcggacacaggctggggctgcatgctgcggtgtggacagatgatctttgcccaagccctggtgtgccggcacctaggccgagattggaggtggacacaaaggaagaggcagccagacagctacttcagcgtcctcaacgcattcatcgacaggaaggacagttactactccattcaccagatagcgcaaatgggagttggcgaaggcaagtccataggccagtggtacgggcccaacactgtcgcccaggtcctgaagaagcttgctgtcttcgatacgtggagctccttggcggtccacattgcaatggacaacactgttgtgatggaggaaatcagaaggttgtgcaggaccagcgttccctgtgcaggcgccactgcgtttcctgcagattccgaccggcactgcaacggattccctgccggagctgaggtcaccaacaggccgtcgccatggagacccctggtacttctcattcccctgcgcctggggctcacggacatcaacgaggcctacgtggagacgctgaagcactgcttcatgatgccccagtccctgggcgtcatcggagggaagcccaacagcgcccactacttcatcggctacgttggtgaggagctcatctacctggacccccacaccacgcagccagccgtggagcccactgatggctgcttcatcccggacgagagcttccactgccagcacccgccgtgccgcatgagcatcgcggagcttgacccgtccatcgctgtggtacgtggcggccacctgagcacacaggcatttggtgctgaatgctgtttgggaatgacgaggaaaactttcggatttttgcgtttttttttcagcatgttgggataagtactgtgttcacgtggttgggaatctgaagggtataagagccggaactgtgtccttgcaccctcacgtccctcccccaggcaccacctcctgtgcagccttcatggccttcgagtggcccagagagcgtgtgtctggatgtgagcgtgtgtgggcgcgtgctgagtgtgcatggatgagtgtgagccatggtgagtgtgtccccctcacacctacatttaaacacacgggcggcccctccacccacccctgcaccaccttcgtcacacccacatttaaacacgggcggcccctccacccacccactcctgcaccaccttttgttttccggaggctctgacttgacctctctgggggatttcctaagaaggagcttccctgtttttccattttgattacctagttgtgatttttggtgtgtgatttatgcagacctgcctgccctcaaatatatttgatggggaaagaggccaaaaaacccccctagaaatcatgaatgacggtgacatgctcagggaagcagttaaccgaatcgggggctctgttgtggatgctccgccccatttaggaggaagaaggcagatctgggcctgaaatgggacggtctctgagctgtggcgcagccccagagtgcacaccacgctccatgcacctcctgggcagggtggcagtagtggggaacatgggctggagctctgtggctcacactttttgtttgtttgtttgtttttgagacggagtctcactctgtcgcccaggctggagtgcagtggcgcgatctcggctcactgcaagctccgcctcccaggttcacgccattctcctgcctcagcctctggattagctgggactacaggcacccgccaccacgcctggctaattttctgtatttttaatagagacgggttttcactgtgttagccaggatggtcttgatctcctgacctcatgatccacccacctcggcctcccaaagtgctgggattacaggcgtgagccactgcgcgcagcctggcgcacacttcttaccagaacctagtcacgaattcctcgtcgaactagaattaggtatgtttgttactgtaaacgcagcttggtggcttacagtgattggcactctaacagtcaggtcaggctagagagccagccaccgcagacagaggagtggacgcgtgaacgttgagttgagaccaaaggggccacctggtgggataactgtcctcacccgtgaggaggaggaatgtcccctgtccccgggggagagtgctcctacaccagcgccgaggcggcagaatggtgtcttcaggggaagagagtgcccagtttgagcttctccccccatttcgtttctttttgtgttaacatctgcgcatctggcagcgttgagaattcctagtgactgtcattacaggcggcagctttaaggatgtgattgccggtgacccttggccggtcccctgtctcctggctcctcagcaggaggctccctgtgtcacggtgtccttgggcagttctcggtggcctttgccgccaagcttccagggagctgctgggcgaaggctgagacccagcggccctgcctcacagtcacagagagaagagctccccacttggccctaactcataacctgccccaatcccggaacactcggtgaggtttgagagatgcacaccacgtaacatctcgtgggcgaatcaaggcacagcaacgcagtggagcctgaggggagccgggcactggtgcaggggaccatgcacagggcaccctcggagctccgttcctggccacaggagccaaggcaggctggaatgtccagcacctgcatgctgggggcctctgctgcgccactggcagtgggaatggaagcccccacctcttagccgactgcagatgggggtgtcgtgttctgctcatcgtcatttcgttttaggggtttttctgtaagactgaagatgacttcaatgattggtgccagcaagtcaaaaagctgtctctgcttggaggtgccctgcccatgtttgagctggtggagcagcagccttcacatctggcctgccccgacgtcctgaacctgtccctaggtgagagctgccaagtccaggtggggtccctcggaggtacgatctgtgcccttgcttccccagtcctggcccccttggttttgaccattaaggtgtgtgtgagcctgagccgtgagcacttggcagtggttcgcctgtgagaccaggtatggagtggagcgtcccctcctccaagcttgcgcccagcagcccaggacccacctcgtcttccccaccagcgctgcctgcccgggcgctgtggagctgggcgtgctaccatggagtcctcaggggtctggagcagacagaacatgcaggctctgtggtgacgcagtcctgggtgggggactggttcacttgggcaccactggccatgggtggcgtagacccctcggaccatggccagcgtgccgcaggagccggcctgggctcgtgcagtgaagtgagtggccgtgagcgcgtcctcctcatctctgtctccctgtgggaaactctacaaacaaggcaatggcaatggaaccactcctgatgaccacgagggtcagacgcgggacagaggcccctcaggcctgagattgtgccggccgccccctgccctcctcaccctgccctgctcctcttctctgctccctccccccatattcgcaggtctgcacaacccccggacctgttcacacccgcatggggacagctgtctgtgggctgcagagcaggcactgctcagtctgccccacgccaagggcccttgactcacacccaggtggcccacccaagatgcctgatgcgctatgtcctgttccttctagattcttctgatgtagagcgactggaaagattcttcgactcagaagatgaagactttgaaatcctgtccctttgaaaatcctggggtcgggggtggcacctgtgagagcctggggctcctggtgccgctgcgtttcatccatcccgcccgctcgcctgccgagggctgcgccccgtgctgcctccccccagagggccacccgctgtgctcgtggactgaggctgcgctgcccgggaggccttactgcttggtgtcagactgcccagctcagagtgcccgtcagggcctgtgcatccgcacgcggagccgtctgttaggagcttccagagtgttctctcgacactgccagccccgtgttagcacctgggcctcagtcccacttgctcccaggcgccggttctgtggttggtttggaattaaagtcctgtttgaagttgtcagacacagacatgaatttctgggcgctccctgagtcagagtctcagaagacctgtgcaggctggcgtgagaggagcggcagccacactgcggccccacgcccaaggactgggctgctctcgaggggggcgcgcccaccgctgtgtcctctctgcccagcctggcttaccaagggctacctcagtgggagatgaggttggaggaacgaaggcgaggttcctccttgctttggggagaaaagtattcaggaagtgggtgtgtgggaaacctgaagatggcgtgcacaggacacagcgtgggcggcctgggcagaagggcggctggctgtcctggagctgctgctggagcctgccctcagagtgtccctttccagtgctgtggcattctgtggcagcttccccaggtgtggtgacggggggggcggggcctccacctgtgacagccaggcttgagggtggacggcgtgcctctcccaggagccttccccatgtccttgccttgctgagaattgccctcccatgccgctgaggtgttaggtggtttagggccaaaaggggaaaaccacttgagtcttgtggtgtgtggtgggcagacaccacagggtggcatcacctggtggcatttccagaacctcagccccgattccagcacccaccaccgcctgaccctgtgtaacctgctgtcccgggtcccagagtgcactctgccccgctgctctgctgcctgtcctgggaaagtatctttgccccactaggaaatgtaaacaggagggcttggggagcgtgggcacttttctcatgagcagctactgcggcgttggcaggactcgctgctgctgctgctgcttgtgtaggtcggggagccagagatccccgaggacgcgcgccggacagtcggcactgaccggcccacctggtagcagaggacacccccagccccccaagcattgaagacagtgtatttcctcgtatcctttctcccttgggtgtagttggggtggggaagcagggaaggctggtgcgatctccattccttgggctccacgtccgagttcatggtgcgccgctgtgctgggagctgcagtggtaatgtgtgggacaccttgaccaaaggggagctttgtctcgtgtgttttgaaaaaggcttaatgaagagaatgttgttcattcttagtagtatagtttgcaattcttaatggcaaataataagtttcagtagaaaac

SEQ ID NO: 22409 - DNA, 5183 bp, Homo Sapiens
ggaataacaaaacatgctcttaaccatcatccccctccagagaagctggaggaaatttcccccaccagtgacagtcatgagaaagacacaagttcccaaagcaagtctgacatcacaagagaatcatcttttacatcagccgacactgggaattcactgtctgcttttccaagttatacaggcgcagggatatctactgaaggaagctcggacttctcctggggatatggtgaactcgatcaaaatgccactgaaaaagtccagacaatgttcacagccattgatgaactcttgtatgagcagaagttgagtgtgcataccaagagtctacaagaagagtgccaacagtggacagctagctttcctcacctcaggattctaggtaggcagataatcactccaagtgaaggttatagattgtatcctagatccccttctgctgtttccgcttcatatgaaacaaccttgtctcaagaaagagattctactatatttggtataaggggaaagaagttacatttttcatcttcttatgctcataaagcatcttccattgccaaatcctccagcttttgttctatggaaagagatgaggaagactctataatcgtctcagaaggaataattgaggaatacctagcattcgatcacatagatatagaagagggatttcatgggaagaaatcagaagcagctacagagaaacagaaattagggtatcctcccattgctccattttactgcatgaaagaagatgtccttgcttatgtgtttgacagtgtatggtgcaaggttgtgagctgtatggagcagttgacacgtagtcactgggaaggatttgcctctgatgatgagagtaatgttgcagttaccagacccgattcagaaagttcctgtgtgctgagtgaactacatcctttggtgttaccgcgagtgccacagtctaaggtgctgtacattacctcaaatccgatgagtctctgtcaagcaagcagacatcagccaaatgtgaatgatctcttggttcatggaatgcctctacagccaagaaatctctccctaatggacaagctcctagatcttgatgacaagctacttatgaggcctgggtccagtaccatcctttcaactcgaaattggccaaatcgagctgtggagtttagtacatcatctctgtcatacacagtgcagtccaccaggagacgcaatccaccaccacgaactcttcatccgatcagcacgagccattcatgtgctgaaacaccaagatctgtggaagaaatcctcagaggagcccgagtcccagtggcacccgactcgctctcctctccctcaccgacgcccctgagtcgaaataatctgctaccacctattggcacagctgaagtggaacatgtgagcactgtggggccacaaagacagatgaaaccccatggcgactctagtcgagctcaaagtgcggtggtggatgaacctaactatcagcagccacaagaaaggctccttttgcccgactttttccccaggcccaacacaactcaatcatttttgctggatacacagtatcgtcgctcatgtgcagttgagtatcctcatcaggcccgacctggcaggggatctgcaggtcctcagttacatgggtctacaaaatctcaaagcggaggcagaccagtctctcgaaccaggcagggaccataaggcaaatgagaagaatctatcaggctgcaggaaacacgagatttcatgaagcagtattcagtcatcaagtgatgcagagcttgtatagaagatcgactagaaatcatcttcatgaagagtgattttggcacaagtgaccgaagaacaaaacaccatagcagccaaaaatgacatgagtgttgtttctatctccagttactgtctctttcagcagaaattaacctatcccattggaaaggcaagtttgtacccaaagatgcaacagtgaataatacccaaatcactgctcatgttatctcttaacaatgatcagttcaatcatataggatttgatgagctcacacatacacaaaaagcagcaaatcatcagtgacaatatcactggcttcagaatacttcagcctgtgttcatttctggagagttgtactcagttttaagtcattttgctgttgaaaatctgacctcatcaaatagatgtcattcctaaaactctctttagatgtcctaccctatcagcagattaaaatggaaggggtgtgtaactaaaaacataaatgttaagcattagtataaagtaacttctgtaataaattatatcgcatattttttcagataggacagctcaaccttacgatgcctacctgatgccaggtgatgcttattttcttcctaaagtaggttactggtcatatcttttttccaaatattaaatgcaccttgccagatattctcctgcagctctaaggaaaggaaatcaatttaaaaataatttgtagaatctactattgagccaccaaagtataattccctaaaagtttaagaaaccctggcaattaattcagcataaacatatcctataaacagcaggagaggttcagctttctgattttactgtggaccttttcctaagggcattcatgaatgcagcaacagttttaactatggcttacatttattttaaatttcactaaatacaaatcttgattgtcatgccagttttagatcttattaattttcagaatggataaattcaaataatcataaattacggtaactttttattataccaaggtgttctaatgccatcatatgaagacagatgcttcaaacaacctgcattaaattatatttttaataaaattaaaatctatttttaacctatttgtagtcacaaaccgaaaacgtgtcgtctttaccttagagctaaaggcttactttatgcatacggtatatttaatagtctacaaatcaaagatttaaacagtcccttaaaaattccatatattttcataccaactcatctacatagaaatgaaaatctctattgttctcacaaaccattaccatgagttcactataacaactggatcaatatggcttgcctttcaaagttaaagaatcagaaaggggcctgtaagaagtcatttagcccaattccctcaccctgtgtgttttccctcaaagccagtgcaatttttttttaaccaaaaaactggacatgtttaatacatacagtttgacaaatttggatttcactctttgttttgatgtagtaactcttttataaaagggaacagattcagacaagctcagtggcccaactgaagacattcagcaattaatggcaggacttcagtaatcagtggcaggactacaacatacatctcttcatgctagggaaaccaggctctctattataaagctgaccagggctattgttttccccttttctctcatcctaaacaccattcatatttttcctaggtcacattttagtgggatcatttacaaagcccccagaacttaatcatcatgttttaccttttttattgaattatatacacctcttacaaaaatgcttgaagtaatttaacacctgtacatcagtacaaaacctggctgagtaaaatgaagagaggatctattcaagatcattaagaccaaatgtaaactgggaagtatgtggaagatagctgtccagcaagtgtctggaaggtgttctagctgggtagagagcctattctaacagacacgcacatcgcagaaagcagcatgaacagaaccacatcctagataagagttctgtgtacagaagatccatggaggcaagtgctgtcaggaaggacactgcctccctccaccctcccaaatgtcaccaccaagttccttcaggtgagacctcacacaatgtcaagtgctttctaggaaatactaagatcaggttgagagattctgcttggtctagtcaatctgaaaaattcaggctggaaagacaccttttctcaagagctgaattgacttttgccttcaaatcctgcctgcaccttgcctacgatggcatcaatttacacctaaggacctttgaagagaaaaattccattatttcttttctttcttgagagcagattttttccctcctcctttggaagatttgcagtactttgcttccatctgagccagaaaattgtccatttccttttgccgatccttttgtctgctctgtttgagaagttaaaacacaagctttcacaacattatccatagacagaaagtacctagtggttgccaggggctggaaaagtggaataactactaatgggtatggagtttttttggaatggtgaaaatgtcctacaattggtgttaataattgtaaaactttgtaaatacacttaaaaccaccaaattgtacactttaaaaggacaaatagaaggtatgcggttatgtcttaaaagaagaaaacaaaatacaacattccaaagaaaatattagcagtaggaatcagatcattaaagatgtggcaacaaactgccaagtttacctgaatggctgccttcaggctatccacgccttcatcaagccccaactcctttctgctcatttctgcttctttggcctcttcctgagcctgaaacaggaactcacatgagactcagggccaccaggaaatgcttaaaatacatactctttcccaaaagcaaatctataattctgtttcaattttatgaatatatgaatagacaaaatgaatcgaattacataactatgtcattcattaaatggcaacaatgctgacagcaagcagtagatcctctgattccaattaccatttgttttttacccaattctatttgctagaggtagtaagtactctggcactcataaatcacatgatgataaaaaggaacatgaggccgggtatggtggctcacaactgtaatccccataccttgggaggccaaggtgggaggatcacttgaactcaggagttcaagacctgcctgggtaacatagtgagacctcagttctataaaaaagaaaagaaatgagcctggtgtggtggcatgtgcttgtagtcccagctactagggaggctgaggtgggaagatggcttcagtctgagagttcaggctgcaataagctgtgatcatgcctctgcactccagcctgggtgatggagatgccatctcttagaaaaaagag

SEQ ID NO: 22410 - DNA, 5182 bp, Homo Sapiens
accttcagttcctccaagtcctggaagactgagacaaggggaagaaagcaagataagtgcgatggatgcatctccacggaatatttctccaggacttcagaatggagaaaaagaggatcgcttcttaacaactttgtccagccagagctccaccagttctactcatctccaattgcctacgccacctgaagtcatgtctgaacagtcagtgggagggccccctgagctagatacagccagcagttccgaagatgtgtttgatgggcatttgctgggatccacagacagccaagtgaaggaaaagtcaaccatgaaagccatctttgcaaatttgcttccaggaaatagctataatcctattccatttccttttgatccagataaacactacttaatgtatgaacatgaacgagtgcccattgcagtctgcgagaaggaacccagctccatcattgcttttgctctcagttgtaaagaataccgaaatgccttagaggaattgtctaaagcgactcagtggaacagtgccgaagaagggcttccaacaaatagtacttcagatagcagaccaaagagtagcagccctatcagattacctgaaatgagtggaggacagacaaatcgtacaacagaaacagaaccacaaccaaccaaaaaggcttctggaatgttgtccttcttcagagggacagcagggaaaagccccgatctctcttcccagaagagagagaccttacgtggagcagatagtgcttactaccaggttgggcagacaggcaaggaggggaccgagaatcaaggcgttgagcctcaagatgaagtagatggaggagatacgcaaaagaagcaactcataaatcctcatgtggaacttcaattttcagatgctaatgccaagttttactgtcggctctactatgcgggagagtttcataagatgcgtgaagtgattctggacagcagtgaggaagatttcattcgttccctctcccactcatcaccctggcaggcccggggaggcaaatcaggagctgccttctatgcaactgaggatgatagatttattttgaagcaaatgcctcgtctggaagtccagtccttcctcgactttgcaccacattacttcaattatattacaaatgctgttcaacaaaagaggcccacggcgttggccaaaattcttggagtttacagaattggttataagaactctcagaacaacactgagaagaagttagatctccttgtcatggaaaatcttttctacgggagaaagatggcacaggtttttgatttgaagggctctcttaggaatcggaatgtaaaaactgacactggaaaagagagttgtgatgtggtcctgctagatgaaaatctcctaaagatggttcgagacaaccctctatatattcgttctcattccaaagctgtgctgagaacctcgatccatagtgactcccatttcctttctagccacctcattatagattattctttgctggttgggcgagatgatactagcaatgagctagtagttggaattatagattatattcgaacatttacatgggacaaaaagcttgagatggttgtgaaatcaacaggaattttaggtggacaaggtaaaatgccaacagtggtgtctccggagttgtacaggactaggttttgtgaggcaatggacaagtatttcctaatggtaccagaccactggacaggcttgggtctgaattgctgaaatcaagcacatattttgaaatggactgtgaaggaaaaggggacaggaacaaaggaccaaaaataagctacatgttttatttcttcatcgtgttcaccactgtatgccaaggcttttcagttctgtgtctgtttagactgtccgtaatggaatggtaaaactccatgaatttgcactttggtttttgatacctgtggagctgtctgtacgttgggaagtggcatgaaaattttcttaagctaaaatacagacatgtttcaaagggctaaagttggagatgagtagatagggtgaaaaatgggttaaatttgctagcttaattgttttaagaagaaaacagtgtctcataaattgactatcctggcatcacatttaacatgttatctacttagaaagcatttgtagagctgctgaatttgttttgtgtttttctgtaataatttaatgttacttattatcagaatttctgaaacctttacaaaaattctgatttattccattaatggccagttaaacacgtgggcatttattgttttattgaggaatttgacttaaactgggaatcctgtcatgttgtttatctttccagcttgcctgtttttgagtatgtttgatgtttttaaaattttgtcttctctgtggatgacaggaggctacagcaattaactttaagcctccttttagagatatttttaaagcttgtttaaaatttttgtgcaattcatatattaaattgcacttacttgcatacgctcatattctagggttttttctctatttttagggtatcatagtaaatcattagtaaatgagtctgtagttactaaaccctaatggaataattattaatgaaagatttttgaaatataaaaaataaattaggcccaatccaagaaattgagtgagaaggaaacacttgttttattcacagaggtaaagtgtcttttcaatataaccagcaatttaggtggcatctataaaataaaaaatttctactgtggacatccccttttccaactttctacataatggctagttctgactactaagaaatgttaagaaataggccaagtgcggtggctcacgcctataatcctatcactttgggaggcctaggcaggcagatcacctgaggtcaggagttcaagaccagcctggccaacatgaggaaaccccatctctactaaaaagacaaaaaattagctgggcatggtggcatatacctgtaaccccaactacttgggtggctgaggcaggagaattgtttgaacctgggaggcggaggctgcagtgagctgggattacaccattgcattccagcctgggcaacagagcaagactgtctcaaaaaacaaaacgaaacaaaaaaagaaagttattcttagtaaggaacttcttgtttaatagcatttttgtttattttaaaaagtgatcagaagtagtaaactatctttgaggaaatactgtaaccccagaatatttcctcttgacttctttttgtaacaaggataatttagggatttataaagttgtaaggatttcactgttttcggactgcctataataatagcacattaaccttcacataataagaaatctggacaagttcagttacacagtatgatgaatacttgaattaggaacattgtggaaaatttgctttagagaatcaaggcagtagtttggtatttggtgcttattaaaaatgtggtttgttttgaactggaagcaagttgaccaaggacttatgactaatgtgatgctaagttccacttggccccttttaaaaacgtgtatgtgccttttgaagatacacaaaacactgaggattttagttttgaaatcaaagactattaaaggagctgtacagaggtaaaaaaataaatgtggaacattattaacttattttgtgtctaggaacaatggattttgtatctgatttaaaatgccaacactgttttgtctctgttcattttttctgtgaggatacttaaggttattattcctgtctgtttcctgtactcccctagtcatgagcacttgaagtacaaggtgtctccccctaggtgcaattaggttgtttctttgtttttagtttcaattctatgtgcatagcaggaatgctccacaggaatggcttctgacaataatctgtcctgttgattttgttttccttgcccatgacttgaacaactgtgttttaaagtactgtagtctagtaggtaactttgtggcaaaaattttcaatataatacattctgaaacaatagttgctgccttgcaaaggtaatctctcattttaaaattggacagtattaatgaaggggaaatatacaatttatttctattgagtggtagaactatatgtctggtcccttgctgctcttgtttaggccactatcatagatatatttcaaatattgtactactcagtgttaagtattgaatgactgtttccctttccttcaaggcctagagtatattctgaaaatttaggaatgaggaagaaatcttaatacttccttccttaacatacaacatgagtcccgagaataattgatagtagcaagagaaaactatgtcagtaacatgttgctttgtataaaaatcttatttataaatgtgaagctttttgatgccatcaaaacttattaaaaaataggatttacttttttctaattctgacctaagaaaaataatgagaacaagctgttgcaagctcttttgtagtctattgaatattttatagatattcaaaatttcctacaaactataattttttccatgatttagcagtgagtgattttctagctttggctcttattaggtattgtaaatagtagggttatatcgatatcagcttttgtgatggcattgtggtcatcagcttcatgacattttacccatttgcagtgatcctgtgtaaaactgccaaggaaagtaattacctgtaggagtttgctgagcttgaagagtgaaaactgttgtgaatgagcctgatcataaaacggaccaggccattcattattcctcaagtgttaatatactgacttatgcagtattcaaaccatctagtgcaatgtttttgtttttgttttttttttttttggtaacacaggtgcagtgtattatagaaaaaataaaaactacaatcattagcagttttaatactgctgtgtcagttttgtaaaaaatgtacattatgtcttttgacatgttgaattttaaactagggaaatgacattgtaaatcatagtagcctcttttaatttaatatgaaaaatgccactatattgaaagtacttaatgtattgtatatatttctctactttggttctagctattttatatgattgacatgttatttaaaagataactgccttgaacttttggagacttgtactgtaaataaagaaatcttaacaataaactcagaatctactt

SEQ ID NO: 22411 - DNA, 4343 bp, Homo Sapiens
cgcacctgctgcaggtgctcccggccgccccggaccagcgagcgcgggcactgcggcggggaggatgctgcgcgagcggaccgtgcggctgcagtacgggagccgcgtggaggcggtgtacgtgctgggcacctacctctggaccgatgtctacagcgcggccccagccggggcccaaaccttcagcctgaagcactcggaacacgtgtgggtggaggtggtgcgtgatggggaggctgaggaggtggccaccaatggcaagcagcgctggcttctctcgcccagcaccaccctgcgggtcaccatgagccaggcgagcaccgaggccagcagtgacaaggtcaccgtcaactactatgacgaggaagggagcattcccatcgaccaggcggggctcttcctcacagccattgagatctccctggatgtggacgcagaccgggatggtgtggtggagaagaacaacccaaagaaggcatcctggacctggggccccgagggccagggggccatcctgctggtgaactgtgaccgagagacaccctggttgcccaaggaggactgccgtgatgagaaggtctacagcaaggaagatctcaaggacatgtcccagatgatcctgcggaccaaaggccccgaccgcctccccgccggatacgagatagttctgtacatttccatgtcagactcagacaaagtgggcgtgttctacgtggagaacccgttcttcggccaacgctatatccacatcctgggccggcggaagctctaccatgtggtcaagtacacgggtggctccgcggagctgctgttcttcgtggaaggcctctgtttccccgacgagggcttctcaggcctggtctccatccatgtcagcctgctggagtacatggcccaggacattcccctgactcccatcttcacggacaccgtgatattccggattgctccgtggatcatgacccccaacatcctgcctcccgtgtcggtgtttgtgtgctgcatgaaggataattacctgttcctgaaagaggtgaagaaccttgtggagaaaaccaactgtgagctgaaggtctgcttccagtacctaaaccgaggcgatcgctggatccaggatgaaattgagtttggctacatcgaggccccccataaaggcttccccgtggtgctggactctccccgagatggaaacctaaaggacttccctgtgaaggagctcctgggcccagattttggctacgtgacccgggagcccctctttgagtctgtcaccagccttgactcatttggaaacctggaggtcagtcccccagtgaccgtgaacggcaagacatacccgcttggccgcatcctcatcgggagcagctttcctctgtctggtggtcggaggatgaccaaggtggtgcgtgacttcctgaaggcccagcaggtgcaggcacccgtggagctctactcagactggctgactgtgggccacgtggatgagttcatgtcctttgtccccatccccggcacaaagaaattcctgctactcatggccagcacctcggcctgctacaagctcttccgagagaagcagaaggacggccatggagaggccatcatgttcaaaggcttgggtgggatgagcagcaagcgaatcaccatcaacaagattctgtccaacgagagccttgtgcaggagaacctgtacttccagcgctgcctagactggaaccgtgacatcctcaagaaggagctgggactgacagagcaggacatcattgacctgcccgctctgttcaagatggacgaggaccaccgtgccagagccttcttcccaaacatggtgaacatgatcgtgctggacaaggacctgggcatccccaagccattcgggccacaggttgaggaggaatgctgcctggagatgcacgtgcgtggcctcctggagcccctgggcctcgaatgcaccttcatcgacgacatttctgcctaccacaaatttctgggggaagtccactgtggcaccaacgtccgcaggaagcccttcaccttcaagtggtggcacatggtgccctgacctgccaggggccctggcgtttgcctccttcgcttagttctccagaccctccctcacacgcccagagccttctgctgacatggactggacagccccgctgggagacctttgggacgtggggtggaatttggggtatctgtgccttgccctccctgagaggggcctcagtgtcctctgaagccatccccagtgagcctcgactctgtccctgctgaaaatagctgggccagtgtctctgtagccctgacataaggaacagaacacaacaaaacacagcaaaccatgtgcccaaactgctccccaaagaattttgagtctctaatctgacactgaatgaggggagaagggaaggagattctgggattgccagttcttccagcagccatgctctgaaaatcaaggtagaatccatggaaagggaccccaggaccccgggaccctagacgtatcttgaactgccatcgtcatttcaaatacatctccctcagggtttccaggtggccacccccaattattcattccttaccaacctctcaaatcctcttggctttctctctgcagtgtggacactgttggctagtcctccccactccctgagggtccagtaagttagcttagaaccttcctggaaacatttcatctgagcaggtttccccacgtgtgggatgctccttttgcctcatctgtctcagggatgcaggctcccccgcatgcatggggatttctccccagaccagcatacttgtgacctgagagttcaatgcgtaaagatgcccctggtcagccatatccatcttctcttgcctggtccttgattctctggccgctccctgaccttcctccttccactgccttgactttcttcctttttattcctggtgccatctgtccaggcagctagacaagaacttgttcgccagcagccagattcaggccttcccaggggcataataagtgaccagcccctcctctccggacatcagatccaacacataaggaccctggcctaccctccagcccaacagccagttctgggtcagctgccaacttaggggtggtttgattatcccattgaaattcaccagtgcctttgccaaagaccctctcatttggacatacccagattcattccctggctccaactgaaaagactcagtttcaatcgttaaaagttcctttagggccagaagaataaatgaattataatcccattttgaagaaccgatttataaccaatgaaaaggttataatgtaatttatattcttggaggaacaagattttcatttgggattatttccttcaaccattcaacaaacatttgttgtatgccactaagcgccaggcacggcgttgggctctgcaaacacagtggttagtagcagtctggacctggtccctactggcatggaacccatcactccccaacatgcaaagcccacatttaaaggccagcctctgccccttcagtgatgcgctctttagaaatgccagcccactatattcagaaatccgcagggcacaaaacttccagcaagtcactgttgtggtgaaatgggcagtgggggtggggggtcttctttaaacaggcccccttcccatctacctagccagtacccatccaatgagtccccagagcctccagaagctgttgtctcctctctggggacagcagctcctgcctttggaggccaaagccccagatctctccagccccagagctgaaaacaccaagtgcctatttgagggtgtctgtctggagacttagagtttgtcatgtgtgtgtgtgtgtttggttaatgtgggtttatgggttttctttctttttttttttttttttttagtctacattagggggaagtgagcgcctcccatgtgcagacagtgtgtctttatagatttttctaaggctttccccaatgatgtcggtaatttctgatgtttctgaagttcccaggactcacacacccgttcccatctcacttgcccacccagtgtgacaaccctcggtgtggatatacccccgtggactcatggctcttccccacccccactttctataaatgtaggcctagaatacgcttctctgttgcaaaactcagctaagttcctgcttccaccttgatgttgaaatatcttatgtaagagggcaggggatgtcgtgaagatggcaagaagaacacagtttcaaatttctggaaaagagcctgtggtggagatctaaagatgtttagggaagagctcgactaaagaacaatgaaataaatggtccaaggggaagtc

SEQ ID NO: 22412 - DNA, 5231 bp, Homo Sapiens
aagggaagaacctccggggttaggcgtattctagattgacgccttttgctggaagagcgctgctggggttaggattctgcgcggcgaggcaagatgctcaagtccaagacgttcttaaaaaagacccgggcgggcggcgtgatgaagatcgtgcgcgagcactacctgcgagacgacatcggctgcggtgcgcccgggtgcgcagcgtgtggaggggcgcacgaggggccggccctggagccgcagccccaggacccggcgagcagcgtctgcccgcaaccgcactacttgctgcccgacactaatgtgttactgcaccagattgtaagtgcctggaggccggggacctgggcttctgtggcctccagcctgcgactcccaggcagcttagaaacctatgtagaacaagaacagggagaaaatgctaatgacaggaatgatagagcgattcgagtagcagcaaaatggtacaatgaacatttgaaaaaaatgtcagcagacaaccagctgcaagttatcttcataacaaatgacaggagaaacaaagagaaagccatagaagaaggaataccagctttcacttgtgaagaatatgtaaagagcctaactgctaaccccgaactcatagatcgtcttgcttgtttgtctgaagaagggaatgaaatagaaagtggaaaaataatattttcagagcatcttcccttaagtaagctacagcaaggcataaaatctggtacataccttcaaggaacatttagagctagcagggaaaattacttggaagctacagtatggattcatggcgacaatgaagaaaataaagagataatcttacagggacttaaacatttaaacagagctgttcacgaagatattgtggctgtggagcttctccccaagagtcagtgggtagcaccatcttctgtggttttacatgatgaaggtcaaaatgaagaagatgtggagaaagaagaagagagagaacgaatgcttaagactgctgtaagcgagaaaatgttgaagcctacaggtagagttgtaggaataataaaaaggaattggagaccatattgtggcatgctttccaagtctgacattaaggagtcaagaagacatctctttacacctgctgataagagaatccctcgaattcgcatagaaaccagacaggcttccacattagaaggacggagaattattgttgctattgatggttggcccagaaattccagatatccaaatggacactttgtgagaaatttaggtgatgttggagagaaagagactgaaacagaagttttgttacttgaacacgatgttccccatcagcctttttcacaggctgttcttagttttctgccaaagatgccctggagcattactgaaaaggacatgaaaaaccgagaagacctgaggcatctgtgtatttgtagtgtagacccaccaggatgtactgatatagacgatgctctacattgtcgagaactcgaaaatggaaatttggaggttggtgttcatattgctgatgtgagccattttattaggccaggaaatgccttggatcaagaatcagccagaagaggaacaactgtgtatctttgtgaaaagaggattgacatggttccagagttgcttagctctaacttgtgttccttaaaatgtgacgtggacaggctggcattttcatgtatttgggaaatgaatcacaatgctgaaatcttaaaaacgaagtttaccaaaagtgttattaattcaaaggcatctctgacatatgctgaagctcagttgagaattgattcagcaaacatgaatgatgatattaccactagtctccgtggactgaataaactagccaaaattctgaagaaaagaaggattgaaaaaggggctttgactctatcctctcctgaagttcgattccacatggacagtgaaactcacgatcctatagatctgcagaccaaggaacttagggaaacaaattccatggttgaagaatttatgttacttgccaatatttctgttgcaaaaaaaattcatgaggaattttctgaacatgctctgcttcgaaaacatcctgctccacctccatcaaattatgaaattcttgttaaggcagccaggtcaaggaatttggaaattaagactgatacagccaagtctttggctgagtctttggatcaggccgaatctcctacttttccatatctaaacactctgttgagaatattagccactcgctgtatgatgcaagctgtgtacttctgttctggaatggataatgattttcatcactatggcttagcgtctccaatatacacacattttacttcacccattagaagatacgcagatgtcattgttcatcggcttttggctgtggctattggggctgactgtacttatccagagttgacagacaaacacaagcttgcagatatatgtaaaaatctaaatttccggcacaaaatggctcaatatgcccaacgtgcatcagtggcttttcatacccagttattcttcaaaagcaaaggaatagtaagtgaagaagcctatattttatttgtaagaaagaatgccattgtggtattaattccaaagtatggtttagaagggacagtcttttttgaagaaaaggacaaaccaaacccacagcttatttatgatgatgagataccctcacttaaaatagaagatacagtgttccatgtatttgataaagttaaagtgaaaatcatgttagactcatctaatcttcaacatcagaagatccgaatgtccctggtagaaccacagataccaggaataagcattcctactgatacttcaaacatggaccttaatggaccaaagaaaaagaagatgaagcttggaaaatagctatattcaacaaaaatcttcaaagactggtttcttttttaaaagaaaaaacttgaaagaacacttctaagcctaagtgtgtgatacagtttgttacttttaagtacattttaataatttcagacatctgcatttttattgaacagttgactgtatctgacccatcatactactatacttctgggttgaacagaattatttatgcagaataattcaattgaatatccatcacttaaatacagtgacaggacagcaacttcagggatctgtaaagatcatttaaatggagtgctcatctcattgaggagcagattaattttgcgtaagtactttgattatttaatatttgtaagaaaaaactttcattttcctacagaggaaaatagaacaattttagaagcaaggaacaatctcttttctaagtcttggaagctgtcagtgttgaggatgtaatctcctttgccatctttaattcacctaacttacactaggtgttctcttactgtctttaaaagcttcctgtattttattagtggtccttgaaaaactgtgaatgtttgggaattggtagaaaggcaaaaagtaggatattttgacctgactggaaagatggttgtgtttttattgccaggtaataagtgtgatcattgttgaacttcagctccagtgtctctccagaataagacattggcattcaaatgtctatatcttgttacttacaaaataaaaaacagataattagtggcttttaaattgtagttatatcagtgtatatacacgaggggaactgtataaagacatactaaagggaacagattaaaataagtattattaataaaatttggtgtgccagactgactacttcccttgctaatcacagagattagtaatgattaaattaatatcttcaggaatattttgggatagggttgccttaaaacattttacttggcttattcaatttctaaagcacttacgttgtgccaggttccactcaagtaaactatctctgccttcaaggagcttgcagtatagtgagaaaagcctgccaagtaaatcagcaggtatactaaataggtagtcatttaggcactcaataaatgttgactaatttttccagtttcctattactgaggaaaacctccatacactgaggcagaaacttgtgtcagttggaggaaaatagacttgagtagtctttggtccaggtaaaatgggtcagtgacactgaaacagtagagtaggagtcaaaaagccttttctgtgaagtgctagaacattttagactttgttggctatggtctgtattgcaactatagtacacaactctgccgttgatagtgtgtaaggagccatatacaatatgtaaacaaatcaacatgactgtgtttcaacaaggcctgatttgttaagtttcatatatagtcatatgtcacttaatgacagggatatgttctgagacatgtcacttggcaatttcatcattgtgtgaaaatcatgatgtagttacacaaacctagatggtataccctatggtatcctatatgggatagcctattgctcctaacctacaaacctgtatggcatattactgtactgattactgtaggcagttgtaacacagtgctaagtatttgtgtatctaaacatatctaaacatagaaaaggtacagtaaaaatatatatatagatatatataagatataaaatggtacacctatttaggacatttaccatgaacaagttggcaggactggaagctggctctgggtgagtcagtaagtggttagtgaatgtgaaggccatgatattactgtgcactactgtagacttttataaacactatatacttaggctacataaagtaatttcactatgatgttaccatggctgtgtccccaggcaataggaatttttcagctccattgtaatcttacgggatcatcatcgtatatttggccattgttgaccaaaagttatgcagcacgtcattataattttgatgtgtcacaaaacattactcatttgatttcccccacccccgccaaccatttaaaaaagtttgccggctaggtgcggtggctcatgcctgtaatcctagcattttgggaggacgaggcgggtggatcactcgatgtcaggagtttgagaccagcctggccaacatggtaaaacgccgtctctactaaaaatacaaaaacttagctgggtgtaacggcggatgcctgtaatcccagctacttgggaggctgaggcaggagaatcgcttgaacctgggaggcggaagctgcagtgagccgagattgcaccactgcagttcagcctggatgatgagagtgagactccatcgc

SEQ ID NO: 22413 - DNA, 4783 bp, Homo Sapiens
cgggagcccaggcgggcaggccgctggggtcggggctgcacgtacgagagccgggacgcccgggttcagagcgaaggaggaggcatggcttcggtgttcatgtgtggcgtggaggacctgctgttcagcggcagccgcttcgtatggaacttgaccgtgtccacgctgcggagatggtacacggagaggctgcgggcttgccaccaggtgctgcggacgtggtgcgggctgcaggacgtgtaccagatgacagaaggcaggcactgccaggtgcacctcctggatgataggagactggagctgctggttcagcccaaacttctagcaagagagttgctggacctagtggcttcacatttcaacctgaaagaaaaggagtattttggaataacattcatagatgacacaggtcagcagaactggctgcagttagatcaccgagttcttgaccacgatttgcccaagaaaccaggcccaaccattttgcactttgctgtgaggttttacattgagagcatatcgtttttaaaggataaaaccaccgtggagctgtttttcctgaatgcaaaggcctgtgtgcacaaggggcaaatcgaagtagagagcgaaaccatcttcaagttagcagcgtttattttacaggaagccaagggagattataccagtgatgaaaatgccaggaaagatttaaagacattaccagcctttccaaccaaaactcttcaggagcatccatcccttgcctactgtgaggacagggtaattgagcattatttgaaaatcaaaggtctcactcgaggtcaagctgtggttcagtatatgaaaatagtagaagctctaccgacttacggtgtccattattatgcagtaaaggataagcaaggacttccttggtggcttggaataagctataagggaattggccaatatgatatacaagacaaggtgaagcctcggaagttattccaatggaaacagctggagaacttatatttccgtgagaaaaaatttgctgttgaagttcatgatccacgaaggatttcagtttcaagaagaacctttgggcaaagtggcctgtttgtgcaaacatggtatgctaactcttctctcatcaagtccatttgggtaatggcaattagtcagcatcagttttacttggaccggaagcaaagcaaagcaaaaattccttcagccaggagtttagatgagattgcaatggatttgacagagacaggaacacaaagggcctccaagctggtgacactggaggcgaaaagtcagttcatcatggcaagtaatggcagtttaatctcctcaggttctcaagactcagaagttagtgaagagcaaaagagagaaaaaatccttgaactaaagaagaaggagaaactattacaagaaaaacttctgaaaaaagttgaggagcttaagaagatctgtctgcgggaggctgagctcacaggcaaaatgccaaaggagtatcccctgaacataggcgagaagcctcctcaggtcagaagacgtgtgggtactgcgttcaaattagatgacaacttgctgccgagtgaagaagatcctgctttgcaagaactggagagtaattttctaatacaacaaaagctggtggaagctgcaaagaaacttgccaatgagccagacctttgtaaaactgtgaagaaaaagcgaaagcaagattacacagatgcgatgaaaaagcttcaggagattgaaaatgcaataaacgaataccgaattaggtgtggaaagaaacccagccagaaagcaacagtgttaccagaagacataatcccctcagagagtagctctttgtctgacaccaccacctatgatgatcccagtgatgccttcacttttcctgggcagcgatcaagttcagtacctcattctccaagaattcttccccccaagtctcttggtattgagcgaatccatttcagaaagtcgtccatcaatgaacagtttgtggataccaggcagtccagagaaatgctgtccacacacagcagcccttacaaaactctggagaggcggccccagggaggacgaagcatgcccaccacgccagttcttacccgaaacgcctacagcagcagccacttggaacccgaatcttcatctcagcactgccgccagcggagtggaagcctggagtcccagtcccatctgctctccgagatggacagcgataagccatttttctccctctccaaatcccaaagaagcagcagcacagaaatcctcgatgacgggtcttcttatacaagccaatcaagcacagagtattactgtgtgacaccagttaccggcccctattacaccacccagaccctggacactcgcaccaggggtcggaggaggtcaaagaaacagaatgtttctacttcaaattcaggaagcatgcccaacctagcacaaaaggatagtttgaggaatggtgtttactcaaagagtcaggagccaccgtcttccagttactacattgccgggtacacaccctatgcagagtgtgacttttattacagtggtggttatgtctatgagaatgacaccgagggacagtatagtgtcaacccttcctaccggtcctcagcccactatggatatgagcgccagagggactacagcagatcctttcacgaagatgaggtcgaccgggtaccccataacccatatgcaactctccggctgccaaggaaggctgctgcaaaatcggagcacatcaccaaaaacatccacaaggccttagttgccgagcacttgcgtggctggtaccagcgggcctctgggcagaaggatcagggacacagcccgcagaccagctttgactcagacaggggatcacagagatgcctggggtttgcggggctgcaagtaccttgttctccaagcagtcgtgcatccttgtactcttcagtgtcttctacaaatgcttctgggaactggaggacccagttaaccatagggctgtcggattacgagactccagcacattcttcttacaccagctgctatggcaatgtctataatcctttaccctctccaagcagacaatacacagaaatcagtcaactggatggtacagatggaaaccagctggaagacaacctggagagtagtgagcagagactcttttggcatgaagattcaaagcctggaacattagtctgaactgcagttggacctcctgaccaagcactgcgttctcacactagtgtgccttgcaaattgtatttgtcttccgagaggatgttcgttttagaaacctaaagacatcaaaggttgaagagaagacttagttgccctggaagtgaatcagtgaatcacacaccaagccccacaaagcccctaaaggaggatttggcctttcaaactctaggcactaacgtaactgtagggtctgcccacatgttgaagtattgccaagagaggactcagtgtgaagccttcatcaatagcaagcactttttaagggagtaaaagttgttaaaggcaaacgtcaaaaacatgaaagggcattcaggatgtcccatggcaataagaacaggggaaatctcagagcacaattcagcaggatgagagaaggggaaccagaagctccggagtcattgctcacttcagagtttgaattcgtgagctgacaaagagtaacatgctctttctacacagacatggacaatttagacagtattggaaaattacttgaagctggattttcatgaagttctgaatgagtgtaaatgttttttaggatactataaagagtgatgtttttcataagcaccataaaatgggttctggaaaaactgattaccttagcatcctgtaatataacttatggtagcagattggggaaaatgaagcagcccactgaataattgacaaagtctgcttggagaacattctaaggtacaatatcatggagctcctttttcctttctccactaattgcgtgatgagctattgttctggctggtaattctccaactcggctgtcatttgaagtggcagacttaatatggaaagtttttataattatgagtttgaaaaagcattttaagatgatacagaaagtatccaaaacaacagaaaaaaaaagccacgtcattttagatgaattgcgtgccttaaaatggtgaacgttagaaaattaaacaagtctggattccacaagtagttccaagtcaccaagtgacaaaaacaaggttaacattaaaaaagaaaaacaacaacaacgacaaaaagctccaagctgcagtggatttaattatgaggctaaaactacctcatactttccttggaagaactaattagctatggtttattgtagggttttgtttgtttgttttttaaagcaaatgatttccatattcctgattgatcttttttgtcatctttgcttcaaaattacataaaaggtgctcctttcccccttcttttatacaagtttcttgttcatattgtgaatagaaaagtttctgaacaacttttttggaacattttctatctatattccaaagcatgtaatatatacataaaaacgatttgttaaactggtccttagtcatttgtataattagaaatgaagtttgggaaaaaattttggaaaaaagacaagcaaaaaaaaaataacttattccttttttgcatatttgtatagccttctagaatcagaaataacctttttgcatattcttttattgttctgacttttcaagacctattatttttttacataggtcaataaacaaaaggtgtgctactg

SEQ ID NO: 22414 - DNA, 1507 bp, Homo Sapiens
aaacagttgccttttcctctcacagaaggaagatttcattttgtttgagacgagaaaccaaaccacacaccaaagagaggggtatgatggctaagaagcccccaaaaccagcccctcgcaggatcttccaggaaaggttaaagattactgctctacctttgtactttgaaggttttttattaatcaagcggtcaggataccgggagtatgagcattactggacagagttgagaggaactactcttttcttttataccgacaaaaagagtataatatatgttgacaaattagacatagtagacctcacatgccttactgagcagaattcaactgaaaagaactgtgcgaaattcacccttgttttgccgaaagaggaagtacaactgaagacagagaacacagaaagtggggaagaatggagaggcttcattcttacagtaacagagctgtcagttccccaaaacgtgtcactcctacctgggcaagtaattaaactgcatgaagtcctagagagagaaaagaaaaggaggattgagacagagcagagtacgtccgtggaaaaagagaaggaaccaactgaagattatgtggatgtactgaaccctatgccagcatgtttttatacagtgtcccggaaagaggcaactgagatgctccagaagaacccttctttgggaaatatgatcctgaggcctggtagtgacagtagaaactactccatcactattcggcaggagatagacattccaagaatcaagcactacaaagtgatgagcgtaggacaaaactacactattgaactggaaaaacctgtaacactcccaaaccttttcagtgtcattgattattttgtgaaggagactcgaggaaatttaagaccatttatatgttcaactgatgaaaacactggtcaagaacccagtatggaagggagaagtgaaaagttgaagaaaaatccacacattgcatgaaatacaatgtgaaagctcctttgtatatcttggtaatttatattttcaaaacgaagttcttacttttaaagagaattacctatattctcctgatactgattaccaagtcattcacctgaacaccagaattagaattaaacattgtaccatacaatttcattatcttatcagaatgaaaccaattcacagggaaactagagactacggctgtggtggtaacctgcagatatacacattcccatgcactgacataagttgaaaacacatagtactttctagatggaatttttttctttaggcctcaatgaaatacatttcccctatataattccaacagcagtttctctagttctaaattttaccaattcccaaaaaacctaagttttgctgaaatctgatttgaccaatttatcaaatatgtcattttaattacctagctggaagttagagacatgaaatgtactagaggagcccttttccaatggaaatattatataccacattttttgttaatggaaataaatgtctccattccc

SEQ ID NO: 22415 - DNA, 4404 bp, Homo Sapiens
actcggccggcagcggaccgcagccaccagccgcccgcgccctccagccccgtccgggagtccccggcccgctgcggtgccgtgagtacctccaaccccctgcgccccggaggaggccgaggggcttagccaccagggctcggaagtgggggccgaatccggtgcgagacccaaggagaggggagcagagccggagttggggagactgtggctgaaaactgtgtcttcctggagactaggctggcattttgactttggggttgctgaaaagccaggagtcaaaatgactgagcgctttgactgccaccattgcaacgaatctctctttggcaagaggtacatcctgcgggaggagagcccctactgcgtggtgtgctttgagaccctgttcgccaacacctgcgaggagtgtgggaagcccatcggctgtgactgcaaggtgcaacattagaggaaatcaatcagcactgggactggctggaacaaaatctcctccacaccttgtctgtctttgataataaagatgacattgccagttttgtcaaagggaaggtaaagccgtgtgtctgggtggctgacggatgacacagctgagccattctcctcatcaggtgtgactgtcgttgaagcagcgcacacttctcgggggcctgtgcacctcagtccctcctgcttcctgtcccttgcaccccctgccttcccattgctggctcactgagcagggactgtcatctctgtgtgtcaggctctgatagccgaggagaccagcagcaggctcgccgagcaggaggaggaacccgagaaattccgagaagccctggtgaagttcgaggccaggttcaacttccccgaggcggagaagctggtcacctactactcctgctgctgttggaagggcagggtgccccgccagggctggctgtacctcagcatcaaccacctctgcttctactccttcttcctgggcaaggaacttaaacttgtggttccgtgggttgatatccagaaattagaaagaacgtccaatgtctttctgacggataccatccgaatcaccacgcagaataaggagcgtgacttctccatgttcctgaacctggatgaggtgtttaaggtcatggagcagctggccgacgtgacgctgcgaaggctgctggataatgaggtctttgacctcgaccccgatctgcaggagccgagccagatcaccaagagggacctggaagccagagcacagaatgagttcttccgggctttcttcaggttgccgaggaaggagaagctgcacgcggttgtggactgttcgctctggacgccgttcagtcgctgtcacaccgcggggcggatgttcgcctctgacagctacatctgctttgccagcagagaagatggctgctgtaagatcatcctgccactcagagaggtggtgagcatcgagaagatggaggacacgagcctgctgccgcatcccatcattgtcagtatcagaagcaaggtggccttccagttcattgagctccgggaccgagacagcctggtggaggcgctgcttgcgaggttgaagcaggtccacgccaaccaccccgtgcactacgacacctctgcggatgatgacatggcttcactcgtgtttcattcaacaagcatgtgcagtgaccacagatttggggatcttgaaatgatgtcttctcaaaatagcgaggagagtgagaaagagaagagcccgctgatgcaccccgatgccctggtcaccgccttccagcagtcaggcagccagagccctgactcccgaatgtccagagaacagataaaaataagcctgtggaatgaccactttgtggaatacggcagaaccgtgtgtatgtttcgcacagagaagattcggaagctcgtagccatgggcatccctgaatctttgcgagggagactctggcttctcttctcagatgcggtgacggatcttgcctcacaccctggttactacgggaatctggtggaggagtccctggggaaatgctgcctggtaaccgaggagatagaacgagacctgcaccgctccctgccagagcaccccgccttccagaacgaaacgggaattgctgctttgaggagagtcttgacggcctatgcccaccggaaccccaagattggatactgccagtccatgaacatcctgacctccgtgctgctgctgtacaccaaggaggaggaagccttctggctgttggttgctgtgtgtgagcggatgctgcccgattacttcaaccaccgagtgatcggggcacaagttgaccagtctgtcttcgaggagctcatcaagggtcatctcccagagctggcagagcacatgaacgacctctcagccctggcgtctgtctctctctcgtggttcctgaccctgttcctcagcatcatgcctctagagagtgcggtgaatgtggtagactgcttcttctatgatggcatcaaagccatcttccagctgggactggctgtgcttgaggccaatgctgaggacctgtgcagcagcaaggatgatggccaggccttgatgatcctcagcaggtttctagatcacattaagaatgaggacagcccagggcccccagttggcagccaccatgcctttttctccgacgaccaggagccctaccctgtgactgatatttcggacctgatccgggattcctatgagaaatttggagaccagtctgtggagcagatcgagcacctacgttacaagcacaggatcagggtcctccaaggccacgaggacaccacaaagcagaacgtgcttcgagtcgttatcccggaagtctcaattcttcctgaagacctagaggagctctacgacttattcaagagagaacatatgatgagctgttactgggagcagcccaggcccatggcctcacgccacgaccccagccggccctatgctgagcagtaccgcatagacgcccggcagtttgcacacctgtttcagctagtctcgccctggacctgcggggcccacacggagatcctcgccgaaaggacgttcaggctcttggatgacaacatggaccagctcatcgagttcaaagcgtttgtgagctgcctcgatattatgtataatggagaaatgaatgagaagattaaactattatacaggcttcatatccctccagcactcactgaaaatgaccgagacagccagtcgccgttgaggaatcctctgttgtcaacatcgagacccctggttttcgggaaacccaatggtgatgcagttgattatcagaaacagctgaagcagatgattaaggatttagccaaagaaaaagataaaactgagaaagaattgcccaaaatgagccagagagaatttatccagttctgtaaaactctgtacagtatgttccatgaagatccagaagaaaatgatttgtatcaagccatcgccacagtcaccacactgctgctgcagatcggggaggtggggcagcgaggcagcagctctggaagctgctcccaggagtgtggggaggagctgcgggcttcagctccttctcctgaggactcggtttttgcagacactgggaagacgccccaggactcccaggcacttccagaggcggcagaaagggactggactgtctcccttgaacatattttagcttcacttctgactgaacagtcattagtcaacttttttgaaaagccactggacatgaaatccaaacttgaaaatgccaagatcaatcagtacaatctcaaaacttttgaaatgagccaccaatcacaatctgaacttaagctgagtaacttgtagcaagacagcagctgctatgcacactggagtccaccataccaaagcacgaaccagactgtttcttggggtcagccctaaaccgagatttcagtctaccttaccaatggggcatctggctaaacaacctgacaaactgtggccaggggaaccgacacaaccctcaagcatttctatgtattgagaattgtcagtgccctaaggtatccattggttcccttgatgccaacttacaatttttaccggatttgctgaaatgggcacttctgctgtgatgctagtgttgattttgctctcagatgaacacaatgtctcatactaaccaagaagcaagaaaagccccatgctttcatttttcacttggagtgacaatgggagaggtcaggaatcaagttcactttcaagatctaagggagtccactatctgtgcaattgtatttggcttttttttgcactgtttcaatgctggtaattgaaaccattttaatatatttggttgtattcactttatatgtccttccaaaaatgttgttgtgtacataccatgctttcaatgttggcttccaagttttttaataagaaactttttgtttttt

SEQ ID NO: 22416 - DNA, 2891 bp, Homo Sapiens
  misc_feature (858)..(858): n is a, c, g, or t
  misc_feature (862)..(862): n is a, c, g, or t
agcggaggcggggaaggcgcccatctgcgctgcgctcgggggggcgcgggcagatcgctggcttggagaggactgtggcaggtgagaggacctgtgcgtcgttctctgcagacctggccgccccgggtgtcagagagaggtggcgagttcgtgtccgccgggaattgttggctgttggggaaactttcctgcgaggtcagtcaaggctttgggggctctgttttgaatgtggatcaccactcggagtttactaatgtttacaaggctgcgcagtagggaaacggaagagttgggtgggggcaaaaaaaaaattgaccgctgtccccgaaagtactagacgcctctgccgggaaggcgcccctgcgcgttctatccgagacgtagcttcgcagcgaattttataggaacttcattagcatattatggaacgtcccgcctcagccccccagtagttggctgtgatgtccttcgtggaatgtccttatcattcccctgcggaacgattggtcgctgaggcggatgaaggcgggcctagcgcaataactggtatgggtctgtgtttccgctgtcttcttttttctttttcggggaggagcggggtggagggtggacgagttgatttgaacgtcttcgggtcgctcggcctccagccttggattggttcttctcgctgctggggcgggccgtgctcttccgccctgcggtgtggttggttctcctcctggcctccgccctccaaatcggcgattcccataggcggcggctctcggggtgcggggcgagtctcccgctggcctcctccccattggctggaggcctggcgggtgtcgccccggcccctctccccgctcagcccgnccantttcgggcgcggatttatagcagtagcagtgatcccgggcctgtgggctcggggccggggctgcagttcggaccgcctcccgcgacccgcggggccggctcggagacagtttcaggccgcatctttgctgacccgagggtggggccgcgcgtggccgtggaaacagatcctgaaggagctagacgagtgctacgagcgcttcagtcgcgagacagacggggcgcagaagcggcggatgctgcactgtgtgcagcgcgcgctgatccgcagccaggagctgggcgacgagaagatccagatcgtgagccagatggtggagctggtggagaaccgcacgcggcaggtggacagccacgtggagctgttcgaggcgcagcaggagctgggcgacacagtgggcaacagcggcaaggttggcgcggacaggcccaatggcgatgcggtagcgcagtctgacaagcccaacagcaagcgctcacggcggcagcgcaacaacgagaaccgtgagaacgcgtccagcaaccacgaccacgacgacggcgcctcgggcacacccaaggagaagaaggccaagacctccaagaagaagaagcgctccaaggccaaggcggagcgagaggcgtcccctgccgacctccccatcgaccccaacgaacccacgtactgtctgtgcaaccaggtctcctatggggagatgatcggctgcgacaacgacgagtgccccatcgagtggttccacttctcgtgcgtggggctcaatcataaacccaagggcaagtggtactgtcccaagtgccggggggagaacgagaagaccatggacaaagccctggagaaatccaaaaaagagagggcttacaacaggtagtttgtggacaggcgcctggtgtgaggaggacaaaataaaccgtgtatttattacattgctgcctttgttgaggtgcaaggagtgtaaaatgtatatttttaaagaatgttagaaaaggaaccattcctttcatagggatggcagtgattctgtttgccttttgttttcattggtacacgtgtaacaagaaagtggtctgtggatcagcattttagaaactacaaatataggtttgattcaacacttaagtctcagactgatttcttgcgggaggagggggactaaactcaccctaacacattaaatgtggaaggaaaatatttcattagcttttttattttaatacaagtaatattattactttatgaacaattttttttaattggccatgtcgccaaaaatacagcctatagtaaatgtgtttcttgctgccatgatgtatatccatataacaattcagtaacaaaggtttaaagtttgaagattattttttaaaaaggtaaaaggttaaattttacatgacagatattttatctattggcctgttccccaaatggccattttaaaatgcttgggtacacttctcttaagtggtctagtcaaggaacctcaagtcatgcttttgctatcaccaatcatagtgtacccatctttaatttatatcaggtgtataaatgtacatttccaaatgaacttgcactgtaatattataattggaagtgcagtcagcagtagctgtcggagctaatgtcacaattatgtgcaaaggtgtgcttcctgctgtatgtgagctgtaaaaatgttacgtgaagaaataaatgaaacttggccagtttgttcctctagtagtatatttaattttgacataagtaacttttaaaatttgtcttaaaaatttatacaccagcaatttagacaaagccttaagcaaattttgtattattgttctcacttattattaataatgaagtagaagttacttaattgccagcaaataaatacgtgtcaaaaaagaatctgtattcagacccctggggtcaggaaattactgccccacttgtcaagttcagcccaccatctgtttgaacattatatgaagtttaaattctagtgtccataaataaagtttcagcggcaccccaaaaaaaaaaaaaaaaaaaa

SEQ ID NO: 22417 - DNA, 5272 bp, Homo Sapiens
ttgtatccatgtttttccgggcgtcccccggagggacaggttgcgggtgaccttttcaagtgtggaggaaagggaagctgcttttgtcttcaggaatgatgcaggtctcgactcaagcctgacgggcccaaacctccctggagctggctgacgactctgcccgagttcctgaagaggggtcccgggggtcccggagcggaagtgggagcgcgtgggcgtgggcctcctcggctgcctggggctccagacttgtgctgcgtgcggctccggagctctgttctcgctcctgagcagctgctaggtttcccaagcgactgtctcaaccgcccggccgcctcccccgggcagccagagcttcacatctacctccagccgggacccgcccccgagccgcggggcccacgcccagagccctccgccgtccccagcgcagtgcagcagagcgcgatccagtctggggccgggccgcgcttccgcgcacgcgcggagaaacccgcgccctccgaggggggaggggacagagggggcgtcacgggggcaggagaagaaggaggaggaggcccgcgtcgcctccggcggggctcgcgctcgccccgcgctcgccctccgcctcgcccgagccccgggagggtgaaacgctttctcccagcatgcagcgggaggagggatttaacaccaagatggcggacggcccggatgagtacgataccgaagcgggctgcgtgccccttctccatccagaggaaatcaaaccccaaagccattttaaccatggatatggtgaacctcttggacggaaaactcatattgatgattacagcacatgggacatagtcaaggctacacaatatggaatatatgaacgctgtcgagaattggtggaagcaggttatgatgtacggcaaccggacaaagaaaatgttaccctcctccattgggctgccatcaataacagaatagatttagtcaaatactatatttcgaaaggtgctattgtggatcaacttggaggggacctgaattcaactccattgcactgggccacaagacaaggccatctatccatggttgtgcaactaatgaaatatggtgcagatccttcattaattgatggagaaggatgtagctgtattcatctggctgctcagttcggacatacctcaattgttgttgcttatctcatagcaaaaggacaggatgtagatatgatggatcagaatggaatgacgcctttaatgtgggcagcatatagaacacatagtgtggatccaactagattgcttttaacattcaatgtttcagttaaccttggtgacaagtatcacaaaaacactgctctgcattgggcagtgctagcagggaataccacagtcattagccttcttctggaagctggagctaatgttgatgcccagaatatcaagggcgaatcagcgcttgatttggcaaaacagagaaaaaatgtgtggatgatcaaccacttacaagaggcaaggcaagcaaaaggatatgacaatccgtccttccttagaaagctgaaagctgataaggaatttcggcagaaagtaatgttaggaactcctttcctagttatttggctggttgggtttatagcagacctaaatattgattcttggctcattaaagggctaatgtatggtggtgtttgggctacagtacagtttctttcaaaatcctttttcgatcattcaatgcatagtgcattgccccttgggatatatttggcaaccaaattctggatgtatgtgacgtggttcttctggttttggaatgatctcaactttttatttatccatcttccattccttgccaatagtgttgcacttttctacaattttggaaaatcttggaaatcagatccagggattattaaagcaacagaagagcaaaagaaaaagacaatagttgaacttgcagagacaggaagtctggacctcagtatattctgcagtacctgtttgatacgaaaaccggtgaggtccaaacattgtggtgtgtgcaaccgctgtatagcaaaatttgatcatcattgcccatgggtgggtaactgtgtaggtgcaggcaaccatagatattttatgggctacctattcttcttgctttttatgatctgctggatgatttatggttgtatatcttactggggactccactgtgagaccacttacaccaaggatggattttggacatacattactcagattgccacgtgttcaccttggatgttttggatgttcctgaacagtgttttccacttcatgtgggtggctgtattactcatgtgtcagatgtaccagatatcatgtttaggtattactacaaatgaaagaatgaatgccaggagatacaagcactttaaagtcacaacaacgtctattgaaagcccattcaaccatggatgtgtaagaaatattatagacttctttgaatttcgatgctgtggcctctttcgtcctgttatcgtggactggaccaggcagtatacaatagaatatgaccaaatatcaggatctgggtaccagctggtgtagcaacatcttatcctatgaagcatattgctgagtggtgcctgaaaattgtgtctgtccgtgtctttctcacactcgaatccacatcctttgaacaagagcatgctatgtgtagggctaatggtgaattttacagtcttcttttcaacacttttattaacaaaagtaaacatggacagaacacactgccatttctgggaagagtaaagatgataaaaaataattttaatggttcttaatgtggaaattcacaacatactcaacttttgggttttgttctcacagtatttttcacaaaaaaagggtaaacttattctattgacagacatggtgtactgatcagaaatgttcagttttaactaaaactaaatttatgttatttggctaaatgttatgatgcagtctagtacgagtattgcatctaattccaggagcatcgttttaagttgattgactagttattatgtacatttcagaatgtacacataaatactgtgatgaaaatcatgtgattgggatctactgtgatgttgtcttcaaaggcaggagaaaataatgttcacaataaaatgtgctaacaatgttttgtttctatcagctgttgcaatgctgatatatttctagttcagtgaaataatttgtagtaaccttactctgaggttttacggtctgataatgaagcacttgcatgagtatagtaagtcatgtttttttgttcaaatttaaaagccctgctaattgcatgacacaccacatagaatgtatactagcagatactatccagtgaagcataaattagaatttaatttgatgttcaaaaacagttccatttttaagggttaaggtggtattttcaagaaaaggcagaacaaataatgcaaaattctcagtaatagtgatacatggatatacttccttttaaattctcagctgcaaaataattgtagacaaaataatggcatttaactaaagatggagcatgatctgtgtacatagcacatgtgaataaaagaaaagctgacagtatattctggtttcaataaaatgacctatcagaaagtagaatttcatccccaagagtatttcagtttatccaatattgagtaagttctgaaacagttttagaaaaaattttctttttgttaaatgtgatgcactgatcaatttttgtcacagcattttcataccttcatggtggactactagtcactgcttccataaatattgtttacagggtgagatttggtttattcatcttaagtgctgtagcaaactgtggttcgagcaacctgtgggaaatctgtgagagggaatggggtgggagatgtgggggaatggtggtcagactgatgacagatcctagaccaatgtaaagaatgtgtatctgtatataaataatttatcaaatagttttctctttgtgtctgtgttagtgtttttaaagctgctcatttcattttgtccaaccaaaaagaaaagggagataactaatgagcttctagtgatgttcaaaattgctgttaataggcattataccctgcaagttcactgcatgtctgatgcttggtaaaactagtcttccctgtaaaatgcagattacaggtattaaagcaatctagtggtatacccgccccttgccttagtaagaggagcagtgaaatgtatatagttgatgttcagtatttccaagtaccatttttatatagtagcttatttgaccataagtcacacatcaaaaaaagattacccttagtgtatgtgttttaatattagaaaattggcatatgtactttatttttgaaaagggaagagatgggtgtggggtggcaatagcattgtgccattttgtcatagaatgtaaaaattggttaactttacaaatgtcagctagttttgactactaattgggggaaattttagataatttttaaattcaaagttatttataaaatgctagaatttgttttaattttttgtattttgagccacttcacatgaagactcagttgcatttttatcgaatacatttttatcaaccagttaaagactatggtggttttttcagagtttggctaagaatgttgttaccatcttctttgtttgtggtacaatattttcagtgcaaaagagatgtcattcagttaaaaagacaaacctctagatgtgtaattacatggaaaatactagcaatgtgaatgcttttgtagtaaccatcttgtagtacctgtgaaatctataactcagaaatggtcagatggtcaggagccagctatgcagcagtataccatctgtttaattattttgtaggtcctgtgtgtggaaccaactataaacccagttctaaagttgtgtatgatggtgaacctttgggaatagttcttatcaacttaattggatacttttagcaaataggaacttaattctcagcactgaacatgaattacttccttggagtttttttcattcatatttttgttgtttccaggaatttatttgatattaatgggcgtaaaacagcatcattgtacttaagctatggatgtttttattttatattttctttatttataactgtgccaagtattattttgctacttaccgtgttattctgtggaaagaaaaacctgtaaagtgtttaataaattagccctccttacataaattaaatgtcaaaattttgtaaaatattaatcagaataaatactgactcttaaaaaaaaaaa

SEQ ID NO: 22418 - DNA, 2807 bp, Homo Sapiens
gctccagcccggcccgacccgaccgcacccggcgcctgccctcgctcggcgtccccggccagccatgggcccttggagccgcagcctctcggcgctgctgctgctgctgcaggtctcctcttggctctgccaggagccggagccctgccaccctggctttgacgccgagagctacacgttcacggtgccccggcgccacctggagagaggccgcgtcctgggcagagtgaattttgaagattgcaccggtcgacaaaggacagcctatttttccctcgacacccgattcaaagtgggcacagatggtgtgattacagtcaaaaggcctctacggtttcataacccacagatccatttcttggtctacgcctgggactccacctacagaaagttttccaccaaagtcacgctgaatacagtggggcaccaccaccgccccccgccccatcaggcctccgtttctggaatccaagcagaattgctcacatttcccaactcctctcctggcctcagaagacagaagagagactgggttattcctcccatcagctgcccagaaaatgaaaaaggcccatttcctaaaaacctggttcagatcaaatccaacaaagacaaagaaggcaaggttttctacagcatcactggccaaggagctgacacaccccctgttggtgtctttattattgaaagagaaacaggatggctgaaggtgacagagcctctggatagagaacgcattgccacatacactctcttctctcacgctgtgtcatccaacgggaatgcagttgaggatccaatggagattttgatcacggtaaccgatcagaatgacaacaagcccgaattcacccaggaggtctttaaggggtctgtcatggaaggtgctcttccaggaacctctgtgatggaggtcacagccacagacgcggacgatgatgtgaacacctacaatgccgccatcgcttacaccatcctcagccaagatcctgagctccctgacaaaaatatgttcaccattaacaggaacacaggagtcatcagtgtggtcaccactgggctggaccgagagagtttccctacgtataccctggtggttcaagctgctgaccttcaaggtgaggggttaagcacaacagcaacagctgtgatcacagtcactgacaccaacgataatcctccgatcttcaatcccaccacgtacaagggtcaggtgcctgagaacgaggctaacgtcgtaatcaccacactgaaagtgactgatgctgatgcccccaataccccagcgtgggaggctgtatacaccatattgaatgatgatggtggacaatttgtcgtcaccacaaatccagtgaacaacgatggcattttgaaaacagcaaaggacctggcaagatgcagaaactggcatcctcacagctgttcatacccttgtcccctgggcttggattttgaggccaagcagcagtacattctacacgtagcagtgacgaatgtggtaccttttgaggtctctctcaccacctccacagccaccgtcaccgtggatgtgctggatgtgaatgaagcccccatctttgtgcctcctgaaaagagagtggaagtgtccgaggactttggcgtgggccaggaaatcacatcctacactgcccaggagccagacacatttatggaacagaaaataacatatcggatttggagagacactgccaactggctggagattaatccggacactggtgccatttccactcgggctgagctggacagggaggattttgagcacgtgaagaacagcacgtacacagccctaatcatagctacagacaatggttctccagttgctactggaacagggacacttctgctgatcctgtctgatgtgaatgacaacgcccccataccagaacctcgaactatattcttctgtgagaggaatccaaagcctcaggtcataaacatcattgatgcagaccttcctcccaatacatctcccttcacagcagaactaacacacggggcgagtgccaactggaccattcagtacaacgacccaacccaagaatctatcattttgaagccaaagatggccttagaggtgggtgactacaaaatcaatctcaagctcatggataaccagaataaagaccaagtgaccaccttagaggtcagcgtgtgtgactgtgaaggggccgccggcgtctgtaggaaggcacagcctgtcgaagcaggattgcaaattcctgccattctggggattcttggaggaattcttgctttgctaattctgattctgctgctcttgctgtttcttcggaggagagcggtggtcaaagagcccttactgcccccagaggatgacacccgggacaacgtttattactatgatgaagaaggaggcggagaagaggaccaggactttgacttgagccagctgcacaggggcctggacgctcggcctgaagtgactcgtaacgacgttgcaccaaccctcatgagtgtcccccggtatcttccccgccctgccaatcccgatgaaattggaaattttattgatgaaaatctgaaagcggctgatactgaccccacagccccgccttatgattctctgctcgtgtttgactatgaaggaagcggttccgaagctgctagtctgagctccctgaactcctcagagtcagacaaagaccaggactatgactacttgaacgaatggggcaatcgcttcaagaagctggctgacatgtacggaggcggcgaggacgactaggggactcgagagaggcgggccccagacccatgtgctg

SEQ ID NO: 22419 - DNA, 3683 bp, Homo Sapiens
cctggcaggcggcggctgcagggcaggtccaggggccacatggctgagggggacgcagggagcgaccagaggcagaatgaggaaattgaagcaatggcagccatttatggcgaggagtggtgtgtcattgatgactgtgccaaaatattttgtattagaattagcgacgatatagatgaccccaaatggacactttgcttgcaggtgatgctgccgaatgaatacccaggtacagctccacctatctaccagttgaatgctccttggcttaaagggcaagaacgtgcggatttatcaaatagccttgaggaaatatatattcagaatatcggtgaaagtattctttacctgtgggtggagaaaataagagatgttcttatacaaaaatctcagatgacagaaccaggcccagatgtaaagaagaaaactgaagaggaagatgttgaatgtgaagatgatctcattttagcatgtcagccggaaagttcggttaaagcattggattttgatatcagtgaaactcggacagaagtagaagtagaagaattacctccgattgatcatggcattcctattacagaccgaagaagtacttttcaggcacacttggctccagtggtttgtcccaaacaggtgaaaatggttctttccaaattgtatgagaataagaaaatagctagtgccacccacaacatctatgcctacagaatatattgtgaggataaacagaccttcttacaggattgtgaggatgatggggaaacagcagctggtgggcgtcttcttcatctcatggagattttgaatgtgaagaatgtcatggtggtagtatcacgctggtatggagggattctgctaggaccagatcgctttaaacatatcaacaactgtgccagaaacatactagtggaaaagaactacacaaattcacctgaggagtcatctaaggctttgggaaagaacaaaaaagtaagaaaagacaagaagaggaatgaacattaatacctgaaactataggaaaggttaatttgcctataattatatatacattccatagtcatcaaggaatatattgtgcagagagagtatccttgactgcttaagtcagccagttcagcatggataccaacattagcttttcttcttggttatatcatctgccaaaaatagagaacttatgatctattcatgtgtgtttcaggcttatttgggagaactaatttgaacttaatcaccacttcatctaattttagcaaggtaacagttgcccagggcagtacctgaattaactgtccatttcagtacatgtcaagtgcctttgttaggtggagaagaaatgtctctagaggaatataaatacctgatttcttgtcatcgagattcttgtactgttaaatgaatattgccttttactgctctttatggcttattggaataggagctcatttaagattgatcttggagagtttcttcttgtgattttagttcataagtatgtcacctttcattttatagtgttcatcattgagtaatggattaagtgaaaatccaggagtatccatctgcagttatgtgctgaggtgataattcatccaacatatttgttagcataaatattatgcttcagtttctgttgcaaattggtgattgtgaaattacagaaagtgattttctagtctgctttttttgtttaattcttgtaatgtaagcaataaatatggagtgtcagtagtctccttccaccccagaaatgtgttggtgtaacattctcgtttcttttaacaacctggaagtacctttcttgtgatcttcactgaggaattagaactatgatagaagttaggctgtggcaaatgggacattcgtagagtgggatagaggtggcagaatgaacctggtgtagggcaggagtatgttgtgtagttacatcaatttgatgcatgctttccatctgcactccagacggctttctcagttccaagattttgcagagagaaggagcaaaccttttcattggaaaaacagaaacaaccctcccccccattttttcccctctattcatcaaacctttatgtatctttcatcttccagttacctctaggcatttagatagtgaaatttacctttgagatataacaataagtgattaactgttcactttcagatgtaatggcaaacaattgttaaaagttattaactgatcacagatttgcctggacttcccttcccagggagggaacagaagttaggaggcaactttgggatggtgctagagcatggaaagcacagagaattggacaaacaggtctttttctcttttctctgatgttttacctttaaaagatccaacatccttaccgttggtatttttagtaaggttatagtaaatagctttacaccaggatggattctgaaatataaattctaaattatatttgttataactatattttatgttgtatgttatcaggagccatcagagaatgacctttttgtgtttggaacacttggttccatgaaaagtatgctttgtgttttaactgttaaaataatttaaaaattaattattttacataattaaagaagttaaaaactattaacattaaataatttcacaatttcaacatgtcaaacctatgaagggagataggaaacaatgagaaacttacttttgctcctttatacagaattattaactatattttactaactaaaaaactctagtattctttacctaaagtcaattggctggtaagagggagagatgcaaaattctccagctctgaacttggagctacttcacactctactcttaatggaaacttgaactaatgatagatagtatttttttcctctatttaaaatttttgtcttgattaggagatttttcagttctccatataataattttctacaatcagatctatgctgtggcatattttgctttatttaaaaatttttttttagagatgagttcttgctctgtcacctaggctggagtgcagtggcatgatcatggctcactgcagccttgaccttccagcctgccaagtagctgggattacagacaggcatgtgctattacacctggctaatttttaaagttttttttgtaaagatagggtctttctatgttgcccaggctcgtcttgagctcctggcctcaatcgatcttcctgccaaggttttggaattacaggtgtgagccaccatgcctggcctgctttgacatattttatagtgtgttaattacaaatagtcttcatatgccagaatataagagcaagtgttatctactttttagatgggaattgcagaagctgcatcaaaagtatgctttgaggtatatatagtgaaacagagcctttctgaagagaattatatcaaactaattacaaccaagaaataatagtatgaagcggatgctgtttggaggacaggaaaatttatcgggaaaattacataatccctctgattccactatccagagatagccattattattaatatttggtatgtacatccttatattattttttttttatgcatgattttgtatatatggttatttttctttccataaaaatggtattaaactgtatatactgttttgtagcctacatatttcatatagaagtatattgttaacattttccatgtcaataaatattctatggctttct

SEQ ID NO: 22420 - DNA, 2051 bp, Homo Sapiens
  misc_feature (1955)..(1955): n is a, c, g, or t
  misc_feature (2011)..(2011): n is a, c, g, or t
  misc_feature (2033)..(2033): n is a, c, g, or t
tcactatagggcgaattgggcctctagatgcatgctcgagcggccgccagtgtgatggatatctgcagaattcgcccttacgatttaggtgacactatagaaggtacgcctgcaggtaccggtccggaattcccgggtcgacccacgcgtccgcaatgaagccgagtgaatgggggctgaatgtgcgagtccatagctgaagaggagcgccagatggtggaggaatacacttatttatgaaactgtcttgagttcttcttgaattgccagttttcagcctcctcatgcctccgtctcctttagacgacagggtagtagtggcactatctaggcccgtccgacctcaggatctcaacctttgtttagactctagttaccttggctctgccaacccaggcagtaacagccaccctcctgtcatcgccaccaccgttgtgtccctcaaggctgcgaatctgacgtatatgccctcatccagcggctctgcccgctcgctgaattgtggatgcagcagtgccagctgctgcactgtggcaacctacgacaaggacaatcaggcccaaacccaagccattgccgctggcaccaccaccactgccatcggaacctctaccacctgccctgctaaccagatggtcaacaataatgagaatacaggctctctaagtccatcaagtggggtgggcagccctgtgtcagggacccccaagcagctagccagcatcaaaataatctaccccaatgacttggcaaagaagatgaccaaatgcagcaagagtcacctgccgagtcagggccctgtcatcattgactgcaggcccttcatggagtacaacaagagtcacatccaaggagctgtccacattaactgtgccgataagatcagccggcggagactgcagcagggcaagatcactgtcctagacttgatttcctgtagggaaggcaaggactctttcaagaggatcttttccaaagaaattatagtttatgatgagaataccaatgaaccaagccgagtgatgccctcccagccacttcacatagtcctcgagtccctgaagagagaaggcaaagaacctctggtgttgaaaggtggacttagtagttttaagcagaaccatgaaaacctctgtgacaactccctccagctccaagagtgccgggaggtggggggcggcgcatccgcggcctcgagcttgctacctcagcccatccccaccacccctgacatcgagaacgctgagctcacccccatcttgcccttcctgttccttggcaatgagcaggatgctcaggacctggacaccatgcagcggctgaacatcggctacgtcatcaacgtcaccactcatcttcccctctaccactatgagaaaggcctgttcaactacaagcggctgccagccactgacagcaacaagcagaacctgcggcagtactttgaagaggcttttgagttcattgaggaagctcaccagtgtgggaaggggcttctcatccactgccaggctggggtgtcccgctccgccaccatcgtcatcgcttacttgatgaagcacactcggatgaccatgactgatgcttataaatttgtcaaaggcaaacgaccaattatctccccaaaccttaacttcatggggcagttgctagagttcgaggaagacctaaacaacggtgtgacaccgagaatccttacaccaaagctgatgggcgtggagacggttgtgtgacaatggtctggatggaaaggattgctgctctccattaggagacaatgaggaaggaggatggattctggttttttttctttcttttttttttgtagttgggagtaaagtttgtgaatggaaacaaacttggttaaacactttatttttaacaagtgtaagaagactatacttttgatgccattgagattcaccttccacaaactggccaaattaaggaggttnaagaagtaattttttttaagcccaaccattaaaaatttaatacaacttggtttctncccctttttcctttaaagctantttgtaaaagtttatgag

SEQ ID NO: 22421 - DNA, 1672 bp, Homo Sapiens
gatctctagaatagtcttaagtctatgtggcggcgaggccgcggcgacaaggtagccacccccgcagcatgcctcgaccgcggtccgcagctgcaccgcctctccccgccccccagggtgcgctggtcccggtcgcgcgctcagacctccgcatcccgggcgtggtcggttaagtccccggccgtgacccaggcccggggagctagtctccgcccttcgctcttacggatcccctcggagtacgccgcaccatgcagctcaggctcttccggcgcctccttctcgccgctttgctgctggtgatcgtctggaccctcttcgggccttcggggttgggggaggagctgctgagcctctcactagcctccctgctcccagcccccgcctcaccggggccgcccctggccctgccccgcctcttgatccccaaccaggaagcttgcagtggtcccggggcccctcccttcctgctcatcctggtgtgcacggctccggagaacctgaaccagagaaacgccattcgggcttcgtggggcgggctgcgcgaggcccgggggctcagggtacagacgctattcttgctgggagagccgaacgcacagcaccccgtgtggggttcccaggggagtgacctggcctcggagtcagcagcccagggggatatcttgcaggccgccttccaggactcctaccgcaacctcaccctaaagaccctcagcgggctgaactgggctgagaaacactgccccatggcccgatacgtcctcaagacggacgatgatgtgtatgtcaacgtccctgaactggtatcagagctggtcttgcgagggggccgttgggggcaatgggagagaagcacggaaccccagagagaggctgagcaggaaggaggccaggttttgcacagcgaggaagtgcctcttctgtacttgggccgggtgcactggcgcgtgaacccctctcggacaccggggggcaggcaccgcgtatcagaggagcagtggcctcacacctggggcccctttccaccctatgcctcaggcacggggtatgtgctgtcagcgtctgctgtgcagctcattctcaaggtggccagccgggcaccccttctcccattagaggatgtctttgtgggggtaagtgcccgacgaggaggcctcgccccaacacagtgtgtcaagctggctggtgccacccactacccgctagaccggtgctgctatgggaaattcctgctgacgtcccacaggctggacccctggaagatgcaggaagcctggaagctggtgggtggctctgacggggaaaggactgcgcccttttgctcctggttccagggagtcctgggcatcctgcggtgtcgagcaatagcctggcttcagagctgagagtgcctggggccacaggaaaggcaggaacaggaccttctctctcccaggcccaacgcaggggccctcactggctgcagctgatctgtttccttataccagatcctcagtctcactaaagacagcgatatgggagacacccaggggcctggcccgccagcccaaaagatggtcatcgggaagagaaaaagaaaaaaatgctgcagttgttctctcaagctagggcagaagagggtgtcaagctcctcaataaacttgtctccacttaaaaaaaaaaaaaaaaa

SEQ ID NO: 22422 - DNA, 6118 bp, Homo Sapiens
catcttaaagcttccctttgagagtgttgctcttagaacttttcagatcttgttcagtgacctgctacagttatgtgggaggatccaggtgtaaatagaatctgatgacagattctgtaagcgtaaacaagcatcttaggggtgagagatgaaggccacaaagtatcgagagtcatgatcacaattatacctacccgtaaaatgtaatactggactagagtattttttctttccttttgcccaagagctagctaattaggacccgtaatctggagcttcactgtgacagttccactttctatttagaatcagcctgagtctctcctgcctgccttatccttgggccatcagcccagggtcactgggaactctctcacaatcacctaggcatctttgagatatttgaggatgtccagagcagaattgtgtcaggttgacaagagtggttaattctgcctatgtctcagtgacaagagaaatgagacatcctgtgtttgctcctcccctcatacaagagatgtctttggttggtatccggttgagagtttcccagtttcctgatagttggatgaaaaacaaggaggaggtctggagactcaagcagataaactaattgctaccatttcatatggcccttagaaaaatagataaagcagtcatggtccctaccatctaggaactgttagtctagactagcaactgaatacgtggttgaattaagcatcatatggttggcaaagtgaatagatgtgtgggaaaacgtgtgggctttatttgggccactttctttatatcgttgtgactactgaggtcatcatttgaatgaatgtttatgaccacaagagttttaaatatttttatttcttttactttgctaagaatacatatttatcttataataaaattaccctagaaaaccccaggagatttgtttaaatggctaattagtatatttacacagttgatgggttgagcagagtaatatatagggtttactcccagctgcagttctgttcagattcaccctttttggaggctttatttaggtctggccccaccctggagtcttgcctcacagaactgattagaagagatcagagttttggctggtgcctttccggagtggttgctaacaattcccgaattccacaaggagataaatgggaaaaaaaggaaccactgacatttaaagatgtcgccatagaattctctctggaggagtggcaatgcctggatactgcacagcgggatttatataggaatgtgttgttagagaactacagaaacctggtctttttgggtattgctgtctctaagccatatctgatcacctgtctggagcaaaaaaaagagccctggaatataaaaagacatgagatggtagccaaacccccagtaatgtcttttcattttgcccaagacctttggccagagcagaacataaaagattctttccagaaagtgacactgagaagatacggaaaatgtgaatatgagaatttacagttaagaaaaggctgtaaacatgtggatgagtgtacggggcacaaaggaggtcataatacagttaaccaatgtttgacagctaccccaagcaaaatattccagtgtaataaatatgtgaaagtctttgataaattttcaaattcaaatagatataagagaagacatacaggaaacaaacacttcaaatgtaaagaatgtagcaaatcattttgcgtgctttcacaactaactcagcatagaagaattcatactagagtgaattcctacaaatgtgaagaatgtggaaaagcctttaactggttctcaactcttactaaacataagagaattcatactggagaaaagccctacaaatgtgaagaatgtggcaaagcctttaaccagtcctcacaacttactaggcataagataattcatactgaagagaaacccaacaaatgtgaagaatgtggcaaggcctttaaacaggcctcacaccttactatacataaaataattcatactggagaaaaaccttacaaatatgaagaatgtggcaaagtctttagccagtcctcacaccttactacacaaaagatacttcacactggagagaacctctacaagtgtaaagaatgtggaaaagcttttaacctattctcaaatcttactaaccataagagaattcatgctggggagaaaccctacaaatgtaaagaatgtggcagagcttttaacatatcctcaaaccttaataaacaggagaaaattcatactggagggaaactcaacaaatgtgaagaatgtgacaaagcttttaaccgatccttaaaacttactgcacataagaaaattctaatggaagagaaaccctacaaatgtgaagaatgtggcaaagtctttaaccagttctcaactcttactagacataagataattcatactggagagaaaccctacaaatgtaaagaatgtggcaaagcttttaaccaatcttcaaaccttactgaacataagaaaattcatactgcagagaaatcctataaatgtgaagaatgtggcaaagcttttaaccaacactcaaacctaattaaccataggaaaatttattctggagagaaaccatacaaatgtgaagaatgtggaaaagcttttaatcgatcctcaacccttactagacataagaaaattcatactggagagaaaccctacaaatgtgaagaatgtgacagagcttttagccagtcttcaaaccttactgaacataagaaaattcatactggagagaaaccctataaatgtgaggaatgtggcaaagcttttaaccgattctcaacccttactaaacataagagaattcatactggagaaaaaccctataaatgtgaagaatgtggaaaagcctttaatcaatcctatcaacttactagacataagatagttcatactaaagagaaactcaacaaatgtgaagaatttggcaaggcctttaaacagtcctcacaccgtactatacataaaattattcatactggagagaaaccctacaaatgtgaagaacatggcaaagtttttaaccagtcctcaaaccttactacacaaaagataattcatactggagagaacctctacaaatttgaagaacatggaaaagcttttaacctattctcaaacattactaaccataagataatttatactggagagaaaccccacaaatgtgaagaatgtggaaaagcttataaccgattctcaaacctaactatacataagagaattcatacgggagagaaaccttaccaatgtgcagaatgtggcaaagcctttaactgctcctcaacccttaatagacataagataattcatactggagagaaaccttacaaatgtaaagaatgtggcaaagcttttaacctatcctcaacccttactgcacataagaaaattcatactggagagaaaccctataaatgtgaagaatgtggcaaagcttttaaccaatcctcaaaccttaccacacataagaaaattcatacttcagagaaaccctacaaatgtgaagaatgtggcaaatcctttaaccagttctcatctcttaatatacataagataattcatactggagagaaaccctacaaatgtggagattatggcagagctttcaacctatcctcaaatcttactacacataagaaaattcatactggagagaaaccctacaaatgtgaatatggcaaaacttaattgatcctacaagcttactacacataagaaaattcatactggagagaaactacaaatgtgaagaatgtgttaaagcctttaacaagtcttcaactttttctgcacacacgaggtattttatactggtgagaaaccttacaatgtaaagaatgtggcacagcttttaactaatcttcaaaccttactgaaagttgagaaaattcgtactggagagaatcctacaaatgtgaaaaatgtggcaaatcctttaactgatcctcaacttttactaaacataaggtaattcatactggagaaaagccatacaaatgagaagaatgtggcaatgcctttaatcagtcctcacacctttctacacataagataatttatactggagaggaactctatagttgtgaagaatgtggcaaagcttttaaccaatcctcataccttactatacagaaattcatactggagagaaagcctacaattgtgaagaatgtggcaaagcttttaaccttccttaacccttaactgtagataagaaaattcatactggaaagaaaccctacaaatgtgaagtctgtggcaaagcttttaactgattctcaactcttactacatgtaagagtatttatactggaaagaaaccctacaaatgtaaaaaacgtggcaatgcctttaactggtcctcacaccttgctacatataagacagtttatactttgagagaaaccctgcaaatgtgaataatgtggcaatactttaaaccaatcctcaaacctcactaaacataagataatactgaaaactttacaaacctgaatgatgtgacaataattttgacaacacctcgaactttctaacataaatcatactggtgaaaaatcctagaaatgtgaaaaatatcacaaagcctttaaatggttgtcacacttgattgtaggtaagaatccatactgaagaaaactcctggaagtgtaaaaaatgtggcaacacttttaataaatgctcaccccttattgcacaggaaagcatttatacttcagaaagattgtacaaatacaaggaatgtggaaaagccattattatctgctcagattttactcaacattagagagttagtacgtaataaaagcattataaatgcaatttttgtcaagagatctttcagaaaatataagcctttaaagtgaagaagaggagccagttgtgctggctcacatctgtaatgccagcactttgggaggccaaggtgggtggatcacctgagggcaggagtctgagaccagcctggccaacatagcaaaaccccatctctattaaaaattttacaaaaattagctgcgtgtggtggcaggcccctgtaatcccagctaattgggaggctgaagcaggagaattgctcaaacctgggaggcgaagattgcagtgagctgaaatcacaccactacactccagccaaagcaacaagagcaaaaacttcgtctcaaaaacaaaacaaaaaaagagtattcattgtgaggacaaacaatacaaatacgaagagggttgtagtacctttacttgtatcacagatacttttgtacccattttgcactagaggaaaaccatgaagcagttgctcaaatgttgttcaacaccagaaaatttatattggagaaaagcactgtaaatgtaatgcatttgtgaaaacattttttaaaaaactacagcttagaaaataccagaggcctcatactaaaatatatttttgcaagtgaagtaaatataaaaataatttaatccaaaattaagtctatataaatatcagagaattcacagtagaaatatctaaggtactgacacttcagacattgctgagtatagaatcagaatgctgagtatagaaaataatttaaaactaaagttggtaggtaaataatgtgtatataactttaaaagaagtagaatttttttgtagatgtataattacattcaaattatattttttcttgaaaaattagtttttgaaaagcaaataatgatgtaattcaactcaaattcatgctcttcattcctattgtattcacatgtgaaagcatgtgattaatttttcatgcatcaaagatatgagaaatcatttctgttaggtcggtattatttatgacactttctatgaaagaataaggacattaaaatgtaagatgcatgatgaaaacctgagtgaagaggctgtttgtgtttaacttataatattgagtgatccatgaagtaggttttcagagcaatattcttctgcattatagtaagagaaaaccatttttaatcttagttaaaattaaagtgaattagtagtatatcattttactatttgtacttttatgtaataaaatgcaatgtgtttaaaaaaaaaaaaaaaaaaaaa

SEQ ID NO: 22423 - DNA, 7037 bp, Homo Sapiens
ggaaactctgaaagaacttagaatcagcattttgagagcagaagcttgggcatgctgtgattttccaataaactgctatcacaatgtcaaaatgcagttcagacaagagcaacacagagatctcaaacattaaaacgtaagctgtgctagaacaaaaatgcaatgaaagaaacactggatgaatgaaaagccctgctttgcaacccctcagcatggcaggcctgcagctcatgacccctgcttcctcaccaatgggtcctttctttggactgccatggcaacaagaagcaattcatgataacatttatacgccaagaaaatatcaggttgaactgcttgaagcagctctggatcataataccatcgtctgtttaaacactggctcagggaagacatttattgctagtactactctactaaagagctgtctctatctagatctaggggagacttcagctagaaatggaaaaaggacggtgttcttggtcaactctgcaaaccaggttgctcaacaagtgtcagctgtcagaactcattcagatctcaaggttggggaatactcaaacctagaagtaaatgcatcttggacaaaagagagatggaaccaagagtttactaagcaccaggttctcattatgacttgctatgtcgccttgaatgttttgaaaaatggttacttatcactgtcagacattaaccttttggtgtttgatgagtgtcatcttgcaatcctagaccacccctatcgagaatttatgaagctctgtgaaatttgtccatcatgtcctcgcattttgggactaactgcttccattttaaatgggaaatgggatccagaggatttggaagaaaagtttcagaaactagagaaaattcttaagagtaatgctgaaactgcaactgacctggtggtcttagacaggtatacttctcagccatgtgagattgtggtggattgtggaccatttactgacagaagtgggctttatgaaagactgctgatggaattagaagaagcacttaattttatcaatgattgtaatatatctgtacattcaaaagaaagagattctactttaatttcgaaacagatactatcagactgtcgtgccgtattggtagttctgggaccctggtgtgcagataaagtagctggaatgatggtaagagaactacagaaatacatcaaacatgagcaagaggagctgcacaggaaatttttattgtttacagacactttcctaaggaaaatacatgcactatgtgaagagcacttctcacctgcctcacttgacctgaaatttgtaactcctaaagtaatcaaactgctcgaaatcttacgcaaatataaaccatatgagcgacacagttttgaaagcgttgagtggtataataatagaaatcaggataattatgtgtcatggagtgattctgaggatgatgatgaggatgaagaaattgaagaaaaagagaagccagagacaaattttccttctccttttaccaacattttgtgcggaattatttttgtggaaagaagatacacagcagttgtcttaaacagattgataaaggaagctggcaaacaagatccagagctggcttatatcagtagcaatttcataactggacatggcattgggaagaatcagcctcgcaacaacacgatggaagcagaattcagaaaacaggaagaggtacttaggaaatttcgagcacatgagaccaacctgcttattgcaacaagtattgtagaagagggtgttgatataccaaaatgcaacttggtggttcgttttgatttgcccacagaatatcgatcctatgttcaatctaaaggaagagcaagggcacccatctctaattatataatgttagcggatacagacaaaataaaaagttttgaagaagaccttaaaacctacaaagctattgaaaagatcttgagaaacaagtgttccaagtcggttgatactggtgagactgacattgatcctgtcatggatgatgatcacgttttcccaccatatgtgttgaggcctgacgatggtggtccacgagtcacaatcaacacggccattggacacatcaatagatactgtgctagattaccaagtgatccgtttactcatctagctcctaaatgcagaacccgagagttgcctgatggtacattttattcaactctttatctgccaattaactcacctcttcgagcctccattgttggtccaccaatgagctgtgtacgattggctgaaagagttgtcgctctcatttgctgtgagaaactgcacaaaattggcgaactggatgaccatttgatgccagttgggaaagagactgttaaatatgaagaggagcttgatttgcatgatgaagaagagaccagtgttccaggaagaccaggttccacgaaacgaaggcagtgctacccaaaagcaattccagagtgtttgagggatagttatcccagacctgatcagccctgttacctgtatgtgataggaatggttttaactacacctttacctgatgaactcaactttagaaggcggaagctctatcctcctgaagataccacaagatgctttggaatactgacggccaaacccatacctcagattccacactttcctgtgtacacacgctctggagaggttaccatatccattgagttgaagaagtctggtttcatgttgtctctacaaatgcttgagttgattacaagacttcaccagtatatattctcacatattcttcggcttgaaaaacctgcactagaatttaaacctacagacgctgattcagcatactgtgttctacctcttaatgttgttaatgactccagcactttggatattgactttaaattcatggaagatattgagaagtctgaagctcgcataggcattcccagtacaaagtatacaaaagaaacaccctttgtttttaaattagaagattaccaagatgccgttatcattccaagatatcgcaattttgatcagcctcatcgattttatgtagctgatgtgtacactgatcttaccccactcagtaaatttccttcccctgagtatgaaacttttgcagaatattataaaacaaagtacaaccttgacctaaccaatctcaaccagccactgctggatgtggaccacacatcttcaagacttaatcttttgacacctcgacatttgaatcagaaggggaaagcgcttcctttaagcagtgctgagaagaggaaagccaaatgggaaagtctgcagaataaacagatactggttccagaactctgtgctatacatccaattccagcatcactgtggagaaaagctgtttgtctccccagcatactttatcgccttcactgccttttgactgcagaggagctaagagcccagactgccagcgatgctggcgtgggagtcagatcacttcctgcggattttagataccctaacttagacttcgggtggaaaaaatctattgacagcaaatctttcatctcaatttctaactcctcttcagctgaaaatgataattactgtaagcacagcacaattgtccctgaaaatgctgcacatcaaggtgctaatagaacctcctctctagaaaatcatgaccaaatgtctgtgaactgcagaacgttgctcagcgagtcccctggtaagctccacgttgaagtttcagcagatcttacagcaattaatggtctttcttacaatcaaaatctcgccaatggcagttatgatttagctaacagagacttttgccaaggaaatcagctaaattactacaagcaggaaatacccgtgcaaccaactacctcatattccattcagaatttatacagttacgagaaccagccccagcccagcgatgaatgtactctcctgagtaataaataccttgatggaaatgctaacaaatctacctcagatggaagtcctgtgatggccgtaatgcctggtacgacagacactattcaagtgctcaagggcaggatggattctgagcagagcccttctattgggtactcctcaaggactcttggccccaatcctggacttattcttcaggctttgactctgtcaaacgctagtgatggatttaacctggagcggcttgaaatgcttggcgactcctttttaaagcatgccatcaccacatatctattttgcacttaccctgatgcgcatgagggccgcctttcatatatgagaagcaaaaaggtcagcaactgtaatctgtatcgccttggaaaaaagaagggactacccagccgcatggtggtgtcaatatttgatccccctgtgaattggcttcctcctggttatgtagtaaatcaagacaaaagcaacacagataaatgggaaaaagatgaaatgacaaaagactgcatgctggcgaatggcaaactggatgaggattacgaggaggaggatgaggaggaggagagcctgatgtggagggctccgaaggaagaggctgactatgaagatgatttcctggagtatgatcaggaacatatcagatttatagataatatgttaatggggtcaggagcttttgtaaagaaaatctctctttctcctttttcaaccactgattctgcatatgaatggaaaatgcccaaaaaatcctccttaggtagtatgccattttcatcagattttgaggattttgactacagctcttgggatgcaatgtgctatctggatcctagcaaagctgttgaagaagatgactttgtggtggggttctggaatccatcagaagaaaactgtggtgttgacacgggaaagcagtccatttcttacgacttgcacactgagcagtgtattgctgacaaaagcatagcggactgtgtggaagccctgctgggctgctatttaaccagctgtggggagagggctgctcagcttttcctctgttcactggggctgaaggtgctcccggtaattaaaaggactgatcgggaaaaggccctgtgccctactcgggagaatttcaacagccaacaaaagaacctttcagtgagctgtgctgctgcttctgtggccagttcacgctcttctgtattgaaagactcggaatatggttgtttgaagattccaccaagatgtatgtttgatcatccagatgcagataaaacactgaatcaccttatatcggggtttgaaaattttgaaaagaaaatcaactacagattcaagaataaggcttaccttctccaggcttttacacatgcctcctaccactacaatactatcactgattgttaccagcgcttagaattcctgggagatgcgattttggactacctcataaccaagcacctttatgaagacccgcggcagcactccccgggggtcctgacagacctgcggtctgccctggtcaacaacaccatctttgcatcgctggctgtaaagtacgactaccacaagtacttcaaagctgtctctcctgagctcttccatgtcattgatgactttgtgcagtttcagcttgagaagaatgaaatgcaaggaatggattctgagcttaggagatctgaggaggatgaagagaaagaagaggatattgaagttccaaaggccatgggggatatttttgagtcgcttgctggtgccatttacatggatagtgggatgtcactggagacagtctggcaggtgtactatcccatgatgcggccactaatagaaaagttttctgcaaatgtaccccgttcccctgtgcgagaattgcttgaaatggaaccagaaactgccaaatttagcccggctgagagaacttacgacgggaaggtcagagtcactgtggaagtagtaggaaaggggaaatttaaaggtgttggtcgaagttacaggattgccaaatctgcagcagcaagaagagccctccgaagcctcaaagctaatcaacctcaggttcccaatagctgaaaccgctttttaaaattcaaaacaagaaacaaaacaaaaaaaattaaggggaaaattatttaaatcggaaaggaagacttaaagttgatagtgagtggaatgaattgaaggcagaatttaaagtttggttgataacaggatagataacagaataaaacatttaacatatgtataaaattttggaactaattgtagttttagttttttgcgcaaacacaatcttatcttctttcctcacttctgctttgtttaaatcacaagagtgctttaatgatgacatttagcaagtgctcaaaataattgacaggttttgtttttttttttttgagtttatgtcagctttgcttagtgttagaaggccatggagcttaaacctccagcagtccctaggatgatgtagattcttctccatctctccgtgtgtgcagtagtgccagtcctgcagtagttgataagctgaatagaaagataaggttttcgagaggagaagtgcgccaatgttgtcttttctttccacgttatactgtgtaaggtgatgttcccggtcgctgttgcacctgatagtaagggacagatttttaatgaacattggctggcatgttggtgaatcacattttagttttctgatgccacatagtcttgcataaaaaagggttcttgccttaaaagtgaaaccttcatggatagtctttaatctctgatctttttggaacaaactgttttacattcctttcattttattatgcattagacgttgagacagcgtgatacttacaactcactagtatagttgtaacttattacaggatcatactaaaatttctgtcatatgtatactgaagacattttaaaaaccagaatatgtagtctacggatattttttatcataaaaatgatctttggctaaacaccccattttactaaagtcctcctgccaggtagttcccactgatggaaatgtttatggcaaataattttgccttctaggctgttgctctaacaaaataaaccttagacatatcacacctaaaatatgctgcagattttataattgattggttacttatttaagaagcaaaa

SEQ ID NO: 22424 - DNA, 2813 bp, Homo Sapiens
gcgagggccgctggggccgcgaagtggggcggccgggtgggctacgagccgggtctgggctgaggggcgcggcttcgcggtggaccccagcccggcaacggaaggcgagctctcctccaccgtccaaagtaaactttgccgctccttccgcggcgctcccgagtcctcgccgccgccgggccgccgcagtccgcgaagagccgtcctgcgtcagggcctccttccctgccccggcgcggggccactgcgccatggacgccacagcactggagcgggacgctgtgcagttcgcccgtctggcggttcagcgcgaccacgaaggccgctactccgaggcggtgttttattacaaggaagctgcacaagccttaatttatgctgagatggcaggatcaagcctagaaaatattcaagaaaaaataactgagtatctggaaagagttcaagctctacattcagcagttcagtcaaagagtgctgatcctttgaagtcaaaacatcagttggacttagagcgtgctcatttccttgttacacaagcttttgatgaagatgaaaaagagaatgttgaagatgctatagaattgtacacagaagctgtggatctctgtctgaaaacatcttatgaaactgctgataaagtcctgcaaaataaactgaaacagttggctcgacaggcactagacagagcagaagcgctgagtgagcctttgaccaagccagttggcaaaatcagttcaacaagtgttaagccaaagccacctccagtgagagcacattttccactgggcgctaatcccttccttgaaagacctcagtcatttataagtcctcagtcatgtgatgcacaaggacagagatacacagcagaagaaatagaagtactcaggacaacatcaaaaataaatggtatagaatatgttcctttcatgaatgttgacctgagagaacgttttgcctatccaatgcctttctgtgatagatggggcaagctaccattatcacctaaacaaaaaactacattttccaagtgggtacgaccagaagacctcaccaacaatcctacaatgatatatactgtgtccagttttagcataaagcagacaatagtatcggattgctcctttgtggcatcactggccatcagtgcagcttatgaaagacgttttaataagaagttaattaccggcataatttaccctcaaaacaaggatggtgaaccagaatacaatccatgtgggaagtatatggtaaaacttcacctcaatggtgtcccaagaaaggtgataattgatgaccagttacctgttgatcacaagggagaattgctctgttcttattccaacaacaaaagtgaattatgggtttctctcatagaaaaagcatacatgaaagtcatgggaggatatgattttccaggatccaactccaatattgatcttcatgcactgactggctggataccagaaagaattgctatgcattcagatagccaaactttcagtaaggataattctttcagaatgctttatcaaagatttcacaagggagatgtcctcatcactgcgtcaactggaatgatgacagaagctgaaggagagaagtggggtctggttcccacacacgcatatgctgttttggatattagagagttcaaggggctgcgatttatccagttgaaaaatccttggagtcatttacgttggaaaggaagatacagtgaaaatgatgtaaaaaactggactccagagttgcaaaagtatttaaactttgatccccgaacagctcagaaaatagacaacggaatattttggatttcctgggatgatctctgccagtattatgatgtgatttatttgagttggaatccaggtctttttaaagaatcaacatgtattcacagtacttgggatgctaagcaaggacctgtgaaagatgcctatagcctggccaacaacccccagtacaaactggaggtgcagtgtccacaggggggtgctgcagtttgggttttgcttagtagacacataacagacaaggatgattttgcgaataatcgagaatttatcacaatggttgtatacaagactgatgggaaaaaagtttattacccagctgacccacctccatacattgatggaattcgaattaacagccctcattatttgactaagataaagctgaccacacctggcacccatacctttacattagtggtttctcaatatgaaaaacagaacacaatccattacacggttcgggtatattcagcatgcagctttactttttcaaagattccttcaccatacaccttatcaaaacggattaatggaaagtggagtggtcagagtgctggaggatgtggaaatttccaagagactcacaaaaataaccccatctaccaattccatatagaaaagactgggccgttactgattgagctacgaggaccaaggcaatatagcgttggatttgaggttgtaacagtttctactctaggagatcctggtccccatggctttctgaggaaatctagtggtgactataggtgtgggttttgctacctggaattagaaaatataccttctgggatcttcaatatcattcctagtacctttttgcctaaacaagaaggaccttttttcttggactttaatagtattatccccatcaagatcacacaacttcagtgatggagaaatctcaagttactggcttttatacttaccaaacatcagttcttcaaataaggacgcaaatcttcaggacagtaagcagaacaatcagaatggaattaaatctctaaaaacgtg

SEQ ID NO: 22425 - DNA, 2926 bp, Homo Sapiens
ggcacccggcctgtgccagcttgcagagctcaccaggtgcagacccctgcggccagggcgaggacggatctgagcagctgggcagcaggtgccaccgcctgtgggacccagagggcttgaggacatctgcaatgctccagaagcccaagagcgtgaagctgcgggccctgcgcagcccgaggaagttcggcgtggctggccggagctgccaggaggtgctgcgcaagggctgtctccgcttccagctccctgagcgcggttcccggctgtgcctgtacgaggatggcacggagctgacggaagattacttccccagtgttcccgacaacgccgagctggtgctgctcaccttgggccaggcctggcagggctggttttgccatgtttcccaggatagtctcacactcctgggctcaagctgtcctcctgccttggtctcctaaagtgctgggattacagatgtgagcgacatcaggcgcttcctcagtgcatttcacgagccacaggtggggctcatccaggccgcccagcagctgctgtgtgatgagcaggccccacagaggcagaggctgctggctgacctcctgcacaacgtcagccagaacatcgcggccgagacccgggctgaggacccgccgtggtttgaaggcttggagtcccgatttcagagcaagtctggctatctgagatacagctgtgagagccggatccggagttacctgagggaggtgagctcctacccctccacagtgggtgcggaggctcaggaggaattcctgcgggtcctcggctccatgtgccagaggctccggtccatgcagtacaatggcagctacttcgacagaggagccaagggcggcagccgcctctgcacaccggaaggctggttctcctgccagggtccctttgacatggacagctgcttatcaagacactccatcaacccctacagtaacagggagagcaggatcctcttcagcacctggaacctggatcacataatagaaaagaaacgcaccatcattcctacactggtggaagcaattaaggaacaagatggaagagaagtggactgggagtatttttatggcctgctttttacctcagagaacctaaaactagtgcacattgtctgccataagaaaaccacccacaagctcaactgtgacccgagcagaatctacaaaccccagacaaggttgaagcggaagcagcctgtgcggaaacgccagtgacacgtacacaccacgtcctggtctttgtttgaggcctgacgtgggcatcattttaacaggtgccttttttgtttttttgtttttcgtttttttggtcactccagtagctcctggaaaaaaccttaaaaaatgtttcctccaaatctgatttcattacatttctgaattgttgggtttttttttgttgttttgttttgttttgtagatggagtttcacttttgttgcccaggctggagtgtagtggcgcgatctcggctcagcctcccgagtagctgggattacaggcatgtgccaccacgcccggctaatgtttgtatttttagtagagacggggtttcaccatgttggtcaggctggtctcaaactcctgacctcaggtgatccgcccacctcagcctcccaaagtgctgggatgacaggtgtgagccactgcgcccagcctgaatcatttcttataccttctgacagcccaacttccagaggacagctctggggtactcgttggatgtctgtgagtacctggtcatacgggtcagtagggataagaattgtctctgggctgaggaattcttctgttctctggtttcaccagcgttgggtttgctcatgtaatgtggtcaccatactcaaatggtgtcatggctgaagttggccaccttgcttgagggacaagttgtttatgtatcagctctctgctgggtctccctttccatggcaaatgggcagctccatcctcttgatcttctaaatgcccaaaagaggtgtcatgctttgggggtacgatgtttatactccgtaaagaacatacaaggacattcactgctgatttttttttttgtttgtttgagacagggtctcactctgtcgctcaggctggagtgcagtgatgcaatcttggctcactgcaacctccgcctctcaggttcaagtggttctcctgcctcagcctcccaagtagctgggattacaggcacctaccaccagggccagctaatttttgtatgtttagtagtaacggggtttcaccatgttggccaggctgttctcgaactcctgacctcaggtgatctgcccgcctcggtctcccaaagtgctgggattacaggcatgagccactgcacctgacctgctgaattgtttataatggcaagaaataggaaaccccccaatgtctgttgaacagctatcacgttgaaccacgtgaaactgctgttttctaggccaaaaatggtgagcgatcatttatttcatgattcaacctgatacatttacatagtgcaaaactgtgtcacagtttcaggcttttatgaggaaagcgtttctgtgtagaaactggaagctgttcagggcatcggcagctgaaccctgctccgttggtcagcgttactatcatctcggatcatatggagctcatgtcagccgtgtgggtggcgggtgcacagagacggtctggaaggaaacacgcggatctgaacagcagtaatcctgggggatacgggggttgggctagattacagagggctcattttctacgtcatgtattttatgatacttgaattttttgaaatgggcatttattttataacatgttaaaatgtactttttaaattaagtcattttgtaatatttgaatttttacatttgttgtacaatcaggaaaagcaataaagatttttcaaaaataaaaaaa

SEQ ID NO: 22426 - DNA, 4506 bp, Homo Sapiens
gatcagctggcgggcgggcgggagccgagcgcggccccggctctcgctgcagcgccgcctcttctctgcgtcgcaggccggcccggcggccgtgacaatgtcgcggggctggtagcagggcgccggccgccgagccgtctcaagtttaaacttacacgaatcgctttctggaggaggaggggacccgctgcgcgattgacacgcatattcctataggcatcctccctcagcccccacccccacggccggattcgggtggctcctctccgaggtgaaatctgagaagaaatccttggatctcttttcttaaaaaaaaaaaaaaaaaaaaaaaaaaaaaaatctagaaaccatcggtattttgctttgctgctccctattcgcaagatgaagaagtttttcgactcccggcgagagcagggcggctctggcctgggctccggctccagcggaggagggggcagcacctcgggcctgggcagtggctacatcggaagagtcttcggcatcgggcgacagcaggtcacagtggacgaggtgttggcggaaggtggatttgctattgtatttctggtgaggacaagcaatgggatgaaatgtgccttgaaacgcatgtttgtcaacaatgagcatgatctccaggtgtgcaagagagaaatccagataatgagggatctttcagggcacaagaatattgtgggttacattgattctagtatcaacaacgtgagtagcggtgatgtatgggaagtgctcattctgatggacttttgtagaggtggccaggtggtaaacctgatgaaccagcgcctgcaaacaggctttacagagaatgaagtgctccagatattttgtgatacctgtgaagctgttgcccgcctgcatcagtgcaaaactcctattatccaccgggacctgaaggttgaaaacatcctcttgcatgaccgaggccactatgtcctgtgtgactttggaagcgccaccaacaaattccagaatccacaaactgagggagtcaatgcagtagaagatgagattaagaaatacacaacgctgtcctatcgagcaccagaaatggtcaacctgtacagtggcaaaatcatcactacgaaggcagacatttgggctcttggatgtttgttgtataaattatgctacttcactttgccatttggggaaagtcaggtggcaatttgtgatggaaacttcacaattcctgataattctcgatattctcaagacatgcactgcctaattaggtatatgttggaaccagaccctgacaaaaggccggatatttaccaggtgtcctacttctcatttaagctactcaagaaagagtgcccaattccaaatgtacagaactctcccattcctgcaaagcttcctgaaccagtgaaagccagtgaggcagctgcaaaaaagacccagccaaaggccagactgacagatcccattcccaccacagagacttcaattgcaccccgccagaggcctaaagctgggcagactcagccgaacccaggaatccttcccatccagccagcgctgacaccccggaagagggccactgttcagcccccacctcaggctgcaggatccagcaatcagcctggccttttagccagtgttccccaaccaaaaccccaagccccacccagccagcctctgccgcaaactcaggccaagcagccacaggctcctcccactccacagcagacgccttctactcaggcccagggtctgcccgctcaggcccaggccacaccccagcaccagcagcaactcttcctcaagcagcaacagcagcagcaacagccaccgccagcacagcagcagccggcaggcacgttttaccagcagcagcaggcccagactcagcagtttcaggcagtacatccagcaacccagcaaccagcaattgctcagttccctgtggtgtcccaaggaggctctcaacagcagctaatgcagaatttctaccagcagcagcagcagcagcaacaacaacagcaacagcaacagctggccacagccctgcatcaacaacagctgatgactcagcaggctgccttgcagcaaaagcccactatggcagcaggacagcagccccagccacagccagctgcagccccacagccagcccctgcccaggagccagcgattcaagccccagtaagacaacagccaaaggttcagacaaccccacctcctgccgtccaggggcagaaagttggatctctcactccaccctcatcccccaaaacccaacgtgctgggcacaggcgtattctcagtgacgtaacccacagtgcagtctttggggtccctgccagcaaatcaacccagctgctccaggcagctgcagctgaggccagtctcaataagtccaagtctgcaaccaccactccatcaggctctcctcggacctctcaacaaaacgtttataatccttcagaagggtctacgtggaatccctttgatgacgataatttctccaaactcacagctgaagaactgctaaacaaggactttgccaagcttggggaaggcaaacatcccgagaagcttggaggctcagctgagagtttgatcccaggctttcaatcaacccaaggtgatgcttttgctacgacctcattttctgctggaactgctgaaaaaaggaagggtgggcagactgtggactctggcctcccgcttctaagcgtgtctgatcctttcattcctcttcaagtacctgatgcaccagaaaaactaattgagggactcaaatctcctgacacttctcttctgctccctgacctcttgcctatgacagatccttttggtagcacttctgatgctgtaattggtaaagtcatcatctctgtttcttcagtcatgcatgatatgtgtgcctgtttcaagaatgacaagtacctagttaaccaatccctggggaatagccctgccaccccagaagccaaggctatttaatctcacttgtatcactccaaatgaagtgttttccttgcttttcgggggtacaacgtctattttttgcctttcttgatatctggagatttctagagtggatctcttatgaatgaggaggaatgtggaaagtttcacatttagttagaagaactttaaaaaattggtttctaactagactacctttactgaacttaatgaaatttagcagattcttcttttttttttttttgtttgagacagagtttcactcttgttgcctgggctggagtgcagtggcaagatctcggctcactgcagcctccatctcccgggttcaggcaattctcctgcctcagcctcccgagtagctggggttacaggcgtgcaccaccatgcctggctaatttttatatttttagtagagatggggtttctccatgttggtcaggctggtctcgaactcctgacctcaggtgatccgcctgccttggcctcccaaagtgctgggattgcaggggtgagccaccatgcccagcccagattcttctttggaaggcccatgtacatccagctgcagtgggacgagcctgggaagcatgggaagaccccatccctacaaaaaaagtgttgttaattggccaggtgtgggggtgcacgcctgtgctaccagctctttgggaggctgagacggaagatcactttgagccagggggtttgaggctgcagtgagccctgatcatgccactgccctccagcttaggtgacagagacccatcttaaacaaaattaaaaaatttaaaaaggtccatgtatataccaagtatcagtaactgagaaaacattttgcccactggttaagccccataaatagaatccagggcaggggcttggtctgcttcctctctcacattttcctatgttccaacagcaaggcaggcaagatttgcaaaatgtccaaggcccctgtactccaggagggtccaatcatgaggcacctaataatgcctttgggcagaaagtcctagaactcagaagtgccatgaccttgcataggggtaggcctgcagctgaggggtgtcacgtggtgcaaaaggcctcccagctacatcctgggatggggtttgagatggattaatggcctttgcatggcacagaggatgtttgcccccaggtttatcccttaataaaagtgaaattaccagaaaaaattaaggtgcctttcagcccatctcttctgacatggaagaggtttgctgagcggcttatgttctgaatttgtttatgagaactgatcattagtgagactggccacagtatttaaccttgcacatgcatgctcagtgaagcctagacattcagagcagcagaaataaagtaacttatttttctttccaccttgcctgagactggcattttagagacctgttaaaagaaagtcttcacatggctgggtgcagtggctcacacttgtaaccacaggactttgggaggccaaggtgggatagatcgcttgagctcaggagcaagacaccatctcaaaaaatgagaatt

SEQ ID NO: 22427 - DNA, 5120 bp, Homo Sapiens
ggcccgagccaccgactgcaggaggagaaggggttgtgctcctggccgaggaaggagaaaggggcggggccggcgggcagcgtgcggcagtgcggagctcctgagaccggcgggcacacgggggtctgtggcccccgccgtagcagtggctgccgccgtcgcttggttcccgtcggtctgcgggaggcgggttatggcggcggcggcagtgagagctgtgaatgaattctccgggtggacgagggaagaagaaaggctccggcggcgccagcaacccggtgcctcccaggcctccgcccccttgcctggcccccgcccctcccgccgccgggccggcccctccgcccgagtcgccgcataagcggaacctgtactatttctcctacccgctgtttgtaggcttcgcgctgctgcgtttggtcgccttccacctggggctcctcttcgtgtggctctgccagcgcttctcccgcgccctcatggcagccaagaggagctccggggccgcgccagcacctgcctcggcctcggccccggcgccggtgccgggcggcgaggccgagcgcgtccgagtcttccacaaacaggccttcgagtacatctccattgccctgcgcatcgatgaggatgagaaagcaggacagaaggagcaagctgtggaatggtataagaaaggtattgaagaactggaaaaaggaatagctgttatagttacaggacaaggtgaacagtgtgaaagagctagacgccttcaagctaaaatgatgactaatttggttatggccaaggaccgcttacaacttctagaaagtggagctgttccaaaaagaaaagaccccttaacacacactagtaattcactgcctcgttcaaaaacagttatgaaaactggatctgcaggcctttcaggccaccatagagcacctagttacagtggtttatccatggtttctggagtgaaacagggatctggtcctgctcctaccactcataagggtactccgaaaacaaataggacaaataaaccttctacccctacaactgctactcgtaagaaaaaagacttgaagaattttaggaatgtggacagcaaccttgctaaccttataatgaatgaaattgtggacaatggaacagctgttaaatttgatgatatagctggtcaagacttggcaaaacaagcattgcaagaaattgttattcttccttctctgaggcctgagttgttcacagggcttagagctcctgccagagggctgttactctttggtccacctgggaatgggaagacaatgctggctaaagcagtagctgcagaatcgaatgcaaccttctttaatataagtgctgcaagtttaacttcaaaatacgtgggagaaggagagaaattggtgagggctctttttgctgtggctcgagaacttcaaccttctataatttttatagatgaagttgatagccttttgtgtgaaagaagagaaggggagcacgatgctagtagacgcctaaaaactgaatttctaatagaatttgatggtgtacagtctgctggagatgacagagtacttgtaatgggtgcaactaataggccacaagagcttgatgaggctgttctcaggcgtttcatcaaacgggtatatgtgtctttaccaaatgaggagacaagactacttttgcttaaaaatctgttatgtaaacaaggaagtccattgacccaaaaagaactagcacaacttgctagaatgactgatggatactcaggaagtgacctaacagctttggcaaaagatgcagcactgggtcctatccgagaactaaaaccagaacaggtgaagaatatgtctgccagtgagatgagaaatattcgattatctgacttcactgaatccttgaaaaaaataaaacgcagcgtcagccctcaaactttagaagcgtacatacgttggaacaaggactttggagataccactgtttaaggaaatacctttgtaaacctgcagaacattttacttaaaagaggaaacacaagatcttcaatgaacgtcatcggctacagaaacagcctaagtttacaggactttttagagtcttacatatttgtgcaccaaacttgaagatgaaccagaaaacagacttaaacaaaatatacaatgcaaatgtaattttttgttgtttaaggccttgccttgatggtcacagttatcccaatggacactaagttagagcacaacaaaacctgattctggtcttctttaccaatataatcataatgtaaataataatttgtatattgtgttgcagatgaaagtattccaggaacagtgaatggtagaagacacaagaacatttgtttgtttgtcttctgatgttttttcttaaaatagtaatttctcctacttttcttttctactgttgtcttaactacaggtgattggaatgccaaacactcttaagtttattttcttttttcgttttataaattcagtgtgccaaatgaaacttttttcctaagtaactgtaataggaaaaagtttattttgagagtttcttcttcataaatctacagacattaaacaattgttgtgttctttttaccttttatttttctattaccttgctaccaaacagtttagatagcaatataatagcaaaaaagcaaatatggtaaaatagagaaggtttgaaggtttgagttactctgtcatataacatgtagatcagtcttcatgtgacctgcagtatttttttttctaatgtatttgtcagaaatctgttgtagactgttaacttcttcctgatggaatttattttctgcaagaattattctgatatttaagagagccaattttaactgctgtgaaaatgtttccagtgcaagagaagggaaatactaggaactaagacatttctaatttattgcttattactttcttaattttacaggataattataagcaagtggaactaccatcttttattcttaataattattaatcccttcaatgaaactttaaaaaaactgaatttttatacatggcatacatttttctagttccttctgcttgctttattaactcaaaagttctagttctagtctgttgatctgccttttgttctcccaaaatgtacagtaattccatttgtttgtataaatatgcctggattttcattataaaaatgtcattgtagggagtagagactcatatcatggccttttaaatattgtaataaaggcaaatagatatttgcccttagtttactggttaaaagtttgtttacagaacttttctctggtgcttaaatgatgctatgtaaaatgtcatgagtggaaagaatatttgtagtagtaacaagaatttttcatttaggaaagatttcttaggttttgaaagaatacattaaaataaaaaacttgcccctactaggtaagaactttataatgaagacatacattcttcttaattttactcttgctcttgttaaagatttgtttgaatatagaagatgcatgatttctggggtttttttttttttttgagacagagtttcgctcttgttgcccaggctggagtgcaatggcgcaatctcgactcaccacaacctccgcctcccaggttcaagcaattctcctgcctcagcctcccgagtagctgggattacaggcatgcgccactaccccagctaattttgtatttttagtagagatggggtttctccatgttggtcaggctggtcttgaactcctgacctcaggtgatccgcctgcctcggcctcccaaagtgctgggattacaggcataagccactgcgcccagccagaagatgcatgatttcttaggatcatatgctgtttgtagccataaggtaaatcatgtctcttccaatcatgactttggaactccctgaataataaaaatgagagttgagataaataggggaaaaaaaatttttttcaagccagagctatgcatatgttaggtgatgggtagtatccctttaaggtctcaaacattacaacatcaattatgaaatactgataacgaaaggtagtaatgaaatatatatgatgaaaagaattgagaagttctaaattaagacatttcagttaagctcataaaatttcattgttttcatttaaaaggagattaacgttattgatacttggataactggctaatcatattaaaggactatgtggttccagctcaacttttaatatattgtctcttttaaaactatcatgattataattctattgggaaagacttttagataacaaagatttcaaatgttaaaagagataaaagtcaggttaatactatcttaaacactgagtcagaaaatcattactgtatagaagttgctttcctgatcaagtctgaacttcagctagtgctagagaactattttctatgacttaactctaaccaagttttattttaagctgtttctttgatagaagggccatgaaaatagagtaatgatatagtaggagataagggattggtttggtctttttcaataaagatagaagttgctgaagttttctgaattaataatgacttagattgtgaccttttagattcggtgttgagctctgtgttgtattacttcctaaaagataatgcttaaacattaagcattagtgtgctcttcatgttaatatggcagagttttgtaaactaaattaaaacttactgatatattggactttgagccaagggaaagaatgagtactatctttccagatatcttaagggtaaaagcttattctaagacagtctgtccattgagaatattagatttctgacttgcaaatatgtttgtactccagaagaattagaggaaaagcagatactagaattctaatttaattacatatacagccgtctttgtttatagtgtagaattctttatattttgtacaaaaactaattcttttggtaaaatgaaccatttacagttcggttttggactctgagtcaaaggattttcctttaaatgcttgtctcaattttagtctggtcttttgtacttttcttcagaagaaatgaattaaagggtacagttgcataaagtgggtttttatcctaatgtattggaaataaatgataaacttt

SEQ ID NO: 22428 - DNA, 5113 bp, Homo Sapiens
cgacggcggcggccgtcctcatcccggcgcttgagaggacgcggggctgcgcaaatggcttgtcccgctctcggtctggaagctcttcagcccctgcagcccgagccgccccccgagcccgccttctccgaggcgcagaagtggattgagcaagtaactggcagaagttttggtgataaagattttcggacaggtttagaaaatggaatcctcctctgcgagttgctgaatgctataaagccaggacttgttaaaaagatcaatagattgcctacccccattgcaggactggacaatattatcttattcttgagaggttgtaaagagctcggccttaaagaatctcaactttttgacccgagtgacctccaggatacatccaacagagtaacagtcaagagccttgattatagtaggaagctgaaaaatgtattagttaccatttactggctgggaaaagcagcaaacagctgcacatcctacagcggaacgacactaaacctgaaggagtttgaaggattgttggctcagatgcgaaaggacactgatgacattgaaagtcctaaacgcagtatccgagacagtggctacatcgactgctgggattccgagcgcagcgactccctctctcctcctcgccacggcagagatgattccttcgacagcctggattcctttggctctcgctctcggcagacgccttcaccagatgtagtcctcaggggaagcagcgatgggagaggaagcgactctgaatccgacttgcctcatcggaagctgccagatgtgaagaaggatgacatgtctgcacggcggacttcccatggtgagccgaaatcagcagtgccttttaaccagtacctcccgaacaaaagcaatcagacggcctacgtccccgcgcctctgagaaagaagaaagcagagagagaggaataccgcaagagctggagtaccgccacctccccgctgggtggggagaggcccttcagatacggtccgagaactcctgtgtctgatgacgcagagagcaccagcatgtttgacatgcggtgtgaggaggaggccgcggtgcagccgcacagcagggcccgccaggagcagctgcagctgataaataaccagctgagggaagaggacgacaaatggcaagatgacctggctcgttggaagagtcgtagaagaagtgtttctcaggacttaatcaagaaagaggaagaaaggaaaaaaatggagaagttactggctggagaagatgggacaagtgaacgaaggaaaagcatcaaaacctacagagaaattgttcaagaaaaagagcggagagagagagagctgcatgaagcatataagaacgctcggtcccaggaggaggcagaggggatccttcaacagtacattgagaggttcaccatcagtgaggctgttctcgaacgcttggagatgccaaaaattctggaaagaagccattcaacagagccaaatttatcctccttcctgaatgaccccaatcccatgaaatacctgcggcaacagtcactgcctccacccaaattcactgccactgttgaaaccaccattgctcgtgccagtgttctggataccagcatgtcagcaggcagtgggtctccaagcaaaactgtcactcccaaagcagtgcctatgctgacacccaagccttactcccagcccaaaaattctcaagatgttctgaagacctttaaggtagacgggaaagtcagtgtgaatggagagacggttcatagagaggaggagaaggaaagagagtgtcccacggtggcacctgcccactccttaaccaaatcccagatgtttgaaggtgtggccagagtgcacgggtctccactggagctgaaacaagacaacggtagcatcgagatcaacataaagaagccaaactctgttccccaagagctcgcagcaaccactgagaaaacggaaccgaatagtcaagaggacaagaatgatggtggaaaatcaagaaaagggaatatagaacttgcctcatcagaaccacagcattttacaacaactgtgactcgatgcagcccgaccgtggcctttgtggaatttccctccagcccccagctgaagaatgatgtgtcggaagaaaaagaccagaagaaaccagaaaatgaaatgagtggaaaggtggagttggtgctgtcacaaaaggtggtaaagccaaaatctccagaacccgaagcaacgctgacatttccatttctggacaaaatgcctgaagccaaccaactacatttgccaaatctcaattctcaagtggattctccaagcagtgagaagtcacctgttacgacacctcagtttaagttctgggcatgggacccagaagaggagcgcaggcgacaggaaaaatggcaacaggaacaggaacgtttgctccaggagagataccagaaggagcaggacaagctgaaagaagagtgggaaaaggcccaaaaggaggtggaagaggaagaacgcagatactatgaggaggagcgtaagataattgaagacactgtggttccatttactgtttcttcaagttccgctgaccagctgtctacctcttcctccatgactgaaggcagtgggacaatgaataagatagacctgggaaactgtcaagatgaaaaacaagacagaagatggaagaaatcattccagggagatgacagtgacttattgctgaagactagggaaagtgatcgactggaggagaagggcagcctaactgaaggggccttggctcattctgggaaccctgtatcaaaaggagtccatgaagaccatcagctggataccgaggctggggccccacactgtggaacaaacccacagcttgctcaggatccatcccagaatcagcagacatcaaatccaacgcacagttcagaagatgtgaagccaaaaaccctcccgctggataaaagcattaaccatcagatcgagtctcccagtgaaaggcggaagaaaagtccccgagagcacttccaggctgggcctttctctccctgttctcccacccctcccggtcagtcaccaaacaggtctataagtggaaagaagctgtgctcttcctgtgggcttcctttgggtaaaggagctgcaatgatcatcgagaccctcaatctctattttcacatccagtgtttcaggtgtggaatttgtaaaggccagcttggagatgcagtgagtgggacggatgttaggattcgaaatggtctcctgaactgtaatgattgctacatgcgatccagaagtgccgggcagcctacaacattgtgacacggctttcaagcttccggatcactcaccatttctttactgagagtgtcccctggcaactgcttaacaaaatcccaagctcaggggcttctcagcatttacctaatttctgaaaggctcttctgaaaggtggtatctgttctttcgtagcacagtgtttatgtttttcctgtttattgttttggtttttttttttttttgcatttgcacagtatacacaaaagaatatggggttgtaatgatcctgaatagctcaaaaaaggttttagcatggtcaaacaggcttatggtttaaaatgtgttattctcttctttgggaattagctaaatgatgcaataaacctgttttgttttagaatgtctaggaattaaacactttatgtttacagaattgagctgcagaaagtgcaagacatgccaatttgagacacacggtcttctaagactgaaggataaatttaatgcatttcagaaactaaacatcacagcaagctctatctctgagctataatttgtttttaatgcaaagacactagtttgataatatatactgtaatcctgaaacatttgtgttacttacctttggaggtagaaattataccaataaattattgcaccgttagtattagattctgtgtaccttggaagttatgtcattaatataggctggttcatcaaataaagcaaaaccttgcaatatcagctagatttacactccgggacgttgcccaaaggtaggaagaaagcagagggaaatatttcagtcatcatttccaaagtcattatcaaaatctgtgaggaagtttaatcttccaaagagtcaatgtcagacatcaggcctctgttgcctgcttctctcgaggcactagattaggagtcttcaataagagacttaacatgaggtatatggaagatgaggcaccgagataagttcatcattaggtgtgagcactgctcacccttgctggcaagttctccttaagggcctgaagcacaggtgtccaaagaaaagcgttaagtccatcttaatagaatctatgtggtatatgatgtggtcagcccctggtctgtgatcagcaagaacctacagcacagattatgccctgcccacttcaatgaatacctactctcctccattctccatcactttttttgctatcaagaactccggaccttgcccatggagaagtttagagaggaactcttgtggagagctggtttattttctgccctgtgcgacgagtttcagctggccaagaaaggagtcaagttattaaaaagcatcacaatgtagatctccaggctggttttttgttttttgttgttaagactggggaaagggggactatttattctgccttaaatcaatggcaaataagtcaagatgacattttgtgaatgtagactatggatacactcctaatagattgatgtagtcataaaagggggtcaagtagatgtttttctgttatgtaagcaataatttttccgtgtcttattgagtatggctagcgattatttattacatgctagatgggttctttgcatgtgggttccatataggtgcagaaatttcctcagccactggagggatttcgaccatatttgtcatttggatgagctgttattagattgaaatctacacatcatttcattaaaaattgtgccttagaaaacgcaaagctgttgcacatggcgataaattatggatgcagtacattgaagagagatgaagtcacttccaagtttccaagacttctcatggaggtgtttgctgttttacaggaaaaaataaaaataaaaaaag

SEQ ID NO: 22429 - DNA, 5100 bp, Homo Sapiens
gtataggtatgaaatcaccagaagaacaactggtgtgtgtgccaccacaggaggcctttcctaacgacccccgggtaataaatagacagagaagttctgattaccagtttccatcctctccatttacagacacactaaagggcaccactgaggatgacgtgttgacaggtcaggtggaggagcagtgtgtgccagcagcagaggcagagccgcctgcagtgagcgaaaccacagagaggacagtgttaggagagtacaatctcttttctaggaagatagaagagattttgaagcaaaagaatgtttcatatgtcagtagagtttccacacctatcttttcaacacaagagaagatgaaacggctttccgagttcatatattctaagacttccaaagctggtgtgcaggagtttgtagatggtttgcatgagaagctaaatactattattattaaagcatcagccaagggtgggaatttgccaccagtcagtcctaacgattctggtgctaagatagcatcgaatcctctggaaaggcatgtcataccagtttcctcaagtgacttcaacaataaacatctccttgagccactgtgtagtgatcctttgaaagataccaactctgatgagcagcattccacttcggctttaactgaagtagaaatgaaccagcctcaacatgccacagagttaatggtgacttctgatcatattgtacctggtgatatggcccgggaaccagtagaagaaacaacaaaatcccccagtgatgtaaacatttctgctcaaccagctctttcaaattttataagccagttagaacctgaagtatttaatagtttggttaaaatcatgaaagacgtccagaaaaatactgtgaaattttatattcatgaagaagaagagagtgtgctctgtaaagaaataaaggaatatcttatcaaattaggcaatacagaatgtcatcctgaacagtttttggaaagaagatcaaaattagataaactattgattattattcaaaatgaagacattgcaggtttcattcacaagatacctggcttggtgactttaaagaagctcccctgtgttagttttgctggtgttgatagcctggatgatgttaaaaatcatacatacaatgaattatttgtatctggaggttttatcgtatctgatgaatcaattctaaacccagaggttgtcacagttgagaaccttaaaaattttttgacattccttgaggaacttagtactccagaaggaaaatggcaatggaaagtccactgtaaatttcagaagaaactaaaggaactaggcagattgaatgctaaagctctaagtctgttgacgcttctgaatgtctatcagaagaaacatctggttgaaattttgtcataccacaattgtgattcacaaactcgaaatgctccagaattggattgccttatcagacttcaggctcagaacatacagcaacgacacatagtctttttaacagagaagaacatcaagatgctttccagttatacagataatggaatagtggttgcaactgctgaagacttcatgcaaaactttaaaaatcttgtgggctatcacaattcaatcacagaagaaaaccttccacagcttggtgctaatgagaatcttgagtcgcagtcagctcttttagaaaacgatgaaaaggatgaagaggatatgtctctggattcaggggatgaaatctcacatatagaagtatgcagcaattttcattcagaaatatgggagaaagagaccaaaggatcacgtggaacagatcaaaaaaagaatactcaaattgagttgcaatcgtctcctgatgtgcaaaacagtttattagaagataagacttaccttgattctgaagagagaacttctattgatatagtatgctctgaaggagagaacagcaattcaacagaacaagattcatatagtaactttcaggtttatcatagtcaattaaatatgtcccatcagtttagtcattttaatgttctcactcatcagacatttttggggacaccatatgccctttcatcaagtcagtctcaagaaaatgagaattacttcttatctgcttatactgaaagcttggatagagataaatctccacctcccttaagttgggggaaaagtgattcttccaggccatattcacaagagaaataactgtagtaactttttttttaagagattgttgtggactttgtttattaacaatttatatttcattctctaaacaaaaggttcttgttctttctcaaatgttttttcttttatttaaatcatgatggcctgtaacagttgaagcatctaaaaattgaaataaatatatatttttaacatatattgtacttgaattatctcatgttggcacttctaagttttactttttgtatgttacctgtacttaggcttcaaattgaagcctgttttatgtgtaaaatcagatgcttgcaggaggacggtaaacagcaaaggctttacttctttttctctaatgtcacctgatataaagtacttttgttgaagtgaattattttgatgtaggcttttgtatactgtgtttacacaggtataagtcagtaatagcagtgttaatatttacaggattttggctcgatacctcaagatttatctaacagtgcagtttcatttagataataaactatgtacataggacacattttttatctctaggcttagtcatgtaaaaactgcctattgctaaaattctggtaactttttgagagtattggataattttcagtacctgcgcaatccttgatttaatgaaattaaattttttatttcaaaagataggcttctgtttatcaaaggcgttgaacaatttgatttttaaattagttttagcaaaatggaagtataatgggaatatatttttgaggtggtcttagtagtaattaccatttgttgaacacattaatgctatactagacagatacagtggagatagctttcaaacccgtatctattcctaactactgcctctaatactaattactaacttgttactaatgctaacttttaaaaatgtttttgaaaattgcaatttctacaaataaatgtcatagtgcaaataaatgtcaggatttagagaaggagcctaaactgaatttgtgttatttcagtaaaagttatggagttatgggtctagacgtgttaataagttagacagaactttggcactttagaacaaatgcatgagtggtatttcagttcctaagttacataaaaagtgtgaaagaacactgtgaggtcccagcaacgccagactatattaaggtaagtagaaagtgtttttatagggcttcaatacccaggtggtgacagagcagaagaaccggttttttttttttttttttttactactaagcttttacaaaagaagtatctgttttattgtatagaacaagtacagcattttactacatagtatacaagtttttaatgagcatttaaaaaaataagtaaatctaggctatttgaaaaatacagttgagccagtgagcacattttataatttggaagacacaaatcaaatgtgaaggatttgattttctacatttaaaatgaagaaccaaaactctcttcttgattttcagctaaaggcaggagactactttccaactccttttgcttctggagaaggccctgaaatcacattgatatatgtttgttagtaaaatgtgcacacctgacttgcaatgttgtgttaaactagaattatattcacttggaaaacatatcgcttaggataaaattttgtcattcaaaaattttttcagaaatgcttgtactagaccacctcatttggatatatagctatcacatttgtaagattctgtttttagcataaaaatcaatagggatgaaaattttcttagaactcaagactccataactatgggggtaaatgaagtcatcccttctcccccagtccacccccaagtgctcttagatactgaaggagtctcccttaacatacagtgttttttttttgttgttgtttttttgtttttttttggagatggagtctcgctctgtcgcccaagctggagtacagtggtgcaatctcactgcaagctctgcctcccaggttcacaccattctcctgcctcaacctcccgaatggctgggactacaggcacccaccaccacgcctggctaactaactaactaactttttgtatttttagtagagacagggtttcactgtgttagccaggatggtcttgatctcctgacctcatgatctgcctgcctcagcctcccaaagtgctgggattacaggcttgagccactgctcctggccaacatccagtattttatcttgactgtcctaaccttaccttagatgctaacagaagggtcctgctcaaataacactgggtgctatattgatgggtaaatgtgtacatcctattccttcctctttatctcacaatttttgtctccactaagcaagaagtaaactaacacttcgtcactctaaagaaataacttatgtaaaactcttagtaaccctgtttgtcttcaaatgagtaaatagaccaaagtggggggacaattttctagttctgtagagggaaaaacatctgagtcaacattttcaaatgcagagggtattggtacatgacgacatggaaaagggcacttttaaacacagcttactcttcctcaagtacagagagtatatagtgaatcaaaactaactacagccattctttttaaagcccaagggatggagcaaaggtgtaaggatgttacctgtttgttttaatcagagagcaaaaagaagtcacaatagtttgggagaaaaagtagtatggtgagtaaggttatgcgtataatttcatactgaatttattactatttgggatgtacgtcaatgttctaacaaacactgccaacacgtcaattttttaaaaagcgtgggccacattgctaagaatttgttaaagcataactgtattttttgttttagggccttattgatgttttgccgttccaatgtatgcatttttttactcaataaacttgtcttaatttt

SEQ ID NO: 22430 - DNA, 17518 bp, Homo Sapiens
atcacttctccctgggctcccaggccctcctgcagcagccccgcctgggccatgtcttcctcagatgaagagacgctcagtgagcggtcatgtcggagtgagcggtcttgtcggagtgagcgatcttacaggagcgagcggtcggggagcctgtctccctgtcccccaggggacaccttgccctggaacctgccactgcatgagcagaaaaagcggaaaagccaggattcggtgctggaccctgcagagcgtgctgtggtcagagtcgctgatgaacgggaccgggttcagaagaaaacgttcaccaagtgggtcaacaagcacttaatgaaggtccgcaagcacatcaatgatctttatgaagatctgcgggatggccataacctgatctctctgttggaggtcctctcaggcatcaaactgccccgggagaagggcaggatgcgttttcataggctgcagaatgtgcagattgccctggacttcctaaagcagcgacaggtgaaactagtgaatattcgcaatgatgacatcacagatggcaaccccaagttgaccctgggtctgatctggaccattattttgcatttccagatctctgacatctacattagtggagaatcaggggatatgtcagccaaggagaaactactcctgtggacccagaaggtgacagctggttacacaggaatcaaatgcaccaacttttcctcctgctggagtgatgggaagatgttcaatgcactcattcaccgataccgacccgatctagtagacatggagagggtgcaaatccaaagtaaccgagagaatctggaacaagcttttgaagtggcagaaagactgggggtcactcgcctgctggatgcagaagatgtggatgtgccatctccagatgaaaagtctgtaatcacttatgtgtcttcgatttatgatgccttccctaaagttcctgagggtggagaagggatcagtgctacggaagtggactccaggtggcaagaataccaaagccgagtggactccctcattccctggatcaaacagcatacaatactgatgtcagataaaacttttccccaaaaccctgttgaactaaaggcactttataaccaatatatacacttcaaagaaacagaaattctggccaaggagagagaaaaaggaagaattgaggaattatataaattactagaggtgtggattgaatttggccgaattaaactgcctcaaggttatcaccctaatgatgtggaagaagagtggggaaagctcatcatagagatgctggaacgagagaaatcacttcggccggctgtggagaggctggaattgctgctacagattgcaaacaaaatccagaatggtgctttgaactgtgaagaaaaactgacactagctaagaatacactgcaggctgatgctgctcacctggaatcaggacaaccggtacaatgtgagtcagatgtcattatgtacattcaagagtgtgaaggtctcatcaggcagctgcaggtggatctccagatcctgcgggatgagaattactaccagctagaagagctggcttttagggtcatgcgtcttcaggatgagctggtcaccttgcgtctagagtgtacaaacctgtaccggaagggtcatttcacttcacttgaattggttccaccctctactttaaccaccactcatctgaaagcagaacccttaaccaaggcaacccattcttcttctacctcctggttccgaaagcctatgactcgggctgaacttgggccatcagctcctctgaagatgaaggcaatctccgatttgtgtatgaactactgtctttgggtagaagagatgcagatgaaactggagcgagcagagtggggcaatgacctgcctagtgtggagttgcagctagaaacacagcagcacatccatacgagtgtagaagagctgggctcaagtgtcaaggaggccaggttgtatgagggaaagatgtcccagaatttccataccagctatgctgaaactcttggaaagctggagacacagtattgtaaattgaaggaaacttctagcttccggatgaggcaccttcagagcctgcataaatttgtttccagagctacagctgagttgatctggttgaatgagaaggaggaggaggaactagcatatgactggagtgacaacaattccaatatctcagccaagagaaattacttctctgagttgacaatggaactggaggagaaacaggatgtgtttcgttctctacaagatacagcagaactactttcacttgagaaccacccagccaagcagacagtggaggcttacagtgctgctgtccagtcccagttgcagtggatgaagcagctgtgcctgtgtgttgagcagcatgtgaaagagaatactgcttattttcagttcttcagtgatgcacgagagctggagtcattcttgaggaacctccaagattccattaaacgaaaatattcctgtgaccacaacaccagcttatcccgccttgaagacctgctccaggactccatggatgaaaaggagcagcttatacagtccaagagttccgttgccagtctcgttgggagatcaaaaaccatcgttcagctaaaaccacgcagtccagaccatgtgttaaagaacaccatttctgtcaaggctgtctgtgactacaggcagatcgagattactatttgcaaaaatgatgaatgtgtgctagaagataattctcagcggaccaaatggaaagtgatcagccccacagggaacgaggcaatggtgccgtcagtctgcttcctcatccccccacccaataaggatgccattgagatggccagcagggtcgaacaatcttatcagaaggttatggccctttggcatcagctgcatgttaacaccaaaagccttatctcttggaactatctgcgtaaagaccttgaccttgtacagacctggaacctagaaaagcttcgatcctcagcaccaggggagtgccatcagattatgaagaaccttcaggcccactatgaagactttctgcaggatagtcgtgactctgtgctgttctcagtggctgatcgcttgcgcttggaagaggaggtggaagcttgtaaagcccgcttccagcacctgatgaagtccatggagaatgaggacaaagaggagactgtggccaagatgtacatttcagagttgaagaacatccggctacgcctggaggagtatgaacagagggtggtcaaacgaattcagtctctagccagctctaggactgacagagatgcctggcaggacaatgcattaaggattgcagagcaagagcacacccaggaggatttacagcaattgaggtcagacttggatgcagtttctatgaaatgtgacagctttctccatcagtctccatctagttcaagtgtcccaactctgcgctcagaactgaatctgctggtggagaagatggaccatgtctatggtctctctactgtatatctgaataagttaaagacagttgatgttatagtacgtagcatacaggatgctgaactcttggtcaaaggttatgagattaagctgagtcaagaagaagtagtactggcagatctctcagctctggaggcccattggtcgacattacggcactggcttagtgatgtgaaggacaagaattcagtgttttcagtcctggatgaggaaattgccaaggccaaggtagtggcagagcagatgagtcgtctgacaccagagcgaaatctggatttggagcgctatcaggaaaaaggctcccagctgcaggagcgttggcaccgagtcattgcccagctcgagattcgccaatctgagctagaaagtatccaggaagttctgggagattaccgagcctgccatggaactctcatcaagtggattgaggaaaccactgcccagcaggaaatgatgaagccaggccaggcagaggatagcagagtgctttcggagcagctcagccagcagacggccctatttgcagaaattgagagaaatcagacaaaactggatcaatgtcaaaaattttcccagcagtactctactattgtaaaggactatgaattgcaactgatgacatacaaggcctttgtggaatcgcagcagaaatcccctggcaagcgccgtcgcatgctttcctcttcagatgccatcactcaagagttcatggacttaaggactcgctacacggcattggtgactttaacaactcagcacgtgaaatacatcagtgatgcactccggcgtctggaggaggaggagaaagtggtagaagaggagaaacaagaacatgtggagaaggttaaagaacttttgggctgggtgtctaccctagcgaggaatacacaaggaaaagctacctcatccgagaccaaagaatcaacagacattgaaaaagctattttggaacagcaggttctgtcagaagagctgacaacaaagaaagaacaagtctctgaagctattaaagcatcacagatcttcttggccaagcatggtcataagctctcagaaaaagagaagaaacaaatatctgagcaattgaatgccctaaacaaggcttaccatgacctttgtgatggttctgcaaatcagcttcagcagcttcagagccagttggctcaccagacagaacaaaagaccctgcagaaacaacaaaatacctgtcaccagcaactggaggatctttgcagttgggtaggacaggcagaaagagcactggcaggccaccaaggcagaaccacccagcaggatctctctgctttgcagaagaaccaaagtgacttgaaggatttacaggatgacattcagaatcgtgccacctcatttgccactgttgtcaaggacattgaggggttcatggaagagaatcagaccaagctgagcccacgtgagttgacagctcttcgggaaaagcttcatcaggctaaggagcaatatgaggcgctccaggaagagacacgtgtggcccagaaggaactggaggaagcagtgacctccgccttacagcaggagactgaaaagagtaaagcagcaaaggaactggcagagaacaagaagaagatcgatgctctcctggattgggtaacttcagtaggatcatctggtggacagctgctgaccaaccttccaggaatggagcagctctcgggagctagcttggagaaaggagccttggacaccactgatggttacatgggggtgaatcaagccccagagaaactggacaagcaatgtgagatgatgaaggcccgtcaccaagaattgctgtcccagcagcaaaatttcattctggccacccagtcagctcaggccttcttggatcagcatggccacaatctcacacctgaggagcaacagatgctgcaacagaagctgggagagctaaaggaacaatactctacttccctggcccaatcagaggcagaactgaagcaggtgcagacacttcaggatgagttgcagaaatttctgcaggatcataaagagtttgaaagctggttggaacgatccgagaaagagctggagaacatgcataagggaggcagcagccccgagacccttccctccctgctaaagcggcaaggaagcttctcagaggatgtcatttcccacaaaggagacttgagatttgtgactatctcaggacagaaagtcttggacatggaaaacagttttaaggaaggcaaagaaccatcagaaattggaaacttagtaaaggacaagttgaaggatgcaacagaaagatacactgctctccactcaaagtgtacacgattaggatctcacctgaatatgctgttaggccagtatcatcaattccaaaacagtgctgacagcctgcaggcctggatgcaggcttgtgaggccaacgtggagaagctcctctcagatactgctgcctctgaccctggagttctccaggagcagcttgcaacaacaaagcagttgcaggaggaattggctgagcaccaagtacctgtggaaaaactccaaaaagtagctcgtgacataatggaaattgaaggggagccagccccagaccacaggcatgttcaagaaactacagattccatactcagccacttccaaagcctctcctatagcctggctgagcgatcttctctgctgcagaaagcaattgcccaatctcagagtgtccaggatagcctggagagcctgttgcagtctattggggaagttgaacaaaacctggaagggaagcaggtgtcatcactctcatcaggagtcatccaggaagccttagccacaaatatgaaattgaagcaggacattgctcggcaaaagagcagcttggaggccacccgtgagatggtgacccgattcatggagacagcagacagtactacagcagcagtgctgcagggcaaactggcagaggtgagccagcggttcgaacagctctgtctacagcagcaagaaaaggagagctccctaaagaagcttctaccccaggcagagatgtttgaacacctctctggtaagctgcagcagttcatggaaaacaaaagtcggatgctggcctctggaaatcagccagatcaagatattacacatttcttccaacagatccaggagctcaatttggaaatggaagaccaacaggagaacctagatactcttgagcacctggtcactgaactgagctcttgtggctttgcgctggacttgtgccagcatcaggacagggtacagaatctaagaaaagacttcacagagctacagaagacagttaaagagagagagaaagatgcatcatcttgccaggaacagttggatgaattccggaagctggtcaggaccttccagaaatggttgaaagaaactgaagggagtattccacctacggaaacttctatgagtgctaaagagttagaaaagcagattgaacacctgaagagtctactagatgactgggcaagtaagggaactctggtggaagaaatcaattacaaaggtacttctttagaaaatctcatcatggaaatcacagcacctgattcccaaggcaagacaggttccatactgccctctgtaggaagctctgtaggcagtgtaaacggataccacacctgcaaagatctgacggagatccagtgtgacatgtcagatgtaaacttgaagtatgagaaactagggggagtacttcatgaacgccaggaaagccttcaggctatcctcaacagaatggaggaggttcacaaggaggcaaactctgtgctgcagtggctggaatcaaaagaggaagtcctgaaatccatggatgccatgtcatctccaaccaagacagaaacagtgaaagcccaagctgaatctaacaaggccttcctggctgagttggaacagaattctccaaaaattcaaaaagtaaaggaagccctggctggattactggtgacatatcccaactcacaggaagcagaaaattggaagaaaattcaggaagaactcaattcccgatgggaaagggccactgaggttactgtggctcggcaaaggcagctagaggaatctgcaagtcatctggcctgcttccaggctgcagaatcccagctccagccgtggctgatggagaaagaactgatgatgggagtgctggggcccctgtctattgaccccaacatgttgaatgcacaaaagcaacaggtccagtttatgctaaaggaatttgaagcacgcaggcaacagcatgagcaactgaatgaggcagctcagggcatcctaacaggccctggagatgtctctctgtccaccagccaagtacagaaagaactccagagcatcaatcagaaatgggttgagctgactgacaaactcaactcccgttccagccaaattgaccaagctattgttaagagcacccagtaccaggaactgctccaggacttatcagagaaggtgagggcagttggacaacggctgagtgtccagtcagctatcagcacccaaccagaggctgtaaagcagcaattggaagagaccagtgaaattcgatctgacttggagcagttagaccacgaggttaaggaggctcagacactgtgcgatgaactctcagtgctcattggtgagcagtacctcaaggatgaactgaagaagcgtttggagacagttgccctgcctctccaaggtttagaagaccttgcagccgatcgcattaacagactccaggcagctcttgccagcacccagcagttccagcaaatgtttgatgagttgaggacctggttggatgataaacaaagccagcaagcaaaaaactgcccaatttctgcaaaattggagcggctacagtctcagctacaggagaatgaagagtttcagaaaagtcttaatcaacacagtggctcctatgaggtgattgtggctgaaggggaatctctacttctttctgtacctcctggagaagagaaaaggactctacaaaaccagttggttgagctcaaaaaccattgggaagagcttagtaaaaaaactgcagacagacaatccaggctcaaggattgtatgcagaaagctcagaaatatcagtggcatgtggaagaccttgtgccatggatagaagattgtaaagctaagatgtctgagttgcgagtcactctggatccagtgcagctagagtccagtctcctaagatcaaaggctatgctgaatgaggtggagaagcgccgctccctgctggaaatattgaatagtgctgctgacattctgatcaattcttcagaagcagatgaggatggaatccgggatgagaaggctgggatcaaccagaacatggatgctgttacagaagagctgcaggccaaaacagggtcactcgaagaaatgactcagaggctcagggagttccaggaaagctttaagaatattgaaaagaaggttgaaggagccaaacaccaacttgagatctttgatgctctgggttctcaagcctgtagcaacaagaacctggagaagctaagagctcaacaggaagtgctgcaggccctagagcctcaggtagactatctgaggaactttactcagggtctggtagaagatgccccagatggatctgatgcttctcaacttctccaccaagctgaggtcgcccagcaagagttcctcgaagttaagcaaagagtgaacagtggttgtgtgatgatggaaaacaagctggaggggattggccagtttcactgccgggtccgagagatgttctctcaattggcagacctggatgatgagctagatggcatgggtgctattggcagagacactgatagcctccagtcccaaatcgaggatgtccggctattccttaacaaaattcacgtcctcaaattagacatagaggcctctgaagcagagtgtcgacatatgctagaagaagaggggactctggatttgttaggtctcaaaagggagctagaagccctgaacaaacagtgtggcaaactgacagagagggggaaagctcgtcaggaacagctggaactgacactaggccgtgtagaggacttctacaggaaattgaaaggactcaatgacgcgaccacagcagcagaggaggcagaggccctccagtgggtagtggggaccgaagtggaaatcatcaaccaacaattagcagattttaaaatgtttcagaaagaacaagtggatcctcttcagatgaaattgcagcaggtgaatggacttggccagggattaattcagagtgcaggaaaagactgtgatgtacagggtttagaacatgacatggaagagatcaatgctcgatggaatacattgaataaaaaggtcgcacaaagaattgcacagctacaggaagctttgttgcattgtgggaagtttcaagatgccttggagccattgctcagctggttggcagataccgaggagctcatagccaatcagaaacctccatctgctgagtataaagtggtgaaagcacagatccaagaacagaagttgctccagcggctcctagatgatcgaaaggccacagtagacatgcttcaagcagaaggaggcagaatagcccagtcagcagagctggctgatagagagaaaatcactggacagctggagagtcttgaaagtagatggactgaactactcagtaaggcagcagccaggcaaaaacagctggaagacatcctggttctggccaaacagttccatgagacagctgagcctatttctgacttcttatctgtcacagagaaaaagcttgctaactcagaacctgttggcactcagactgccaaaatacagcagcagatcattcggcacaaggctctggaagaagacatagaaaaccatgcaacagatgtgcaccaggcagtcaaaattgggcagtccctctcctccctgacatctcctgcagaacagggtgtgctgtcagaaaagatagactcattgcaggcccgatacagtgaaattcaagaccgctgttgtcggaaggcagccctacttgaccaagctctgtctaatgctaggctgtttggggaggatgaggtggaggtgctcaactggctggctgaggttgaggacaagctcagttcagtgttcgtaaaggatttcaaacaggatgtcctgcacaggcagcatgctgaccacctggctttaaatgaagaaattgttaatagaaagaagaatgtagatcaagctattaaaaatggtcaggctcttctaaaacaaaccacaggtgaggaggtgttacttatccaggaaaaactagatggtataaagactcgttacgcagacatcacagttactagctccaaggccctcagaactttagagcaagcccggcagctggccaccaagttccagtctacttatgaggaactgaccgggtggctgagggaggtggaggaggagctggcaaccagtggaggacagtctcccacaggggaacagataccccagtttcagcagagacagaaggaattaaagaaggaggtcatggagcacaggctggtgttggacacagtgaatgaggtgagccgtgctctcttagagctggtgccctggagagccagagaagggctggataaacttgtgtccgatgctaacgagcagtacaaactagtcagtgacactattggacaaagggtggatgaaattgatgctgctattcagagatcacaacagtatgagcaagctgccgatgcagaactagcttgggttgctgaaacaaaacggaaactgatggctctgggtccaattcgcctggaacaggaccagaccacagctcagcttcaggtacagaaggctttctccattgacattattcgacacaaagattcaatggatgaactcttcagtcaccgtagtgaaatctttggcacatgtggggaggagcaaaaaactgtattacaggaaaagacagagtctctaatacagcaatatgaagccattagcctactcaattcagagcgttatgcccgcctagagcgggcccaggtcttagtaaaccagttttgggaaacttatgaagagctcagcccctggattgaggaaactcgggcactaatagcacagttaccctctccagccattgatcatgagcagctcaggcagcaacaagaggaaatgaggcaattaagggaatctattgctgaacacaaacctcatattgacaaactactaaagataggcccacaactaaaggaattaaaccctgaggaaggggaaatggtggaagaaaaataccagaaagcagaaaacatgtatgcccaaataaaggaggaggtgcgccagcgagccctggctctggatgaagccgtgtcccagtccacacagattacagagtttcatgataaaattgagcctatgttggagacactggagaatctttcctctcgcctgcgtatgccaccactgatccctgctgaagtagacaagatcagagagtgcatcagtgacaataagagtgccaccgtggagctagaaaaactgcagccatcctttgaggccttgaagcgccgtggagaggagcttattggacgatctcagggagcagacaaggatctggctgcaaaagaaatccaggataaattggatcaaatggtattcttctgggaggacatcaaagctcgggctgaagaacgagaaatcaaatttcttgatgtccttgaattagcagagaagttctggtatgacatggcagctctcctgaccaccatcaaagacacccaggatattgtccatgacttggaaagcccaggcattgatccttccatcatcaaacaacaggttgaagctgctgagactattaaggaagagacagatggtctgcatgaagagctggagtttattcggatccttggagcagatttgatttttgcctgtggagaaactgagaagcctgaagtgaggaagagcattgatgagatgaataatgcttgggagaacttaaacaaaacatggaaagagaggctagaaaaacttgaggatgctatgcaagctgctgtgcagtatcaggacactcttcaggctatgtttgactggctagataacactgtgattaaactctgcaccatgccccctgttggcactgacctcaatactgttaaagatcagttaaatgaaatgaaggagttcaaagtagaagtttaccaacagcaaattgagatggagaagcttaatcaccagggtgaactgatgttaaagaaagctactgatgagacggacagagacattatacgagaaccactgacagaactcaaacacctctgggagaacctgggtgagaaaattgcccaccgacagcacaaactagaaggggctctgttggcccttggtcagttccagcatgccttagaggaactaatgagttggctgactcataccgaagagttgttagatgctcagagaccaataagtggagacccaaaagtcattgaagttgagctcgcaaagcaccatgtcctaaaaaatgatgttttggctcatcaagccacagtggaaacagtcaacaaagctggcaatgagcttcttgaatccagtgctggagatgatgccagcagcttaaggagccgtttggaagccatgaaccaatgctgggagtcagtgttacagaaaacagaggagagggagcagcagcttcagtcaactctgcagcaggcccagggcttccacagtgaaattgaagatttcctcttggaacttactagaatggagagccagctttctgcatctaagcccacaggaggacttcctgaaactgctagggaacagcttgatacacatatggaactctattcccagctgaaagccaaggaagagacttataatcaactacttgacaagggcagactcatgcttctaagccgtgacgactctgggtctggctccaagacagaacagagtgtagcacttttggagcagaagtggcatgtggtcagcagtaagatggaagaaagaaagtcaaagctggaagaggccctcaacttggcaacagaattccagaattccctacaagaatttatcaactggctcactctagcagagcagagtttaaacatcgcttctccaccaagcctgattctaaatactgtcctttcccagatagaagagcacaaggtttttgctaatgaagtaaatgctcatcgagaccagatcattgagctggatcaaactgggaatcaattaaagttccttagccaaaagcaggatgttgttctgatcaagaatttgttggtgagcgtgcagtctcgatgggagaaggttgtccagcgatctattgaaagagggcgatcactagatgatgccaggaagcgggcaaaacaattccatgaagcttggaaaaaactgattgactggctagaagatgcagagagtcacctggactcagaactagagatatccaatgacccagacaaaattaaacttcagctttctaagcataaggagtttcagaagactcttggtggcaagcagcctgtgtatgataccacaattagaactggcagagcactgaaagaaaagactttgcttcccgaagatagtcagaaacttgacaatttcctaggagaagtcagagacaaatgggatactgtttgtggcaagtctgtggagcggcagcacaagttggaggaagccctgctcttttcgggtcagttcatggatgctttgcaggcattggttgactggttatacaaggtggagccacagctggctgaggaccagcccgtgcacggggaccttgacctcgtcatgaacctcatggatgcacacaaggttttccagaaggaactgggaaagcgaacaggaaccgttcaggtcctgaagcggtcaggccgagagctgattgagaatagtcgagatgacaccacttgggtaaaaggacagctccaggaactgagcactcgctgggacactgtctgtaaactctctgtttccaaacaaagccggcttgagcaggccttaaaacaagcggaagtgtttcgagacacagtccacatgctgttggagtggctttctgaagcagagcaaacgcttcgctttcggggagcacttcctgatgacacagaggccctgcagtctctcattgacacccataaggaattcatgaagaaagtagaagaaaagcgagtggacgttaactcagcagtagccatgggagaagtcatcctggctgtctgccaccccgattgcatcacaaccatcaaacactggatcaccatcatccgagctcgcttcgaggaggtcctgacatgggctaagcagcaccagcagcgtcttgaaacggccttgtcagaactggtggctaatgctgagctcctggaagaacttctggcatggatccagtgggctgagaccaccctcattcagcgggatcaggagccaatcccgcagaacattgaccgagttaaagcccttatcgctgagcatcagacatttatggaggagatgactcgcaaacagcctgacgtggaccgggtcaccaagacatacaaaaggaaaaacatagagcctactcacgcgcctttcatagagaaatcccgcagcggaggcaggaaatccctaagtcagccaacccctcctcccatgccaatcctttcacagtctgaagcaaaaaacccacggatcaaccagctttctgcccgctggcagcaggtgtggctgttagcactggagcggcaaaggaaactgaatgatgccttggatcggctggaggagttgaaagaatttgccaactttgactttgatgtctggaggaaaaagtatatgcgttggatgaatcacaaaaagtctcgagtgatggatttcttccggcgcattgataaggaccaggatgggaagataacacgtcaggagtttatcgatggcattttagcatccaagttccccaccaccaagttagagatgactgctgtggctgacattttcgaccgagatggggatggttacattgattattatgaatttgtggctgctcttcatcccaacaaggatgcgtatcgaccaacaaccgatgcagataaaatcgaagatgaggttacaagacaagtggctcagtgcaaatgtgcaaaaaggtttcaggtggagcagatcggagagaataaataccggtttggggattctcagcagttgcggctggtccgtattctgcgcagcaccgtgatggttcgcgttggtggaggatggatggccttggatgaatttttagtgaaaaatgatccctgccgagcacgaggtagaactaacattgaacttagagagaaattcatcctaccagagggagcatcccagggaatgacccccttccgctcacggggtcgaaggtccaaaccatcttcccgggcagcttcccctactcgttccagctccagtgctagtcagagtaaccacagctgtacatccatgccatcttctccagccaccccagccagtggaaccaaggttatcccatcatcaggtagcaagttgaaacgaccaacaccaacttttcattctagtcggacatcccttgctggtgataccagcaatagttcttccccggcctccacaggtgccaaaactaatcgggcagaccctaaaaagtctgccagtcgccctgggagtcgggctgggagtcgagccgggagtcgagccagcagccggcgaggaagtgacgcttctgactttgacctcttagagacgcagtctgcttgttccgacacttcagaaagcagcgctgcagggggccaaggcaactccaggagagggctaaacaaaccttccaaaatcccaaccatgtctaagaagaccaccactgcctcccccaggactccaggtcccaagcgataacactgtctaagcacccccaagccactatccactttgaatcctgctccatacattgggtgtatatttattctgaacgggagaagttatattgttaaaagtgtaaaagaataattgtgttatgaagctgccttattttttttctttttgtaagttactattttcatgtgaatatttatgtagataaaatttgcctcctggtaaccctgtaatggatggggcccagaaatgaaatatttgagaaaaacaagtgaaaaggtcaagatacaaatgtgtattaaaaaaaaaaaagcctattaatagggtttctgcgcggtgcagggttgtaaacctgctttatcttttaggattattcctaaatgcatcttctttataaacttgacttgctatctcagcaagataaattatattaaaaaaataagaatcctgcagtgtttaaggaactctttttttgtaaatcacggacacctcaattagcaagaactgaggggagggctttttccattgtttaatgttttgtgatttttagctaaagagagggaacctcatctaagtaacatttgcacatgatacagcaaaaggagttcattgcaatactgtctttggatattgtttcagtactgggtgtttaaaggacaaatagctgctagaattcaggggtaaatgtaagtgttcagaaaacgtcagaacatttggggttttaaactgatttgttgctccctatccagcctagacaccagtaactcttgtgttcaccaggacccagacccttggcaagggataggctcgttggtgacattgtgaatttcagatttgttttatccactttttttgctatttatttaaatggtcgatcaacttcccacaaactgaggaatgaattccacgagcctgttctgaaaatgtggacgtaagacaaacacgtgctcgtcctttaatggagttcaccagcacacttgttaaccagtcctgtttgctttcgtctttttttgtgcgtaataaagtcaactgaccaagtgaccatgaaaaggggctgtctggggctcctgttttttagctgctgttcttcagctccgaccatgttgctgtgtgattatctcaattggttttaattgaggcagaaactgaagctctaccaatgaactgtttagaaacaagacacacttttgtattaaaa

SEQ ID NO: 22431 - DNA, 2538 bp, Homo Sapiens
agattccagcgggatggcctgaccagcggggccggcactttggagccgtgggtgcagccaggtaccccgtgcagggcctgggaggctctccaggccacagtcctcagagcgtgttgggtcccatgttgtgtgtgggttccatgccctccacacagcaggagagggcttccctgaccacacctgccccctcagtcctgcttctccccagtaagcctgcactgtggggtctccataggaggagctggggaagctggggccctcccaggggtcctgatcgaccctgggggctcttggcctggtttcgtaagatggagcactgcaaaaggccatgctcagaaagcaaacgcagggcagggtgggcctcgagccggggctggaggggtctccacccttgctggcctgagagatggcccacatttcttacttgtgaccgccctgctcttcctggccgcccccccaggtggctgaacagggtgattttgttgtggtgaggggccaggatgtggcctggtgtgcaacctcagctccctgggttcaggcctcagaggtagcctgtgtgcaggaggcagagccccagcccctcccagccagagcccctccacaccagggactcctccttcacctgggaccaggagcctggggcacaccccagggtgggggagagggtaggaaggtctcccattgaatcctggcttcaggctctgccccgagaagtgtctgcggtgagggtgtgagccccgggctgatggcctctgaccccggcaacaggtgggaccctgactgactcgttcagctgcccccaagctgggctgcagagcatctgtttttctgctctccagtttcttttcttttttttttttttttttgagatggagtcttgctctgttgcccaggctggagtgcagtggcatgatctcagctcactgcagcctccgtctcccaggttcaagcagttctcctgcctcagcctcccgagtagctgggattacaggcgtgtgccaccacacctggctattttttttgtatttttagtagagatggggttttgccatgttggccaggctggtcttgaactcctgacctcaagtgatccacccgcctcggcctcccaaagtgctgggattacaggcgtgagtcaccgcgtcctgcctgctcttcctgtttctttcccaagggtcacactcagtagggagatgaaggtggaaacatccttgctgtggctttctggcctcagagcaggttttagaggaaggggccacaggctgcctagtgcatcctggctgtgggcagcccctttcctggagccctcctgcctaccccgtacctcccatctggctgcacagctccatccttagccacgcaaggggagaacatgggcagagtctccatccagcagctgggggttctggtggcactccctgtgcccctgctgctgctgggctgtgggtctgccctgcacccaggagccccacggtccatcccccacaccatgcccagcaccagggaggttgggcagacaagacctgggccatgccagccctctgtgcctcggttttcccactggttacacaggatggtcgcattttccctgcctacctcacagagctgttctgagggtgcatggaggagcactctgtcccgccaaggacaactagaaaccaaagccatctgacagccagtgcggtaagggcgggggatgtgtgtgtgaggtgtgcacaccccccgagaacctggccctggactggcctcacaggacaggagcagccccttgtagagctagggctcagccccatcagtctcaaaggttaagccaccagtcaccaccgaggcacccctcaggcctggtggccactgtccactattacgtagacagaccccaccctcacccaggccagctgtgggccagtcccgccctgcaatctggtctgctgccttcctcttccatgttggtccccttggccactgtctctgggcatgcaagccagtgtcctggttcagtgcctcggccagagctggggcaggagaggggcctctgggtgagagctgggggtgtctctgcagggtactggcagccttgccacactgtcctcattcccagatggaaagacctgagtgcctctcgccttcctccgggaatgaattcctcatgaaaatgaccaggccattttccgagggccaggccgcccctccccgagacctgtcctccgtccgcgggtgttgcctgtaggggatgagagctgggcttgtgggcaccttggaatctgaccctgtgggccaaagaagcccactgtagtttctgcagacccccatgcggttcattgtgcattgtttggtttctaggatgtatgtgttgctagttttttttaatgaaaccctggattaatgtaaatagctttttggggaacggattctaatgtcacgtatgtgaccgtgtggactatttcaaggtgctgatgcaacactaataaacctggaggggccggcaaaaaaaaaaaaaaaaaaaaaaaaaaaaaaaaaaaaaaaaaaaaaaaaaaaaaa

SEQ ID NO: 22432 - DNA, 3252 bp, Homo Sapiens
aggatgatgaaagtgagaccgtcttagggcccttccagatagtgaaccttctctgccccaatgccccacccctgccaccaatacacacgcttctgctgcctggggctctcctattggtcctcggggggatgtggtaagaactgctcacccagaaagtgcccgggtgcctgtttccccagacctccctggtgacagtctgtggctgagcatggccctcccagccctgggcctggacccctggagcctcctgggccttttcctcttccaactgcttcagctgctgctgccgacgacgaccgcggggggaggcgggcaggggcccatgcccagggtcagatactatgcaggggatgaacgtagggcacttagcttcttccaccagaagggcctccaggattttgacactctgctcctgagtggtgatggaaatactctctacgtgggggctcgagaagccattctggccttggatatccaggatccaggggtccccaggctaaagaacatgataccgtggccagccagtgacagaaaaaagagtgaatgtgcctttaagaagaagagcaatgagacacagtgtttcaacttcatccgtgtcctggtttcttacaatgtcacccatctctacacctgcggcaccttcgccttcagccctgcttgtaccttcattgaacttcaagattcctacctgttgcccatctcggaggacaaggtcatggagggaaaaggccaaagcccctttgaccccgctcacaagcatacggctgtcttggtggatgggatgctctattctggtactatgaacaacttcctgggcagtgagcccatcctgatgcgcacactgggatcccagcctgtcctcaagaccgacaacttcctccgctggctgcatcatgacgcctcctttgtggcagccatcccttcgacccaggtcgtctacttcttcttcgaggagacagccagcgagtttgacttctttgagaggctccacacatcgcgggtggctagagtctgcaagaatgacgtgggcggcgaaaagctgctgcagaagaagtggaccaccttcctgaaggcccagctgctctctgcacccagccggggcagctgcccttcaacgtcatccgccacgcggtcctgctccccgccgattctcccacagctccccacatctacgcagtcttcacctcccagtgggcaggttggcgggaccaggagctctgcggtttgtgccttctctctcttggacattgaacgtgtctttaaggggaaattcaaagagttgaacaaagaaacttcacgctggactacttataggggccctgagaccaacccccggccaggcagttgctcagtgggcccctcctctgataaggccctgaccttcatgaaggaccatttcctgatggatgagcaagtggtggggacgcccctgctggtgaaatctggcgtggagtatacacggcttgcagtggagacagcccagggccttgatgggcacagccatcttgtcatgtacctgggaaccaccacagggtcgctccacaaggctgtggtaagtggggacagcagtgctcatctggtggaagagattcagctgttccctgaccctgaacctgttcgcaacctgcagctggcccccacccagggtgcagtgtttgtaggcttctcaggaggtgtctggagggtgccccgagccaactgtagtgtctatgagagctgtgtggactgtgtccttgcccgggacccccactgtgcctgggaccctgagtcccgaacctgttgcctcctgtctgcccccaacctgaactcctggaagcaggacatggagcgggggaacccagagtgggcatgtgccagtggccccatgagcaggagccttcggcctcagagccgcccgcaaatcattaaagaagtcctggctgtccccaactccatcctggagctcccctgcccccacctgtcagccttggcctcttattattggagtcatggcccagcagcagtcccagaagcctcttccactgtctacaatggctccctcttgctgatagtgcaggatggagttgggggtctctaccagtgctgggcaactgagaatggcttttcataccctgtgatctcctactgggtggacagccaggaccagaccctggccctggatcctgaactggcaggcatcccccgggagcatgtgaaggtcccgttgaccagggtcagtggtggggccgccctggctgcccagcagtcctactggccccactttgtcactgtcactgtcctctttgccttagtgctttcaggagccctcatcatcctcgtggcctccccattgagagcactccgggctcggggcaaggttcagggctgtgagaccctgcgccctggggagaaggccccgttaagcagagagcaacacctccagtctcccaaggaatgcaggacctctgccagtgatgtggacgctgacaacaactgcctaggcactgaggtagcttaaactctaggcacaggccggggctgcggtgcaggcacctggccatgctggctgggcggcccaagcacagccctgactaggatgacagcagcacaaaagaccacctttctcccctgagaggagcttctgctactctgcatcactgatgacactcagcagggtgatgcacagcagtctgcctcccctatgggactcccttctaccaagcacatgagctctctaacagggtgggggctacccccagacctgctcctacactgatattgaagaacctggagaggatccttcagttctggccattccagggaccctccagaaacacagtgtttcaagagaccctaaaaaacctgcctgtcccaggaccctatggtaatgaacaccaaacatctaaacaatcatatgctaacatgccactcctggaaactccactctgaagctgccgctttggacaccaacactcccttctcccagggtcatgcagggatctgctccctcctgcttcccttaccagtcgtgcaccgctgactcccaggaagtctttcctgaagtctgaccacctttcttcttgcttcagttggggcagactctgatcccttctgccctggcagaatggcaggggtaatctgagccttcttcactcctttaccctagctgaccccttcacctctccccctcccttttcctttgttttgggattcagaaaactgcttgtcagagactgtttattttttattaaaaatataaggcttatgtatgat

SEQ ID NO: 22433 - DNA, 2967 bp, Homo Sapiens
ggcacgaggaggtaggctgcatccgcccctctgtctgtctgtcaacatcgccctaggaccgagctgctgggtgccccggaagaagggcaggcaggaaggggaggggcagtgaggttggctccccccaccacctcaccctggtgcccccagcccagcccaagacaccagggcatttgctgacatctgaggcccttcccaggaagacatggcctcgttcttggtgtggccactgaggacggcgctgagagggggaaagtcatgggcaggacctggtgtgggatgtggaggagacggcgcccggggaggaggagcgctgtgcccaggtggcctcacttgtcatctcaaagtggcgtcgaaccccctgacaggtggacgggaacccccggctggccctccagagaccaggaggcccctggctcaatgatgccacctgcagctgcccaaccctccgcccatggtgcccttgttccacctgccaccgctcatgaacctgtggatcacccagctctgcactggcttgcctgctgctgctgtctcagtttacctgggcagttgcccctggctatccggctgggatgggacttggacttagaagcaggcccctcctctggaaagctgtgtcctcgggccaggaggtggcagcctctaccttcctgagacagggacccttttctgtccatcagaggacagctgtatgaagacacagagagaaggcagccatctgtaagccaggaagagagccctcaccaagactggaatcagcagcaccttgatattggacttccagcctccagaactgcaagaaataagcacctgctgtttacatgcccagcctgcagtgcttccttatggcagattggagctaactgagacagctcccagcactcattcattcattcattcattcactcacctcatgtctactaaacagctctgggctggctctgggaagcagtgagtcacacacactgcccccagcaacgtgtgaaatatgtttagagacagtgggctacagcggaaagggtagatgccctgagaaccccagcggtgctggtcagaagcacaggccttgttgggctgaggctggcatggggtgaacctggggagcctcgggggcagaggtgatagatgtggggtgtttcaaggcagtgagacaaagaagggagatgggtggtgccccccaatgccaggcttcaccagcctcccaacacacgagtgttcacccgcctggatgagacacctctgtggacttgggagtgaaggcagtgaatttgggcaatgctggaggccgtgcaggtgggaggtgggacaggggcaagaggccggggcccaggcaggagctgacagcccaccagtggtgctcccctgagaagcaacctcagtgggtggcttggggtctgctgggctgtccccacactgacaccctggctgcagggcccccctgtgtccccagtgaggggtctcgggagctgtgtgtcctactcagggccatccctgcagcccatgctctctgggtgaccagttgccagcagtgtcccccctgccttgggcggaggctgaggaccccagggtgggagggaaggtgcggtgggggctcagccaatgctgcccagcctgagggtccctcacatgtgggccgcacccctgcgtcagccggagtgatctctgcttagggtggtttgaggtgagttctgatatctcaaacaccagcatcagggccagggcagacaaaataagagtgagctggtcaggggtgtcccagttgggagctcgctcacagtctttaaggaggcagggcacagcccagtgggggtggccacgaggccccggcctgtggctgagatggcaactggcaccggcagtgattggaacagtccagcccatggagccctgtggccttggccggtggctcacggtgccacgggagctggagcaatgggtggcctcccttgcctggtgcctgagtgaaggaggactgggttgcccttgaggaaggaccttgccatactcctacaaacttacattattcttctttccccagtctcccctcagggacctgcagccatttgctggggtggctagtggaaagggggatcatcagactcagggggattactggactctaactctaacctgacacccactcctggggacacaaacacccatcggatctaatagtcagaggaggggcgtatggaggtcagtgggctcacggagttctagctcaggtccaaccctcggtgggtgcagaggtcacttccctagcctcagatgggtgagtaaacagacgtatgtggcagccagcagagcccccacatttgttccctgacctgagggtgggggctactatgctgggaaaggccaggtggaagccattggggtgaactctgcctaggaaaattgtcagtcaaaagcaacctgcagccctggagggactgcaaaggtcagtgccgccatcgaggacttggaagatgcagggtggtgacccccactgcagcctcgttccactcgtctaattggcttgtgtggaagacaggggggtcccggagaaagaaggacagtgaatcctggtaaacttaaccaggactccaattgcaactgctgttccagatatgactactgatcactggggcaaatcaaagcatccccggacacctggtctacagccattgatctggcgaaagctttaatttttaataaagattttattttttagagcagtttcatgtttacagagaaattgagcatatttgagagtcctcatatagcatctctccctacacacagtttcccttattattcatatcttgaattactgtgatacatctttgcaattgatgaaccaatattgacctagtcattgatcaggttacatgagggttcactcttcttgttgtacatgctgtgagttcgggcaaatgtgtaatggcatatctccactattacagtgtcacacagaattatttt

SEQ ID NO: 22434 - DNA, 4405 bp, Homo Sapiens
ctgggaataggggaaatcagtgaatgaagcctcctatgatggcaaatacagctcctattgataggacatagtggaagtgagctacaacgtagtacgtgtcgtgtagtacgatgtctagtgatgagtttgctaatacaatgccagtcaggccacctacggtgaaaagaaagatgaatcctagggctcagagcactgtggtttcctgcattggtggtttgtcctgattgtagtgatgagattgctgtaaaaaaggacaatattcttgttcgatctttcaaagatggaaaatttacttcagttccaagaaaagatgtccatgaaattactagtgacactgcaccaaagcctgatgctgttttaaagcaagcctttgaacaggcacttgaatttcacaaaagtagaactattcctgctaactggaagactgaattgaaagaagatagctctagcagtgaagcagaggaagaagaggaggaggaagatgatgaaaaagaaaaggaggataatagcagtgaagaagaagaagaaatagaaccatttccagaagaaagggagaactttcttcagcaattgtacaaatttatggaagatagaggtacacctattaacaaacgacctgtacttggatatcgaaatttgaatctctttaagttattcagacttgtacacaaacttggaggatttgataatattgaaagtggagctgtttggaaacaagtctaccaagatcttggaatccctgtcttaaattcagctgcaggatacaatgttaaatgtgcttataaaaaatacttatatggttttgaggagtactgtagatcacccaacattgaatttcagatggcattgccagagaaagttgttaacaagcaatgtaaggagtgtgaaaatgtaaaagaaataaaagttaaggaggaaaatgaaacagagatccaagaaataaagatggaggaggagaggaatataatcccaagagaagaaaagcctattgaggatgaaattgaaagaaaagaaaatattaagccctctctgggaagtaaaaagaatttattagaatctatacctacacattctgatcaggaaaaagaagttaacattaaaaaaccagaagacaatgaaaatctggatgacaaagatgatgacacaactagggtagatgaatccctcaacataaaggtagaagctgaggaagaaaaacccaaatctggagatgaaacgaataaagaagaagatgaagatgatgaagaagcagaagaggaggaggaggaggaagaagaagaagaggatgaagatgatgatgccaccattgaggaagaggagtttgagtcctatccaccaggcatgaaagcccaagtgcggtatggacgagggaaacaccaaaaaatgtatgaagctagtattaaagattctgatgtcgaaggtggagaggtcctttacttggtgcattactgcggatggaatgtgagatacgatgaatggattaaagcagataaaatagtaagacctgctgataaaaatgtgccaaagataaaacatcggaagaaaataaagaataaattagacaaagaaaaagacaaagatgaaaaatactctccaaaaaactgtaaacttcggcgcttgtccaaaccaccatttcagacaaatccatctcctgaaatggtatccaaactggatctcactgatgccaaaaactctgatactgctcatattaagtccatagaaattacttcgatccttaatggacttcaagcttctgaaagttctgctgaagacagtgagcaggaagatgagagaggtgctcaagacatggataataatggcaaagaggaatctaagattgatcatttgaccaacaacagaaatgatcttatttcaaaggaggaacagaacagttcatctttgctagaagaaaacaaagttcatgcagatttggtaatatccaaaccagtgtcaaaatctccagaaagattaaggaaagatatagaagtattatccgaagatactgattatgaagaagatgaagtcacaaaaaagagaaaggatgtcaagaaggacacaacagataaatcttcaaaaccacaaataaaacgtggtaaaagaaggtattgcaatacagaagagtgtctaaaaactggatcacctggcaaaaaggaagagaaggccaagaacaaagaatcactttgcatggaaaacagtagcaacagctcttcagatgaagatgaagaagaaacaaaagcaaagatgacaccaactaagaaatacaatggtttggaggaaaaaagaaaatctctacggacaactggtttctattcaggattttcagaagtggcagaaaaaaggattaaacttttaaataactctgatgaaagacttcaaaacagcagggccaaagatcgaaaagatgtctggtcaagtattcagggacagtggcctaaaaaaacgctgaaagagcttttttcagactctgatactgaggctgcagcttccccaccgcatcctgccccagaggagggggtggcagaggagtcactgcagactgtggctgaagaggagagttgttcacccagtgtagaactagaaaaaccacctccagtcaatgtcgatagtaaacccattgaagaaaaaacagtagaggtcaatgacagaaaagcagaatttccaagtagtggcagtaattcagtgctaaatacccctcctactacacctgaatcgccttcatcagtcactgtaacagaaggcagccggcagcagtcttctgtaacagtatcagaaccactggctccaaaccaagaagaggttcgaagtatcaagagtgaaactgatagcacaattgaggtggatagtgttgctggggagctccaagacctccagtctgaagggaatagctcgccagcaggttttgatgccagtgtgagctcaagcagtagtaatcagccagaaccagaacatcctgaaaaaggtgagaaggaaaatgtgtatgttgacttattttagggtttcccctcttaaagtttcaatgatttcacagtatctcttgttataacctgaggcgattaagtgtcatatttgtgtgaacatggtaaaaatggaaattttaaaggtaatttgaaaatgaatagtggaatgcatttaaaagcttgagaaggctttaatgtgctttgcttgagccatccatggcattttattgtggaccagaacacatgctagaaattgcacccaggcccaaatccaaacctgtttgagaattcattatatgcagtggttgactatatggcatgagcagcttaaatctatttctgtaacattgtttttgcaattgtaatgtgcagtttctcacgaacattttgatttattgacagacccccccacccttaaccaaatactgtatgtaggggtttggagcaaccaactgtccaggcactgctttcctcagacaaccgtgtcaaactcattttcaagcctgactaacttgtgtgagtttgtaaaggaatttgatgctttcttagatgcatagcttccaaattgaaggaccaatgtgtgcgttaataacctacagtaatacttttttgatttccgtgaaattgttaaaagtggaaattcaaatcggtaccttcccaaagtattagtgcctttcgatggtgccatagccatacttctgtcatcatttttcttataaaccacttcattcaggtatctttaaatcagtatactctaggctgacacctggctttggaacacacttttccatcgtaaagacagagcactggagtatgttttttatataccgtaaaagattttagaatgctagctttaggttttcagcaaagcttaaagagatatggtctagatcaaattagttaattctatgttttctcaggaatcttgacttaaaacatttctgttttaaaataaattaaaaaaatacttgcaattaaattgaaatgttctttgctttttttcacatttacaagtataactactatgattttatctgtgccatactatctcatgcaactgaactatccaggcatgactaatcttcaaaatgaaagaatcctttatttcagaatattaggccttcaacagtaagatttttactggccaggtgtggtcactcacacctgtgatcccagcaatttgggaagtctgggaggtcaaggcggtggatcgcttgagtccaggagttcaagaccagcctggacaacatggcaaaaccccatctctaccaaaaatacaaacgtcagccagctgtggtggcgcatgcctgtagtcccagctaccttgggggctgatgagggagaatcacttgatcccggaaaggctgcagtgagccaagatcacgccactgcactccagcctgggtgataaaacaagaccctgtctcaaaaaaaaaaaaaaaaaaaaa

SEQ ID NO: 22435 - DNA, 2075 bp, Homo Sapiens
aaaactgtggccctgaggtgggggtggggtgggggaggcgggaagttggcaacaggaagtgaggagaagagcaaagaaaactgtgagagagagaatttttaaaaaagcagctggggcctgaggtttctcccccagtaccctgggtcacctcagcccagagctggcggcaggcccccagcccctcatgtcagagccccctgtgtactgtaacctggtggaccttcgccgctgtcctcggtccccacccccaggccctgcatgccccctgctgcagaggctggatgcctgggagcagcacctggaccccaactctggacgctgcttctacataaattcactgactggctgcaagtcctggaagcccccgcgccgcagtcgcagcgagacgaaccctggctccatggaggggacacagaccctgaagaggaacaatgatgtcctgcaacctcaggcaaagggcttcagatctgacacagggaccccagaaccgcttgacccacagggttcactcagcctcagccaacgcacctcgcagcttgaccctccagccttgcaggcccctcgacctctgccgcagctcctggacgacccccatgaggtggaaaagtcgggtctgctcaacatgaccaagattgcccaaggggggcgcaagctcaggaagaactggggcccgtcttgggtggtgttaacgggtaacagcctggtgttctaccgagagccaccgccgacagcgccctcctcaggctggggaccagcgggtagccggcccgaaagtagcgtggacctgcgcggggcggccctggcgcacggccgccacctgtccagccgccgcaacgtcctgcacatccgcacgatccctggccacgagttcctgctgcagtcggaccacgagacagagctgcgagcctggcaccgcgcgctgcggactgtcatcgagcggctggatcgggagaaccccctggagctgcgtctgtcgggctctggacccgcggagctgagcgccggggaggacgaagaagaggagtcggagctggtgtccaagccgctgctgcgcctcagcagccgccggagctccattcgggggcccgaaggcaccgagcagaaccgcgtgcgcaacaaactaaagcggctcatcgcgaagagaccgcccttacaaagcctgcaggagcggggtctgctccgagaccaggtgttcggctgccagttggaatcactctgccagcgggaaggagacacggtgcccagctttttgcggctctgcattgctgctgtggataaaagaggtctagatgtggatggcatttatcgggtgagcgggaacttggcagtggtccagaagcttcgctttctggtggacagagagcgtgcggtcacctccgatgggaggtatgtgttcccagaacagccaggacaagaaggtcggttagatttggacagtactgagtgggatgacattcatgtggtcaccggagccctgaagctttttctccgggagctgccccagcctctggtgccaccactgctgctgccccatttccgtgctgcccttgcactctccgaatcagagcagtgcctctctcagatacaagaattaataggctcaatgccaaagcccaaccatgacactctacggtacctcctggagcatttatgcagggtgatagcacactcagataagaatcgcatgacaccccacaacctgggaattgtgtttggaccaaccctgtttcggccagagcaggagacatctgacccagcagcccatgctctctacccagggcagctggtccagctgatgctcaccaacttcaccagcctcttcccctgatgcagggaaggaagaagagaaaacatatttccggtcatctctggtggtgagaggctggtgttctgttttgaggatatccctttaaatctcccaaatgactgtctctatcttcatgagtgtgacttgaggtgttgggatgggtgagggagcttctctaaagaggaaagtgagtggattaacccctgcttctcttcttgttccctgttatcattcctccccaacataataatacataaagtggcatggt

SEQ ID NO: 22436 - DNA, 6245 bp, Homo Sapiens
tggcacgaggcgatgagttcctgctgctgttcaccatggcctccaaccacccggccttcagcttccaccagaagcaggtgctgcgccaggagctcacgcagatccagagcagcctgaacggcggcgggggccacggcggcaagggcgcgcccgggccgggcggcgcgctgcccacttgcccagcctgccacaagatcactccaagaactgaggcccctgtcagcagtgtcagtaatagtttggagaatgccctgcacacatcagcacattccacggaggagtcgctgcccaagaggcccttaggaaaacacagcaaagtgagtgttgaaaagatagacctgaagggattatcacacacaaaaaatgacagaaatgttgaatgttcctttgaggtcttgtggtctgattcttcaataacatcagtaaccaaatcttcctctgaagtgacggaatttatttcaaagctatgtcagctctatcctgaagagaacttggagaaactcattccttgcttagctggtccggacgcattttatgtggagcgaaaccacgtggatctggactcaggcctgaggtacctggcctcattaccttctcacgtgttgaaaaatgaccatgtcaggaggtttctcagcacttcctctcccccacagcagcttcagagtccaagtcctggcaatccctccctttctaaagtaggtaccgtgatgggcgtgtctggaaggcctgtgtgtggagtggctggtatcccgtcctcgcagagcggagcccagcaccacgggcagcacccggccggctccgccgcccccttgcctcactgctcccatgcgggcagcgcgggctcagccctggcctaccggacccagatggacacatcacctgccatcctcatgccttccagtctgcagacccctcagacccaggagcagaatgggattctagactggcttaggaaactgcgtttgcacaagtattaccccgtctttaagcagctctccatggagaagtttttgagccttactgaagaagatctgaataaatttgagtctcttaccatgggggcaaagaagaagctcaagacccagctggagctggaaaaggagaagtcagagagacggtgcctgaacccctcggccccgccgctggtcaccagcagtggtgtggctcgagtgccccccaccagccacgtcgggcccgtgcagtcggggcggggcagccatgcagcagagctgcgggtggaagtggagcagccccatcaccagctgccccgggaaggcagttcctcggagtactccagctcctcctccagccccatgggggtacaggcccgggaagagagctccgacagcgctgaggagaatgacagacgtgtggagattcacttggagagctctgacaaggagaagccggtgatgctgctgaatcacttcacttccagttccgccagacccacggcccaggttctccctgtgcagaatgaggccagctccaatccatcaggccaccaccccctgcccccgcagatgctgagcgcagcctcacacatcacacccatccgcatgctgaattccgtgcacaagccagaaagagggagcgcggacatgaagctcctctcgtcttctgtgcactcacttttgtctctagaagaaaggaataaaggatctggaccaagaagcagcatgaaagtggacaagagctttggcagcgccatgatggacgtgctgcccgcgtccgcaccccaccagcctgtgcaggtcctctctgggctttcggagagcagctccatgtcacccacagtctcctttggtccccggaccaaagtcgtgcatgcatccacgctggacagggtgctgaagacagcacagcaaccggccctggtcgtggagaccagcacggccgccacggggacgcccagcacagtcctccacgccgcccgtccgcccatcaaactgctgctgtcgtcatctgttcctgctgattctgccatttctgggcaaacttcctgtcctaataatgtgcaaataagtgtgccccctgcaataataaacccccggactgctctgtacacagccaacaccaaagttgccttttctgcaatgagcagtatgccagtgggccccctgcagggtggcttctgtgcaaacagcaacactgcctctcccagcagccacccctccacgtcctttgccaacatggccacgttgcccagctgcccagcccccagctccagcccggcgctgtcctccgtccctgaaagcagtttctatagcagcagtggcggtggcggctccacaggaaacattcctgcctcgaatccgaaccaccaccaccaccaccaccatcagcagcccccggcacccccgcagcccgccccacccccgccaggctgcattgtgtgcacgtcctgtggctgcagcggcagctgcggctcgagtggcctgactgtcagctacgccaactacttccagcacccgttctccggtccgtccgtgttcaccttccccttcttgcccttcagtcccatgtgcagcagcggctacgtcagcgcccagcagtacggcggcggctccaccttccccgtcgtgcacgccccttacagcagcagcgggaccccagaccctgtcctgagtgggcagtccacgtttgccgtgccacccatgcagaacttcatggcagggacagcaggggtgtaccagacccaaggactggtgggcagtagcaatggttccagtcacaaaaagagcgggaacctatcttgttacaactgcggggccactggtcaccgcgcccaggactgcaaacagccgtccatggacttcaaccggccaggtacttttaggttgaaatacgcccctccagcagaaagtctggactccacagattgatatttttctctggcaacagaacgttattaagccatggagacataaggaaaattaaatacaaaactgagaagtctagttgctgttgagcttaatctttttaatccaaaggtgctttacttttcctagactggatagaaaatctagcgtagaagtgcatcaaactcgatttattgccaaaaccctagattggagcttggtgtcagaactcgcctagtgggcatctctgtggctggtgagatcggccacctccacttttggttgcagtgcagagacgccatgtctcccgaagagcattgccatcactggccctcctaggctcacacgtcaattccagggcagctacacgtggtctgaatcgagaaccgagcttggagttctccaagtggagttccacccgccggactcctgacacccctgggctagggaaaatgtcgactttgttttgttctgttcctaaagtgattagcactaatctctgggatttttaaggattgcactacagaagaatgtaccctgatgtaaatctctgcggttctgggagccaaactcctctgagaacagtcagtgcaagagactccaataatccatattgaaagagtcagcaccagcagaggctactcgacttaggacgcaacagaggttttagtatttccttccctcctccaagcacttgtagcagtttcaggtttttaatttttttctgcaaataaatctaaactacgttattaaatagaaatagtttactcgcaacaacttaatttctaagggtccaagtcccagagaatccatagtcgtcaaagctttgagagtatctttcttcccagccagtcagtggctttgagccctatcttccactacaaatgacctctcgaggggggacggcgacagcgcggctctgtgagtggctgtgaggatgctgcacgtcctcagcagagtttgcaagttgctttatctcccacgggctccccaagaacctccaaccccgaggcttatcgctagcggattcacacctgagacagacatttcaacaatgatacagtcctgtcatttatcagcaaaagattgggaattttctcctgtcaacttcttttgtattaggctgtgtattgatagttaattccgttaaaaattacttggaaaacagtgggaagtggtaggactctggaagaggccacacacccgagagctgcgagatctgtgcaagtctggttttggttaggtagtaataaaagtcctcactgtagatctctaaatttcaacccacggaaatgaaagccttttgtctgaaatttacggacttaaatcttcaaggttaaagggaattttctgctcaaataatactcttatcgaaaatgctaaagtcttcaatgttaaaatactgattggtaaaatcttgcagttgggattttgcagttggatatttattttaaaaaaaattataatattcagactattcttaaaatgggacaatcagcctcatgaaaaattgatgtaaatcagaagaataccctagaatgaggccttgtgatgtgagcgttcaatttgaagagcagttcctaacttcatagaaactaaagcagaaagttgttacattttttttatgacaggcttttagtagaattttttagttttattttagttgaattttatttctatgcaatgcagaattaacagacctcttctcctcatggtacacagtattacagtgttgaagtaatggtgatgcttattacaacagctatttaggggaatgttacgttgatctcttaaattgtaaacactacaaaatgtcaaaataatgagaactgacacaactttgccttaaagagtactagactggaccttctcatattacgtttaaggaagacttagagtgttcattgatgtttacgattttaatatttctgaaggccattacagtggcctggatatgtgctgaaagccaaacttttaaattttttggtttttttaagcaaagaaatattttaaataaatcctatttcaacactgaaattgttgaaaaccgtctcataacaaaaggaaaaaacattggaatttttgttttagtggtcagtataggggaatgaaagcgtctgttgttacccacgtaactattttgataagtattagaggttaaccttaaatccagcaaaacattaaaacagaaacttttcaacttggagcctgccattcagcgttgaggtagatgagttccgacactgtcacggctgtgttcccagcagcgaaggcctctgcggagctgccagtcgtcttgaacgtgcatgggcggcgtgtgacatctccagggaggccgtccgaagtcgagaatcgtcagctgtaagtaggagctacacagcgcagagaaaatggaaccacccatccgtgaggcctctttccggagggagccgcacacttggacttgagagtttgccagcagcgagctcggatgcatctctccaaaagccaccaaggtcggcgcgtctgaagagcgttttgcggtcatcagacttcctcatctgaaaacacagaacatactgaccctttcaagtacttagtcattttcctgaaagtgtggtctgtttcagaatgctgtggcaaccagtgttttattttatgccttgctcgttgtacatcatgatgactgatggtcttcaaggttgtgaggaaagccgtctccctgcttgactcgactgctgtcccagaggagagtcctgtgcgacctgagcgggggtggctgccatttccagcatgcaggtgacttccaaagaatgagtcaggtggcactgaaagccatgggttctgaagaggcgaatttgttgaaaagtcccaagggtctgaatgaaagcatctttaatcaacactcaacactcgcaatattctagaaaaccatatactgtgctggttgaggccaaaggttaacattgctccactgttcaccaaggaagggggcagtggccatccgccgcggcctcacgtgcgttgtaacaagccctcatcacatgtgtgagtcttacgtgcacaaaaagagaaggctttggtactgaaactggacaccttgtgtactcgataccttcacagcttctattggacatattttctttttaggaatgaaggaaaattctcccatttttgagccattcttttgtcaattctacaaaattgcatgtaactttataaatatttttaaaagatatagttttgtaaatatttaatattccgctaatttgattttgaattgtaaatgtcaagtattctgtttttggggtttttatgttttattatactttgttaaaaaggacaaattgtacatttttagaatgtttttatgagtaaatttaatgtactgaaaataaaaatttt

SEQ ID NO: 22437 - DNA, 2779 bp, Homo Sapiens
gcgccgggccgggccgggcagggcgcgggcggctaggggctccgagagcggcggccccggcccgcggccccaccatgccccagctcggcggcgggggcggcggcggcggcggcggcagcgggggaggcggcggctccagcgccggggcggccggcggaggggacgacctcggggcgaacgacgagctgatccccttccaggacgaggggggcgaggagcaggagccgagcagcgatagcgcctcggcgcagcgggacctagacgaggtcaagtcgtccctggtcaacgagtcggagaaccagagcagcagctcggactcggaggcggagaggcgcccgcagcccgtccgggacactttccagaagccgcgggactatttcgccgaagtgagaaggcctcaggacagcgcgttctttaaaggacccccgtaccctgggtaccccttcctgatgatcccggacctgagcagcccgtacctctccaacggacccctgtctcccggaggagcgcgcacctacctgcagatgaaatggcccctcctcgatgtcccctccagcgccacagtcaaggacacgaggtcaccatctccagcacacttgtctaataaagttcctgtcgttcagcacccgcatcacatgcatccgctgactcccctcatcacctacagcaatgaccacttctcccccggctcccctcccacccacctctccccagagatcgatccaaagacaggaatcccccggccccctcacccatccgagctgtcaccgtattacccactctctcccggagctgtcggacaaatcccccaccccctcggctggctcgtcccacagcaaggccagcccatgtactcccttcctcccggtggcttccggcacccttaccccgccctcgccatgaacgcctcgatgtccagcctggtctccagtcggttctctcctcacatggtggctcctgcccaccctggcctgcccacctcagggatcccccaccctgccatcgtctcccccatcgtcaagcaggaaccggcaccccccagcctgagccctgcagtgagcgtgaaatcaccagtcaccgtgaaaaaggaggaggaaaagaagccccacgtgaagaagcctctgaatgccttcatgttgtatatgaaggagatgagggccaaggtggtggctgagtgcaccctgaaggaaagtgcagccattaaccagatccttggaagaaagtggcacaacctgtctcgagaagaacaggccaagtactacgagctggcccggaaggagcggcagcttcactcgcagctctacccaacctggtcagcccgggacaactatggtaagaaaaagaagaggaagagagaaaagcagctgtcccagacacagtcacagcagcaagtccaggaggcagagggtgccctggcctccaagagcaagaagccatgtgttcagtacctgccccccgagaagccctgtgacagccctgcctcctcccacgggagcatgctggactccccggccactccctctgcagctttggcctcaccagctgcccctgctgccacccattcggagcaagcccagcccctctccctcaccaccaaaccagaaacccgggcccagctggctctccactctgccgccttcctgtcggctaaggctgcagcctcctcctctgggcagatgggcagccagcctcccctcctgtcccggcccctcccccttgggtccatgcccacagctctgctggcctctcccccgtccttccccgccacgctccatgcccaccaggccctcccggtgctacaggcccagcctctttccctggtcaccaagtctgcccactaagctccccccgacccctgcaggctgtcacatgactcattgagtagtaatgattcagaagaaaaagaaaaaggagactttattggtcaatatttgaccactctggactgttctgtaaagtggctggtaacaacagcactttacagtttgtagatgtaaccagtagctgatcttaaggcttttttaaaaaacaaaacaaaacaacaaaaaaaaatctttataagaaagagaactgaaaagtagcgtgctattcgtcctgtaggtgctgtggtggatggacctgggcagagggcacttctctctcttacctctcttgcactttctgtctcctgtctcttctcgcccctgccgcctgccccagcttccccgactccatctgcagctctgccattgtgacatttcctgttacccagcccaagttttcatcgtctgctcaataccgtgggttcttcttcgtcctctgtcctctgcccagtgtgaggccatcaccatgtgagaagacatcttggcctgatttgctgccaccagcgtcccctccctcagtgggcccgaactcgccagccccagctttcagtggagaaagcggtcctctgaaatggtttcctcccaacccccgcatttaaagggactcaaggtgcctgccacttcctcagcgaagaagtctgtgttcctccccgtccttgccagtggcgatcatcccttcacaatcccagagtggcaggcgggaccagccccatggtctggctcctgtcacctgggtccgtgccagcacaatctgccaaagttctagagaccctgttcccttccccatcacctcacatgcttcttctgtgtgtatttctttttgtttttatggtttttggagcaatttaaactcccagttgtttattttcacaaaagaaaataaaattgcagttgcaagaaaaaaaaaaaaaaaaaaa

SEQ ID NO: 22438 - DNA, 1082 bp, Homo Sapiens
gaggaggccatgggcgcgcgcggggcgctgctgctggcgctgctgctggctcgggctggactcaggaagccggagtcgcaggaggcggcgccgttatcaggaccatgcggccgacgggtcatcacgtcgcgcatcgtgggtggagaggacgccgaactcgggcgttggccgtggcaggggagcctgcgcctgtgggattcccacgtatgcggagtgagcctgctcagccaccgctgggcactcacggcggcgcactgctttgaaacctatagtgaccttagtgatccctccgggtggatggtccagtttggccagctgacttccatgccatccttctggagcctgcaggcctactacacccgttacttcgtatcgaatatctatctgagccctcgctacctggggaattcaccctatgacattgccttggtgaagctgtctgcacctgtcacctacactaaacacatccagcccatctgcctccaggcctccacatttgagtttgagaaccggacagactgctgggtgactggctgggggtacatcaaagaggatgaggcactgccatctccccacaccctccaggaagttcaggtcgccatcataaacaactctatgtgcaaccacctcttcctcaagtacagtttccgcaaggacatctttggagacatggtttgtgctggcaatgcccaaggcgggaaggatgcctgcttcggtgactcaggtggacccttggcctgtaacaagaatggactgtggtatcagattggagtcgtgagctggggagtgggctgtggtcggcccaatcggcccggtgtctacaccaatatcagccaccactttgagtggatccagaagctgatggcccagagtggcatgtcccagccagacccctcctggccactactctttttccctcttctctgggctctcccactcctggggccggtctgagcctacctgagcccatgcagcctggggccactgccaagtcaggccctggttctcttctgtcttgtttggtaataaacacattccagttgatgccttgcagggcattcttcaaaaaaaaaaaaaaaaaa

SEQ ID NO: 22439 - DNA, 2308 bp, Homo Sapiens
  misc_feature (2267)..(2267): n is a, c, g, or t
  misc_feature (2275)..(2275): n is a, c, g, or t
  misc_feature (2291)..(2292): n is a, c, g, or t
  misc_feature (2297)..(2297): n is a, c, g, or t
  misc_feature (2302)..(2302): n is a, c, g, or t
  misc_feature (2308)..(2308): n is a, c, g, or t
ggaaaaggcgccttgggagcgggcgctcggcggggcctcctcgggccccgggcgcggcgcggcgagtgggagcgagcgcgccaggaccacgcaggcgccctgctccggctggccctcggccggcgcgcggcgcgggagcagcccgcagcccgcctcccgcgcccccggcagccccctggcagcccgcagccgcccgtccggagcagcccctcggcagcccgcgcaggccgccggcccgggagagcgcgcggcggcggcggcggcgggacggccccgagcgcgccctcccgcctgcggccactcgcagccggcgctggccgggccggcgcgccccgcaggcggctagagcgcggcctcggcctcggcgcgggcttgccccgggccgtagcccgcgagaggcggcgcgggcggccgagggcactgacggcgtcgcgggacgctcccgggcggcggcgcagcggcagcggcagcggcagcggcagcgcagggggcggaggcagggggcgcccccagccaggatgctgcggttcctgcgccggacctttggccgccgctccatgcagcgctacgcgcggggcgcggcggggcgcggggccgccgggcagggggacgagcgcgaaggggggccacgggggggcccggccgccgccgcctcctcctcggcgctgcccgccgcgcccgggggcagcgtgttcccggcgggcggcgggcccctgctcaccggcggcgcggccatgcacatctccgccgccggcgccgccaaggccaccctctactgccgcgtcttcctgctcgacgggaccgaagtgagcgtggacctgccgaaacatgccaaaggccaggatttgtttgatcagattgtgtaccacttggaccttgtggaaacagattactttggcctccagttcctcgactctgcccaggttgcgcactggctggatcatgccaaacccataaaaaagcagatgaaaattggacctgcttatgctttacactttcgagttaaatactattcttcagaaccaaacaaccttcgtgaggagtttacaaggtacctgtttgttttacaactcaggcatgacattctttctggaaaattgaaatgcccttatgaaacagctgtggaattagctgctctctgtctacaagcggagcttggggagtgcgagcttccagaacacacaccagagcttgtgtctgagtttcggttcattccaaatcagacagaagcaatggaatttgatatcttccagagatggaaagagtgcaggggaaagagccctgcccaggcggaactctcctatctgaataaagcgaagtggctggaaatgtatggggtagacatgcacgttgtcaggggaagagatggctgtgaatattctcttggactgaccccgacaggcatattaatctttgaaggagctaacaaaataggcttattcttttggcctaaaattaccaaaatggattttaaaaagagcaaattgacactcgtggtggtcgaggatgatgatcagggacgtgagcaagagcacacgtttgtgttccggttagacagtgccaggacctgcaaacacctttggaagtgtgcagttgagcaccacgcattcttccgactgcggacgccaggaaacagcaaatccaatagatccgactttatcaggctgggctctcgcttcagattcagtgggcggacagaatatcaagctacacatggctccaggttacgaagaaccagcacctttgagaggaagcctagtaaacgttatccatcccggagacattcaacgttcaaagcaagcaacccagtgatagcagcccagctctgctctaaaacaaatccagaagtccataattaccagcctcaatatcatcctaatatccatcccagccagccccggtggcatcctcactctccaaatgtcaggccatcctttcaggatgacaggtcgcattggaaagcatcggccagtggagatgacagccattttgattatgtccacgaccagaaccagaagaacttaggagggatgcaaagtatgatgtatcgagataaactcatgactgcactttgagagactgaagcatctctcttccattcaccttcatagtttcattgcattccatgaaaagtgtcttggcctcagatggatggatgtgtttggacgagtgtctttaaggagtagtcctgaaaggtgtttttggtgtccatgtaaatatttgaagataaaaccaactatagcttgtccccaatttcactgttgacngctcttcnatccaaaaataccccnngaacncgaangggccn

SEQ ID NO: 22440 - DNA, 5925 bp, Homo Sapiens
  misc_feature (5402)..(5402): n is a, c, g, or t
cttttcccatcgtgtagtcaagagtctgtgccagacttgaaggctttactttgttagccatgtgtttatgaacccccagcgctttccctagatcttttggctgataatctcaaacatggaggatgcttctgaatcttcacgaggggttgctccattaattaataatgtagttctcccaggctctccgctgtctcttcctgtatcagtgacaggctgtaaaagtcatcgagtagccaataaaaaggtagaagcgaggagtgaaaagctcctcccaacagctcttcctccttcagagccgaaagtagatcagaaacttcccaggagctccgagaggcggggaagtggcggtgggacgcaattccccgcgcggagtcgggcagtggcagcgggagaagcggcagccaggggcgcggcggggccggagagaggcagtcccctgggaagacgggtctcccctcgttgcctttgtagtggagaaggtggacaagtggcagtcggcgtgatcgcagggaagcggggccggcgcgggcgcgacgggtccaggcgagccccgggcggacgggagatgccgctgctacaccgaaagccgtttgtgagacagaagccgcccgcggacctgcggcccgacgaggaagttttctactgtaaagtcaccaacgagatcttccgccactacgatgacttttttgaacgaaccattctgtgcaacagccttgtgtggagttgtgctgtgacgggtagacctggactgacgtatcaggaagcacttgagtcagaaaaaaaagcaagacagaatcttcagagttttccagaaccactaattattccagttttatacttgaccagccttacccatcgttcgcgcttacatgaaatttgtgatgatatctttgcatatgtcaaggatcgatattttgtcgaagaaactgtggaagtcattaggaacaatggtgcaaggttgcagtgtacgattttggaagtcctccctccatcacatcaaaatggttttgctaatggacatgttaacagtgtggatggagaaactattatcatcagtgatagtgatgattcagaaacacaaagctgttcttttcaaaatgggaagaaaaaagatgcaattgatcccttactattcaagtataaagtgcaacccactaaaaaagaattacatgagtctgctattgttaaagcaacacaaatcagccggagaaaacacctattttctcgtgataaactaaagctttttctgaagcaacactgtgaaccacaagaaggagtcattaaaataaaggcatcatctctttcaacgtataaaatagcagaacaagatttttcttatttcttccctgatgatccacccacatttatcttcagtcctgctaacagacgaagagggagacctcccaaacgaatacatattagtcaagaggacaatgttgctaataaacagactcttgcaagttataggagcaaagctactaaagaaagagataaacttttgaaacaagaagaaatgaagtcactggcttttgaaaaggctaaattaaaaagagaaaaagcagatgccctagaagcgaagaaaaaagaaaaagaagataaagagaaaaagagggaagaattgaaaaaaattgttgaagaagagagactaaagaaaaaagaagaaaaagagaggcttaaagtagaaagagaaaaggaaagagagaagttacgtgaagaaaagcgaaagtatgtggaatacttaaaacagtggagtaaacctagagaagatatggaatgtgatgaccttaaggaacttccagaaccaacaccagtgaaaactagactacctcctgaaatctttggtgatgctctgatggttttggagttccttaatgcatttggggaactttttgatcttcaagatgagtttcctgatggagtaaccctagaagtattagaggaagctcttgttggaaatgacagtgaaggcccactgtgtgaattgctttttttcttcctgactgcaatcttccaggcaatagctgaagaagaagaggaagtagccaaagagcaactaactgatgctgacaccaaaggctgcagtttgaaaagtttggatcttgatagctgcactctttcagaaatcctcagactgcacatcttagcttcaggtgctgatgtaacatcagcaaatgcaaagtatagatatcaaaaacgaggaggatttgatgctacagatgatgcttgtatggagcttcgtttgagcaatcccagtctagtgaagaaactgtcaagcacctcagtgtatgatttgacaccaggagaaaaaatgaagatactccatgctctctgtggaaagctactgaccctagtttcaactagggattttattgaagattatgttgatatattacgacaggcaaagcaggagttccgggaattaaaagcagaacaacatcgaaaagagagggaagaagcagctgccagaattcgtaaaaggaaggaagaaaaacttaaggagcaagaacaaaaaatgaaagagaaacaagaaaaactgaaagaagatgagcaaagaaattcaacggcagatatatctattggggaggaagaaagggaagattttgatactagcattgagagcaaagacacagagcaaaaggaattagatcaagatatgttcactgaagatgaagatgacccaggatcacataaaagaggcagaagggggaaaagaggacaaaatggatttaaagaatttacaaggcaagaacagatcaactgtgtaacaagagagcttcttactgctgatgaggaagaagcattaaaacaggaacaccaacgaaaagagaaagagctcttagaaaaaatccaaagtgccatagcctgtaccaatatctttcccttgggtcgcgaccgcatgtatagacgatactggattttcccttctattcctggactctttattgaagaggattattctggtcttactgaagacatgctgttgcctagaccttcatcatttcagaataatgtacagtctcaagatcctcaggtatccactaaaactggagagcctttgatgtctgaatctacctccaacattgaccaaggtccacgtgaccattctgtgcagctgccaaaaccagtgcataagccaaatcggtggtgcttttacagttcttgtgaacagctagaccagcttattgaagctcttaattctagaggacatagagaaagtgccttaaaagaaactttgttacaagagaaaagcagaatatgtgcacagctagcccgtttttctgaagagaaatttcatttttcagacaaacctcagcctgatagcaaaccaacatatagtcggggaagatcttccaatgcatatgatccatctcagatgtgtgcagaaaagcaacttgaactaaggctgagagattttcttttagatattgaagatagaatctaccaaggaacattaggagccatcaaggttacagatcgacatatctggagatcagcattagaaagtggacggtatgagctgttaagtgaggaaaacaaggaaaatgggataattaaaactgtgaatgaagacgtagaagagatggaaattgatgaacaaacaaaggtcatagtaaaagacagacttttggggataaaaacagaaactccaagtactgtatcaacaaatgcaagtacaccacaatcagtgagcagtgtggttcattatctggcaatggcactctttcaaatagagcagggcattgagcggcgttttctgaaagctccacttgatgccagtgacagtgggcgttcttataaaacagttctggaccgttggagagagtctctcctttcttctgctagtctatcccaagtttttcttcacctatccaccttggatcgtagcgtgatatggtctaaatctatactgaatgcgcgttgcaagatatgtcgaaagaaaggcgatgctgaaaacatggttctttgtgatggctgtgataggggtcatcatacctactgtgttcgaccaaagctcaagactgtgcctgaaggagactggttttgtccagaatgtcgaccaaagcaacgttgtagaagactgtcctttagacagagaccatccttggaaagtgatgaagatgtggaagacagtatgggaggtgaggatgatgaagttgatggcgatgaagaagaaggtcaaagtgaggaggaagagtatgaggtagaacaagatgaagatgactctcaagaagaggaagaagtcagcctacccaaacgaggaagaccacaagttagattgccagttaaaacaagagggaaacttagctcttctttctcaagtcgtggccaacaacaagaacctggaagatacccttccaggagtcagcagagcacacccaaaacaactgtttcttctaaaactggtagaagcctaagaaagataaactctgctcctcctacagaaacaaaatctttaagaattgccagtcgttctactcgccacagtcatggcccactgcaagcagatgtatttgtggaattgcttagtcctcgtagaaaacgcagaggcaggaaaagtgctaataatacaccagaaaatagtcccaacttccctaacttcagagtcattgccacaaagtcaagtgaacagtcaagatctgtaaatattgcttcaaaactttctctccaagagagtgaatccaaaagaagatgcagaaaaagacaatctccagagccatcgcctgtgacactgggtcgaaggagttctggccgacagggaggagttcatgaattgtctgcttttgaacaacttgttgtagaattggtacgacatgatgacagctggccttttttgaaacttgtttctaaaatccaggtcccagactactatgacatcatcaaaaagcccattgccttaaatataattcgtgaaaaagtgaataagtgtgaatataaattagcatctgagtttattgatgacattgagttaatgttttcgaactgctttgaatacaaccctcgtaacacaagtgaagcaaaagctggaactaggcttcaagcattttttcatattcaggctcaaaagcttggactccacgtcacacccagtaatgtggaccaagttagcacaccaccggctgcgaaaaagtcacgaatctgactttgtccttctaaaggatatatttgaagaaaaacaaattgttcatgaaaatggaacattaaatcatgctgtataaagcaataacaaacaattgattgaccacatgaaagtgtggcctgcactatattctcaattttaatattaagcactcaggagaatgtaggaaagatatcctttgctacagttttgttcagtatctaataagtttgatagatgtattggatacagtactggtttacagaggtttttgtacatttttganatcattcatgtgtccagagatcttggaaaatattttttcacccacgatttattttgttattgatgatttatttttaaagtggtggtattaagggagagttatctacatggatgagtcttccgctatagcacagtttagaaaaggtgtttatgtcttaattaattgtttgagtacattctttcaacactacacatgaatgaatccaatcttataaccttgaagtgctgtaccagtgctggctgcaggtattaagtccaagtttattaactagatatttatttagtattgagagtaatttgtgaatttgttttgtatttataaaatttatacctggaaaatgttccttaatgttttaaaccttttactgtgtttttattcctctaacttccttaatgatcaatcaaaaaaagtaacaccctccctttttcctgacagttctttcagctttacagaactgtattataagttctatgtataattttaactgttcaaataaaatacatttttccaataaaaaaaaaaa

SEQ ID NO: 22441 - DNA, 5561 bp, Homo Sapiens
cgggcccgggggaggaggggaatctcccgccatttttcaataatttcctccggtgctgctgaggaggagtcgtgactgccggccgccgggacccgaagcggaggtcggcggggggctgctgggaggcgcggcggtgtgcgcgggagctctgcgccgtggcgttccgctccatgactgtcgcgcggccgcgccggcggtgagggagccggagttcgcgccgccctctcacccctcccttcccccaccccacccccgggcgcctggcgctcgctccgggccgcggggcctagtgctgcgccgcggggccggccccagcagccgccagtccccaccgccgccgccgcgatggcgccgctcctgggccgcaagcccttcccgctggtgaatccgttgcccggagaggagccgttcttcaccatcccgcacactcaggaggccttccgcacccgggaagagtatgaagcccgcttggaaaggtacagtgagcgcatttggacgtgcaagagtactggaagcagtcagctaacacacaaggaagcctgggaggaagaacaggaagttgctgagcttttgaaggaggagtttcctgcctggtatgagaagcttgttctggaaatggttcaccataacacagcctccttagagaagttagtagatactgcttggttggagatcatgaccaaatatgctgtgggagaagagtgtgacttcgaggttgggaaggagaaaatgctcaaggtgaagattgtgaagattcatcctttggagaaagtggatgaagaggccactgagaagaaatctgatggtgcctgtgattctccatcaagtgacaaagagaactccagtcagattgctcaggaccatcagaagaaggagacagttgtgaaagaggatgaaggaaggagagagagtattaatgacagagcacgtagatcgccacgaaaacttcctacttcattaaaaaaaggagaaaggaaatgggctcctccaaaatttctgcctcacaaatatgatgtgaaactacaaaatgaagataagatcatcagtaacgtgccagcagacagcttgattcgtacagagcgcccaccaaataaggagatagttcgatactttatacggcataatgcattacgagctggtactggtgaaaatgcaccttgggtcgtagaagatgaattggtgaagaaatactctctgcccagcaagttcagtgactttttacttgatccatacaagtatatgactctcaacccttctactaagaggaagaatactggatccccagacaggaagccctcaaagaaatccaagacagacaactcttctcttagttcaccactaaatcctaagttatggtgtcacgtacacttgaagaagtcattgagtggctcgccactcaaagtgaagaactcaaagaattccaaatctcctgaagaacatctagaagaaatgatgaagatgatgtcgcccaataagttgcacactaactttcacattcctaaaaaaggcccacctgccaagaaaccagggaagcacagtgacaagcctttgaaggcaaagggcagaagcaaaggcatcctgaatggacagaaatccacagggaattccaaatctcccaaaaaaggactgaagactcctaaaaccaaaatgaagcagatgactttgttggatatggccaaaggcacgcagaagatgacacgagccccacggaattctgggggtacacctaggacctctagtaaacctcataaacatctgcctcctgcagccctacacctcattgcatactacaaagaaaacaaagacagggaggacaagaggagcgccctgtcctgtgttatctccaaaacagctcgtcttctctctagtgaagatagagctcgtctcccagaagaattgcgaagtcttgttcaaaaacgctatgaacttctagagcacaaaaagaggtgggcttctatgtctgaagaacaacggaaagaatatttgaaaaagaaacgggaggagctgaaaaagaagttgaaggaaaaagccaaagaacgaagagagaaagaaatgcttgagagattagaaaaacagaagcggtatgaggaccaagagttaactggcaaaaaccttccagcattcagattggtggatacccctgaagggctgcccaacacgctgtttggggatgtggccatggtggtggaattcttgagctgttattctgggctacttttaccagatgctcagtatcctattactgctgtgtcccttatggaagccttgagtgcagataagggtggctttttataccttaacagggtgttggtcatcctcttacagaccctcctacaagatgagatagccgaagactatggtgaattgggaatgaagctgtcagaaatccccttgactctgcattctgtttcagagctggtgcggctctgcttgcgcagatctgatgttcaggaggaaagcgagggctcagacacagatgacaataaagattcagctgcatttgaggataatgaggtacaagatgagttcctagaaaagctggagacctctgaattttttgagctgacgtcagaggagaagctacagattttgacagcactgtgccaccggatcctcatgacatactcagtgcaagaccacatggagaccagacagcagatgtctgcagagttgtggaaggaacggcttgctgtgttgaaggaagaaaatgataagaagagagcagagaaacagaaacggaaagaaatggaagccaaaaataaagaaaatggaaaagttgagaatgggttaggcaaaactgataggaaaaaaagaattgtgaagtttgagccccaagtagatacagaagctgaagacatgattagtgctgtgaagagcagaaggttgcttgccattcaagctaagaaggaacgggaaatccaggaaagagaaatgaaagtgaaactggaacgccaagctgaagaagaacgaatacggaagcacaaagcagctgctgagaaagctttccaggaagggattgccaaggccaaactagtcatgcgcaggactcctattggcacagatcgaaaccataatagatactggctcttctcagatgaagttccaggattattcattgaaaaaggctgggtacatgacagcattgactaccgattcaaccatcactgcaaagaccacacagtctctggtgatgaggattactgtcctcgcagtaagaaagcaaacttaggtaaaaatgcaagcatgaacacacaacatggaacagcaacagaagttgctgtagagacaaccacacccaaacaaggacagaacctatggtttttatgtgatagtcaaaaggagctggatgagttgctaaactgtcttcaccctcagggaataagagaaagtcaacttaaagagagactagagaagaggtaccaggacattattcactctattcatctagcacggaagccaaatttgggtctaaaatcttgtgatggcaaccaggagcttttaaacttccttcgtagtgatctcattgaagttgcaacaaggttacaaaaaggaggacttggatatgtggaagaaacatcagaatttgaagcccgggtcatttcattagagaaattgaaggattttggtgagtgtgtgattgcccttcaggccagtgtcataaagaaatttctccaaggcttcatggctcccaagcaaaagagaagaaaactccaaagtgaagattcagcaaaaactgaggaagtggatgaagagaagaaaatggtagaggaagcaaaggttgcatctgcactggagaaatggaagacagcaatccgggaagctcagactttctccaggatgcacgtgctgcttgggatgcttgatgcctgtatcaagtgggatatgtccgcagaaaatgctaggtgcaaagtttgtccaaagaaaggtgaggatgacaaattgatcttgtgtgatgagtgtaataaagccttccacctgttttgtctgaggccggccctctatgaagtaccagatggtgagtggcagtgcccagcttgccagcccgctactgccaggcgcaactcccgtggcaggaactatactgaagagtctgcttctgaggacagtgaagatgatgagagtgatgaagaggaggaggaggaagaagaggaggaggaggaagaagattatgaggtggctggtttgcgattgagacctcgaaagaccatccggggcaagcacagcgtcatcccccctgcagcaaggtcaggccggcgcccgggtaagaagccacactctaccaggaggtctcagcccaaggcaccacctgtggatgatgctgaggtggatgagctggtgcttcagaccaagcggagctcccggaggcaaagcctggagctgcagaagtgtgaagagatcctccacaagatcgtgaagtaccgcttcagctggcccttcagggagcctgtgaccagagatgaggccgaggactactatgatgtgatcacgcaccccatggactttcagacagtgcagaacaaatgttcctgtgggagctaccgctctgtgcaggagtttcttactgacatgaagcaagtgtttaccaatgctgaggtttacaactgccgtggcagccatgtgctaagctgcatggtgaagacagaacagtgtctagtggttctgttgcataaacaccttcctggccacccatatgtccgcaggaagcgcaagaagtttcctgataggcttgctgaagatgaaggggacagtgagccagaggccgttggacagtccagggacgaagacagaagaagtagagaggcggagattcaggaatggctccaggacacgtccctttactctgccaagatcaactcaaaagaccacaactgtttcatgatgctggtgaatacacaattctgtatggcactcactgatactgtcacctgagaggaagacgggggaagagacagagtatgggcttaaagaaacaagactgtataataaatacagattaaaaaagaaaaatcgccaccatctcccctgttggcctgattaccccgatcctgctatgtaacacagcaatccctcccctggagaccagaggggcttggcactgtggtggaagccagaacgagcaggcccttaggaaagaaggcaggaacaggaactggcttcaccagaaaagctagaccctcggactcctcctggaaactctcagaagggagggttatggccctctttgtcccttcatatttctggacaaagaccaccaacccaatatcaagccccataaagagcttttagaaaaacagcataagcttgggatgacaggcgtttctggactccctgtgatctcttccaggttcttggtcttcctcgctcgcctccctcccaccctccctagctgtccccccacctcagctcccttaccacggccctgcctctctacttcttctgtcttcgtcccctggactgtccaacggcctctggctcactgtcccttcatcttcagcaacctatcaggaaacttcttgcgcttcctgcggacatatgggtggccaggaagtgtttatgcaaca

SEQ ID NO: 22442 - DNA, 9408 bp, Homo Sapiens
gttccactcacagatttcttcttattgcccaggcttgagtgcaatgacctgttctcagcttactcaacctctgcctcttgggtttcagtgatttttctgcctcggcctcctgagtagctaagggaggagtcttgagattatcatccacggagggtggaagaggagagggtggaaggggaataagaagacattcgggaggtgtcttgaggctcagggagttatcagttatagaatgttgttgagttggaggaagtggctggcggcccatcctgttttttaaagtttcacctgtgaagtagggccagtagggcaatcctgaagaatgacgatgctccgctgccgccattctgacctgtaaggccgaaagaaagggaatgttttcacacatattcatttgatggacaaaattaccgccaccaacacggtctgcaccttctgttgctggtgataaatttttgcacctttccatcctccaggtttcaaaatagcagtatcagtgtcataatatcacccttccactgagtactgccgacagctggggagtaaaaaaaagtcattgggacatcaccctacagcagttcaggctgtgtggttcgcaagaagcatacactggctttttgattcttgctagttcccagctcacagtttgggaggatccaacaccaacctttacgtgaagtggaggcccaaggacagtgaggagctgggtggtcccagcctggagctgtgccagcctgacatggaaatggaggcaaacgaggcaaacgaccattttaactttactggccttccccctgcacctgctgcctcaggactgaaaccctctccttcctcaggggagggcctctacactaacgggtctcccatgaacttcccccagcaagggaaaagtttgaatggggatgtgaatgttaatggcttatctactgtatctcacactactacttcagggattttgaactctgctccccactcctccagcacctcacacctccatcaccccagcgtggcctacgactgtctctggaactactcacagtacccatctgccaatcctggcagcaacctcaaggacccaccccttctctcccagttctcggggggacaatacccactcaacggcatccttgggggcagccggcaaccttcatccccaagtcataacactaaccttcgggctgggagccaaaagttctgggccaacggtacccatagtcccatggggcttaactttgattcacaagaactgtatgattcctttcctgaccagaattttgaggaggtatgcagtggtatccatcctgatgaggcagcagaaaaagagatgacttccgttgtggcagaaaatggcactggcttggtatgcagcttggagctggaagaagaacagccagaactgaagatgtgtggctacaatggctctgtcccttctgtggaatcgttacaccaagaggtctcagtcctggtccctgaccccacagtgagctgtttagatgatccttcacatcttcctgatcaactggaagacactccaatcctcagtgaagactctctggagcccttcaactctctggcaccagagccagtgagtggaggactatatggtattgatgacacggagctgatgggtgcagaagacaagctgcctcttgaggacagccctgtgatttctgcccttgattgcccttccctcaataatgctactgccttcagtctcctggcagatgatagtcaaacatcaacttctatctttgccagtcccacttctccacctgtcctaggggagtctgtcctgcaagataacagctttgacctgaataatggtagtgacgctgaacaggaagaaatggaaactcaatcttcagacttcccaccatccctgacccagccagctcctgatcagtcatccactattcagctacatccagcaacctcaccagcagtctcgccaacaacctccccagcagtctccctagtggtttctccagcagcctccccagaaatctctccagaagtttgtcccgcagcttctacagttgtctctccagcagtcttctcagtggtctctccagcttcttcagcagtcctcccagcagtctccttagaagtcccgttgacggcttcagtgacatccccaaaagcctctcccgtaacttccccagcagctgcctttccaacagcctccccagcaaataaggatgtcagcagctttctagaaaccactgctgacgtggaagagatcactggagaaggactcactgcttctggtagtggtgatgtcatgaggagacgtattgctaccccagaagaagttcgtcttcccctccaacatgggtggcggagagaggtgcgcatcaagaagggcagccaccgatggcagggggagacctggtattatggcccctgtgggaagaggatgaagcaatttccagaagtgatcaagtacctgagccgcaacctggtacacagtgtccgccgagagcacttcagcttcagtccccgtatgcctgttggagatttctttgaagaaagagacacgccagagggcttgcagtgggtgcagctctcagcagaggagatcccgtcgaggattcaggcaattactggcaaacggggtcgacctcgaaacactgagaaggctaagactaaggaagtccccaaggtgaaacggggtcgaggtcggccacctaaggtcaaaatcactgagctattgaacaagacagacaaccgccccctaaagaaactggaggcccaagaaacattgaatgaggaggataaagcaaagattgctaaaagcaagaagaagatgaggcagaaggttcaacggggagagtgtctgactactatccaagggcaggccagaaataagcggaaacaagagaccaagagcttaaagcacaaggaagctaagaagaaatccaaggctgagaaagaaaaaggaaagacaaagcaggaaaaactgaaggaaaaagtcaagagggaaaagaaggagaaggttaaaatgaaggaaaaggaggaggtgaccaaagccaagccagcctgtaaagcagataagaccctggccacacagaggcgcttggaggaacggcagaagcagcagatgatcttggaggaaatgaagaagccgacagaggatatgtgtctgactgaccaccagcccctgcctgacttctcacgagtccctggtctgacattgcccagtggagccttctcagactgcttgaccattgtggagttcctgcatagctttggcaaggtgctgggctttgatcctgccaaagatgtgcctagcctgggggtcctgcaggagggactcctgtgtcaaggtgacagcttgggtgaggtgcaagacctgctggtcaggctgctgaaggctgcactccatgatcctggctttccctcctactgtcagtccctaaagatcttgggggagaaggtgtctgaaatcccactgacaagagacaatgtgtcagagatcctgcgctgcttccttatggcatatggagtagagccagccctctgtgaccgcctgcgcacccagccttttcaggcccagccaccccagcagaaggctgctgtcctggccttccctgtgcatgagctcaatggctccaccctcatcatcaatgagattgacaagactctggagagtatgtccagctacaggaaaaacaagtggattgttgaaggccggctccggaggctgaaaactgttctggccaagcgaactgggcggtctgaagtagagatgggaaggccagaggaatgcctgggacggaggcgcagttctcggatcatggaggagaccagtggcatggaagaagaggaagaagaggagtctatagcagctgtccctggccgcaggggtcgaagagatggagaggttgatgccacagcatctagcatcccagagctagagcgccagatagaaaaactcagcaagcgtcagcttttctttcgcaaaaagctgcttcactcatcccagatgcttcgggcggtctccctgggtcaggaccgctacagacgtcgctactgggtattgccgtatttggctggtatctttgtagaaggaacagaggggaacttagttcctgaggaggtgataaagaaggaaactgactccttaaaagtggcagcccatgcgtcactcaaccctgccctcttctctatgaagatggagttagctggctccaacaccactgccagttctcctgcccgggcccgaagccgacctctaaaaactaagcccgggtttatgcaacctaggcattttaagtcccctgtcaggggtcaggattcagaacagccccaggcccagcttcagcctgaggctcagcttcatgttcctgcccagccccagcctcagcttcagcttcagcttcagtcccataaggggttcctggagcaagaaggctcccctttgtcactgggtcagagccagcatgacctcagccagtcagccttcctgtcttggctgagccagactcagagccatagctccctgttgagcagctcagtcctcacacctgatagcagtccgggaaaactagacccagctccatcacaacccccggaggagccagagcctgatgaggcagaatccagccctgatcttcaagcattctggtttaacatctcagcccagatgccctgcaatgctgcccccacaccgccccttgcagtttctgaggaccaacccactccctcccctcagcagcttgcctcctccaagccaatgaatagacctagtgctgccaacccttgttctccagtgcagttctcttccacgcccttggctgggttggcccctaagaggcgagcaggagaccctggagaaatgccacagagtcccacagggctgggacagcccaaacggagagggagacctcccagtaagttcttcaaacagatggaacagcgttacctaacccagctgacagcccagcctgtcccacctgagatgtgctcaggctggtggtggataccagatcctgagatgttggatgccatgctcaaggccctacacccccgaggtatccgggagaaggcacttcacaaacaccttaacaagcacagggacttcttgcaggaagtctgcctgcggccctcagctgaccccatctttgagcccaggcaactacctgcctttcaagaagggattatgagctggtcccccaaagagaagacatacgagacagacctagcagtgcttcaatgggtagaggagctggagcagcgggttatcatgtctgatctgcagattcggggctggacatgtcctagcccagactctacccgtgaagacttggcctactgtgagcacctctccgactcccaggaggatatcacctggcgaggtccgggcagggagggactggcacctcaacgtaaaactaccaaccctttggacctggctgtgatgcggctggctgccctggaacaaaatgtaaaacggcggtacctgcgggagcccctctggccaactcatgaggttgtgctggagaaagccctgcttagcacacctaatggtgcccctgagggcaccactacagagatatcatatgagatcacccctcgcattcgtatctggcgccagaccctccagcggtgccggagcgcagcccatgtgtgcttgtgcctgggccatctggagaggtccattgcctgggagaagtctgtcaacaaagtgacatgtctagtctgccggaagggtgacaatgatgagtttcttctgctttgtgatgggtgtgaccgtggctgccacatttactgccatcgtcccaagatggaggctgtcccagaaggagattggttctgtactgtctgtttggctcagcaggtggagggagaattcactcagaagcctggtttcccaaagcgtggccagaagcggaaaagtggttattcgctgaacttctcagaaggtgatggccgccgacgccgggtactgttgaagggccgagaaagcccagcagcagggcctcggtactcggaagaaaggctctccccctccaagcggcggcgactctctatgcggaaccaccacagtgatctcacattttgcgagattatcctgatggagatggaatcccatgatgcagcctggcctttcctagagcctgtgaacccacgtttggtgagtgggtaccggcgcatcatcaaaaatcctatggatttttccaccatgcgggagcggctgctcaggggagggtacaccagctcagaggagtttgcggctgatgccctcctggtatttgacaactgccagactttcaacgaggatgactctgaagtaggcaaggctgggcacatcatgcgccgcttcttcgagagccgctgggaggagttttatcagggaaaacaggccaatctgtgaggcaagggaggtggggagtcaccttgtggcatctccccccaccttccaaacaaaaacctgccattttcacctgctgatgctgccctgggtccagactcaagtcagatacaaccctgatttttgaccttgcccttggcagtgccccacatcctcttattcctacatccctttctcccttccctcctcttgctcctcaagtaagaggtgcagagaggagtccttctggactaaaagccaaaaaaagaaagaaaaaaataatttttcttttctgttttatttgctaattaaaaatggggagggggaaagtcgtccctacttcctcctccgtgcttcctctcctcccctgtacgtgccccagcattctggggttatttaacaatagcaatagttctagtgaatgtgtgaaaccaagaaacactctgtactgtgtgcggacccgcagtgacggccagtaaagtggacttaactcccaagtgtgtcgcggccggacaccgggccctggacatgctgcttccatgttcagtcccttccctgcttctcgctgtctttcttttcccacctcccaccccccagttttcagattttctctcatccaataatgtaaaactatcgtgtacgggttcctccctccttttctcttctcccaaatcttttcccttcaaaggaaaaaaaaatgttcagaggtccctgtcttctgtccccatcttcctgccgatagctatcccctgtatgatgttggatgctcctcacatgctgagtttccagccttttctgaaactcattagctggggagagggcagggaggcttcctgggccttccaacctccttccccacctccttcccaaaccctcttgggaactcctcagggacaactactgctgagtttgggtgcacccaaagatggaggccaagtagcaatggggccggcctcacagagagcgccgtgtgtgtgtgtgtgtgtgtgtgtgtgtgtgtgtccgccacacaacgcgctgtgtgtgtgtgtgtgtgtctcacacacacagcgcgcagtgtgtgtgtgtgtgtgtgtgtgtatgtgtgtgtgtgtgtgaccctgtattgtttgataggatccattcagtttccccaagtacctgttttcattcccatttttcccattgtttaaaaccatcacttttttgtctttgggaaaccacaggaacaatttctctggagacaaggctgtgtctctctcctggtcatttttgttccagcctcttcagactgtgcatcttttcagcaggaactccctctcttctcggtagctttgaatcttaagcttctacgggagagtggtagaactggatcatttcataatcccatttagttgtgcttttcttcatatacttcataccccaggaccccttccccagcagcagagaccctggagcacaggagagtagggaggaggggttctgggtccatcactgccttacatgtgactatgtccaagttaagcccccaacacgagaggaaagctgctgactcccagctatagccatgggcacttggccccctgcttttcctgctcagcagagcccctcccttcagagattacgggtacttgcactggggaggtggctgctggctggcccaagcagagagctgaggcatccaagaaatgttccattggggggtgggggtgccaggtgaggtggagcattccttgtattctggcagcactgaagagccactgaagggggtaggggcagtgtaggtcctggggcagcccctttattcctttatgccccttctccctcatagcctatttctaaagtcgccttttctgtcagataaacctcaaaacttttaattttatttgagatttttttttgcttttaagaggtggattgaagaatatttgaattgactttatattatgcataaatatttatattttatctaaataactgcgctgtaacaaactttgtgttagacagttgaaactgttagagttgggggctctgctttttccccctggcaattttcccttggtataagatgtgctagattaatttcattgtgaggtggatgggggagtgaaattgtgaggtggatgggggagtgaaatctccatggttcctgctttgtgttcctctcccagctccatctctttccctagggaccaggcactcatatggcggggtggggtcctagcctcagtttgaagaagtgggggctggagcggggttgggggtggtagggatagggcatgatcaaaggggccatttcttgcttttctttcctcatcttcactgcccccttgagctaggtggattttctcttcatgacaagagtatttggtagggaaagcaggtttaaaataaaaagacaacccaccccctgcccttttgcttccctcccatcagtctggttgacaggaagaaaccacaccatcaacaccaacaagtttctgtgttccttttacagcaaaagggactttttatataaccaaatgtggtgttttagtgactttttgataatgtacagttttttgtgaatttaaatttatttctttctatatttttaggaccaatttcatttttaataaggttaaaaagaaaaaaaaagtctagcgaaaaaactcctgtttttgccatgtgatgttccacaagtgcagctgtagaaaagtgcttgtcagttgttgaataaaaaaaccacatttgatagagattcaaaagactctgtgtattcatcttcccttctacacacctgagggggagacggcgttgggataggtatgactggcttaagagaccacaggcaagggaacaacaggggctcctgttccataccctctgtgtgggatggaaagggtcattagtgctcccgcctaaatgtctggctgagttgctggaagcaaaggggggattcagtgcatccaggtcctgccttgtgagatgtggccccagcttcctaagctgccacctctgtgttcctgtcatagcaaatatgggaccatcaccagcttaccacttcccactcacggataagacaccaagacgtagac

SEQ ID NO: 22443 - DNA, 7585 bp, Homo Sapiens
ggtctcgatctcctgaccttgtgatccacctcctcggcctcccaaagtgctgggattacaggcatgagccacggcacccagcctcatttgctgttaaactcatttattgagtcacctttttcttcctcacactttttagtcttagaatttttgtgtgtttttatttaccctaacctgtcaatttcatagtttccactttcttgttgaagtttccaaacttgacctcatgcctttgaatatactaattctattgctttgacacatttttttcccgaaaaaggtgtaaatgggtcaataaatggaagtaatacatcatctgtaattggtatcaacacatctgtactatccactactgcttcaagttccatgggacaaactaaaagtacaagctcaggtggaggaaatcgaaaatgtaatcaggaacaaagcaaaaaccagcctttggatgctagagttgacaaaatcaaagataagaaaccaaggaagaaagcaatggaaagttctagcaacagtgatagtgattcaggcacatcatcagacacctcaagtgaaggcattagtagcagtgattcagatgatctagaagaagatgaagaagaagaagatcaaagtattgaagaaagtgaagatgatgattctgattcagagagtgaagcacaacataaaagtaacaaccaggtgctattacatggtatttcagacccaaaagcagatggacagaaagcaactgaaaaagcccaggaaaaaagaatacaccagccattacctcttgcgtttgaatcccagactcactcattccaatcccagcagaagcagcctcaggttttgtcacagcagcttccatttattttccaaagctctcaggcaaaggaggaatctgtgaacaaacacaccagtgtaatacagtctacgggattggtgtccaatgtgaaacctttatctttggtaaatcaagccaaaaaggaaacttacatgaaactcatagttccttctcctgatgttcttaaagcagggaataaaaatacctctgaagaatctagtttattgaccagtgaattgagatccaaacgggaacaatataaacaggcattcccatcacagttaaagaaacaagagtcatcgaagagcctgaagaaggttattgcagctttgtcaaatccaaaagcaacctctagttcaccagcacatccaaaacaaacattagaaaacaaccacccaaatccattcttgacaaatgcacttttaggtaatcaccaaccaaatggagttattcaaagtgtcattcaagaagctcctctagcacttactaccaaaactaaaatgcagagcaagattaatgaaaacattgctgctgcaagtagcacccctttttcctcacctgtaaatctgagtacaagtgggagaagaacccctggcaatcagacacctgtaatgccttctgcctctcccatcctgcatagtcaagggaaggaaaaagcagttagcaataatgtaaacccagtaaaaacacagcatcactcccatcctgcaaaatctttagtggaacaattcagaggaacagattcagacattcccagtagtaaagattctgaagattcaaatgaggatgaagaggaagatgatgaagaagaagatgaggaagatgatgaagatgatgaatctgatgacagccaatcagaatcagatagtaattcagaatcagatacagaaggatcagaagaagaagatgatgatgataaagaccaagatgaatcagatagtgatactgaaggagagaaaacttcaatgaaactgaataaaacaacttcctctgtcaaaagcccttccatgagtctcacaggtcactcaacacctcgtaacctccacatagcaaaagccccaggctctgctcctgctgccttatgttctgaatcccagtcacctgcttttcttggtacatcttcttccacacttacttcaagcccacactctggcacttccaaaagaagaagagtaacagatgaacgtgaactgcgtattccattggaatatggctggcagagagagacaagaataagaaactttggagggcgccttcaaggagaagtagcatattatgctccatgtggaaagaaacttaggcagtaccctgaagtaataaagtatctcagcagaaatggaataatggatatctcaagggacaatttcagcttcagtgcaaaaataagagtgggtgacttctatgaagccagagatggaccgcaggaaatgcagtggtgtcttttgaaagaagaggatgtcattcctcgtatcagggcaatggaaggtcgtagaggaagaccaccaaatccagatagacaacgagcaagagaggaatccaggatgagacgtcggaaaggtcgacctccaaatgttggcaatgctgaattcctagataacgcagatgcaaagttgctaagaaaactgcaagctcaagaaatagccaggcaagcagcacaaataaagcttttgagaaaacttcaaaagcaggaacaggctcgggttgctaaagaagccaaaaaacaacaagcaataatggctgctgaggagaagcggaagcaaaaagaacagataaagattatgaaacagcaggaaaaaattaagagaatacagcaaatcagaatggaaaaagaacttcgagctcagcaaattctagaggctaaaaagaaaaagaaggaagaagcggcaaatgccaaattattggaggccgagaaacgaataaaggaaaaagaaatgagaagacaacaagctgttcttctgaaacatcaggaacgagagcgaaggcgacaacacatgatgcttatgaaagctatggaagctcgtaaaaaagcagaagaaaaagagcggttgaaacaagaaaaacgtgatgagaaaagattaaataaagagcgtaaactagagcagcgaagattagaattagaaatggcaaaggaactaaagaagcctaatgaagacatgtgcttagcagaccaaaagcctttgccagagttgcctcgtattccaggacttgttctctctggaagtacattttcagactgtctcatggtggtgcagttcttacgaaactttggtaaagttttgggctttgatgtgaatattgatgttccaaacctgagtgttcttcaagagggattgctaaatataggggacagcatgggtgaagtacaagacttgcttgtgaggctcctctcagctgctgtatgtgatccaggtctaataacaggatacaaggctaaaacagctcttggagaacatttgctgaatgttggtgtgaatcgagacaatgtttccgagattttacagatatttatggaagcccactgtggacaaactgagcttactgaaagtctgaagaccaaagcttttcaggctcacactccagcacagaaagcttcagtcctggctttcctgatcaatgaactggcatgcagcaagagtgtggtcagtgaaatcgacaagaacattgattatatgtcaaacttgaggagagataaatgggtggtagaaggtaaactccgcaagctcagaatcattcatgctaagaaaacaggcaaaagagacacttcaggtggcattgatctgggagaagagcagcatcccttgggcacacccactccaggacgcaagcgaagaaggaagggaggagacagtgattatgacgatgatgatgacgatgacagtgatgaccaaggggatgaagatgatgaggatgaagaagataaggaagaccaaaaaggaaaaaagactgatatctgtgaagatgaggatgaaggtgaccaagcagcaagtgttgaagagctggaaaaacagattgaaaaactgagtaaacaacagagtcagtacagaaggaagctctttgatgcgtctcactcattgcgttcagtgatgtttggcccagatcgttacagacgccggtactggattcttccccgatgtggggggatttttgtagaaggcatggagagtggtgaaggactagaagaaattgcaaaagaaagagaaaaactgaaaaaggcagaaagtgtccagatcaaagaagaaatgtttgagacttctggggacagtttaaattgttcaaatacagatcactgtgaacaaaaggaagatcttaaagaaaaagataacacaaatctattccttcagaaacctggctctttttccaaattaagcaagcttttggaagtagctaagatgcctcctgagtcagaggttatgacccccaaaccaaatgctggtgcaaatgggtgcacgttgtcttatcagaacagtggaaaacattcactgggcagcgttcagtcaacagcaacgcaaagcaatgtggaaaaggcagactctaataatctgtttaatactggttcaagtggtccagggaagttctacagtcctctccccaatgaccagttactaaaaacgctgactgaaaagaatagacaatggtttagtcttttgccacgaacaccctgtgatgacacttcacttactcatgccgatatgtcaactgcttctttggtgactcctcagtctcagccaccatctaagtcaccttcacctaccccagctcctcttggatcttctgctcagaatcctgttggcttaaatccatttgctttatcacctcttcaggtgaaaggtggagtatctatgatgggacttcagttttgtggatggcccactggtgtggttacttctaatattccatttacattatctgtacctagtctaggatcggggttagggttatcagaaggaaatggtaattcattcttgacttccaatgttgcttcaagtaaaagtgaatctccagtaccacagaatgaaaaggccacttcagctcaacctgcagctgttgaagtagcaaaaccagtagattttcctagtccaaaacctattccagaagaaatgcagtttggttggtggagaattattgacccagaggacctaaaagctttgctcaaagtgctgcatctcagaggaataagagaaaaggcattacaaaaacaaattcagaaacatttggattatattactcaagcctgcctcaagaataaggatgttgctattattgaactgaatgaaaatgaagaaaaccaagtaactcgagatattgtggagaactggtcagtagaagaacaagcaatggaaatggatttgagtgtccttcaacaggtagaagatctagaaaggagagttgcatccgcaagtttgcaagtgaagggttggatgtgtccagagcctgcatcagaaagggaggacttggtatattttgaacataaatcatttactaaattgtgcaaggagcatgatggagaatttactggcgaagacgaaagcagtgcacatgcactagaacggaagagtgacaaccccctagatatagctgttaccaggctggctgatttggagcggaacattgaaagaagaattgaggaagatattgctccagggctcagggtgtggagaagggcattatcagaagctcgcagtgctgcacaggtagctctgtgcattcagcaattacagaaatcaatagcatgggaaaaatcaattatgaaagtttactgccaaatctgtcgaaagggagataatgaagaactgcttcttctttgtgatggctgtgacaaaggctgtcatacctactgccatagacccaagattacaacaatcccagatggagactggttttgtccagcttgcattgctaaggcaagtggtcaaactctaaaaatcaaaaaacttcatgtcaaaggaaaaaagactaatgagtctaagaaaggcaagaaggtaactttaacaggagatactgaagatgaagactctgcatctacaagtagttcactaaaaagaggaaacaaagacctccagaaaagaaaaatggaggaaaacacttctattaacttgtcaaaacaagaaagttttacttcagttaagaaacctaaaagagatgactccaaggacctagctctttgcagtatgattctgactgaaatggaaactcatgaggatgcatggccttttctacttcctgtaaacttgaaacttgttcctggttataagaaagttattaagaagcctatggatttttccacaattagagagaaactaagtagtggacagtatccaaaccttgaaacctttgctctagatgtcaggcttgtttttgacaactgtgaaacatttaatgaagatgattctgatataggcagagctggccacaatatgaggaagtattttgaaaaaaagtggacagatactttcaaagtgagctgaagttataataatctctttatttttttccttctaaacaaggacaaatgagaccagcaatgtgaactgtatttacataaacgtgcaaggcacatacataatgactttctttttccttaagtataaaaaaaaagtatcagaagaatgataccatttttaaaggcttcattcctacaacaaccaaggccctcggttattggtttgtgtgatttatcagctaatttaggtagaacagggaagcacacccaaagaattttcaaaggaaagggtgttatagtgcaatagcaattaaaatatatcaaatcgcactgaatactcaacaccagagctctaatgtgggaaatggttctcctttccctctcaataaatatctatttttcatttttttactttgtagtttattttttagtgaatgtatttaattttatgaattatttatgattaaaccacatccagaatcttcgttttctgtgaaaaggaagaactagaaaattgctttaaatcttgaaaatacaaggaatgttttaaaatataaaacaaagccaagttaaactgtttacactgatgtgctataaaagcaccaaaaagaaactttactgtagagttacaagtacatttatatatatatgttgctgcatcacttgtgtagttaaattgtatttcaaaacagtgaaaaaattgacatgtatatactgttcattcttgtttatattaagtcttgttttaaatatgtattatgtgtatatattgtttgcagacattattgttcatgccttagaggattgtagcattttattttcgtctgaaggtaatgatagctatacagtctgtacagtaattatcctctaccaacactgtggcgtctccttaatcttggtagtgcctgcctttgaaacagggtgtaggggatattagttttccatttttctattttgttatataattttaagccaccagggcctaaattaaagtataatcatttgtatccatgtggaataaaattgtgacaatttcctacgcacacagtattttttcatagaaacatttccctcccatttgccttgcctcagaaataaatttaaaagacgtttgtaaccactgtgttttatctactgtgtgttgtggtggcctgttggaggcaaatagatcagattttttttgtacctacgtaagagtacttgaagttttatttaaaataaaatgttgtggaaaaggtagcattctttttttaggagtgttatttttcactatgtgtggcacggatacaataaaagacttttacaaactaaaaaaaaaaaaaaaa

SEQ ID NO: 22444 - DNA, 6678 bp, Homo Sapiens
gagcggtccatggacccgcggggcccggcgccccagactctgcgccgtcgggacggagcccaagatgtcggcctaggccggggcgcgacgacgcggacggggcggcgaggaggcgccgctgctgccggggctcgcagccgccgagcccccgagggcgcgccctgacggactggccgagccggcggtgagaggccggcgcgtcgggagcgggccgcgcggcaccatgtcggccaaggtgcggctcaagaagctggagcagctgctcctggacgggccctggcgcaacgagagcgccctgagcgtggaaacgctgctcgacgtgctcgtctgcctgtacaccgagtgcagccactcggccctgcgccgcgacaagtacgtggccgagttcctcgagtgggctaaaccatttacacagctggtgaaagaaatgcagcttcatcgagaagactttgaaataattaaagtaattggaagaggtgcttttggtgaggttgctgttgtcaaaatgaagaatactgaacgaatttatgcaatgaaaatcctcaacaagtgggagatgctgaaaagagcagagaccgcgtgcttccgagaggagcgcgatgtgctggtgaacggcgactgccagtggatcaccgcgctgcactacgcctttcaggacgagaaccacctgtatttagtcatggattactatgtgggtggtgatttactgaccctgctcagcaaatttgaagacaagcttccggaagatatggcgaggttctacattggtgaaatggtgctggccattgactccatccatcagcttcattacgtgcacagagacattaaacctgacaatgtccttttggacgtgaatggtcatatccgcctggctgactttggatcatgtttgaagatgaatgatgatggcactgtgcagtcctccgtggccgtgggcacacctgactacatctcgccggagatcctgcaggcgatggaggacggcatgggcaaatacgggcctgagtgtgactggtggtctctgggtgtctgcatgtatgagatgctctatggagaaacgccgttttatgcggagtcactcgtggagacctatgggaagatcatgaaccatgaagagcgattccagttcccatcccatgtcacggatgtatctgaagaagcgaaggacctcatccagagactgatctgcagtagagaacgccggctggggcagaatggaatagaggatttcaaaaagcatgcgttttttgaaggtctaaattgggaaaatatacgaaacctagaagcaccttatattcctgatgtgagcagtccctctgacacatccaacttcgacgtggatgacgacgtgctgagaaacacggaaatattacctcctggttctcacacaggcttttctggattacatttgccattcattggttttacattcacaacggaaagctgtttttctgatcgaggctctctgaagagcataatgcagtccaacacattaaccaaagatgaggatgtgcagcgggacctggagcacagcctgcagatggaagcttacgagaggaggattcggaggctggaacaggagaagctggagctgagcaggaagctgcaagagtccacccagaccgtgcagtccctccacggctcatctcgggccctcagcaattcaaaccgagataaagaaatcaaaaagctaaatgaagaaatcgaacgcttgaagaataaaatagcagattcaaacaggctcgagcgacagcttgaggacacagtggcgcttcgccaagagcgtgaggactccacgcagcggctgcgggggctggagaagcagcaccgcgtggtccggcaggagaaggaggagctgcacaagcaactggttgaagcctcagagcggttgaaatcccaggccaaggaactcaaagatgcccatcagcagcgaaagctggccctgcaggagttctcggagctgaacgagcgcatggcagagctccgtgcccagaagcagaaggtgtcccggcagctgcgagacaaggaggaggagatggaggtggccacgcagaaggtggacgccatgcggcaggaaatgcggagagctgagaagctcaggaaagagctggaagctcagcttgatgatgctgttgctgaggcctccaaggagcgcaagcttcgtgagcacagcgagaacttctgcaagcaaatggaaagcgagctggaggccctcaaggtgaagcaaggaggccggggagcgggtgccaccttagagcaccagcaagagatttccaaaatcaaatccgagctggagaagaaagtcttattttatgaagaggaattggtcagacgtgaggcctcccatgtgctagaagtgaaaaatgtgaagaaggaggtgcatgattcagaaagccaccagctggccctgcagaaagaaatcttgatgttaaaagataagttagaaaagtcaaagcgagaacggcataacgagatggaggaggcagtaggtacaataaaagataaatacgaacgagaaagagcgatgctgtttgatgaaaacaagaagctaactgctgaaaatgaaaagctctgttcctttgtggataaactcacagctcaaaatagacagctggaggatgagctgcaggatctggcagccaagaaggagtcagtggcccactgggaagctcagattgcggaaatcattcagtgggtcagtgacgagaaagatgcccggggttaccttcaagctcttgcttccaagatgaccgaagagctcgaggctttgaggagttctagtctggggtcaagaacactggacccgctgtggaaggtgcgccgcagccagaagctggacatgtccgcgcggctggagctgcagtcggccctggaggcggagatccgggccaagcagcttgtccaggaggagctcaggaaggtcaaggacgccaacctcaccttggaaagcaaactaaaggattccgaagccaaaaacagagaattattagaagaaatggaaattttgaagaaaaagatggaagaaaaattcagagcagatactgggctcaaacttccagattttcaggattccatttttgagtatttcaacactgctcctcttgcacatgacctgacatttagaaccagctcagctagtgagcaagaaacacaagctccgaagccagaagcgtccccgtcgatgtctgtggctgcatcagagcagcaggaggacatggctcggcccccgcagaggccatccgctgtgccgttgcccaccacgcaggccctggctctggctggaccgaagccaaaagctcaccagttcagcatcaagtccttctccagccctactcagtgcagccactgcacctccctgatggttgggctgatccggcagggctacgcctgcgaggtgtgttcctttgcttgccacgtgtcctgcaaagacggtgccccccaggtgtgcccaatacctcccgagcagtccaagaggcctctgggcgtggacgtgcagcgaggcatcggaacagcctacaaaggccatgtcaaggtcccaaagcccacgggggtgaagaagggatggcagcgcgcatatgcagtcgtctgtgactgcaagctcttcctgtatgatctgcctgaaggaaaatccacccagcctggtgtcattgcgagccaagtcttggatctcagagatgacgagttttccgtgagctcagtcctggcctcagatgtcattcatgctacacgccgagatattccatgtatattcagggtgacggcctctctcttaggtgcaccttctaagaccagctcgctgctcattctgacagaaaatgagaatgaaaagaagaagtgggttgggattctagaaggactccagtccatccttcataaaaaccggctgaggaatcaggtcgtgcatgttcccttggaagcctacgacagctcgctgcctctcatcaaggccatcctgacagctgccatcgtggatgcagacaggattgcagtcggcctagaagaagggctctatgtcatagaggtcacccgagatgtgatcgtccgtgccgctgactgtaagaaggtacaccagatcgagcttgctcccagggagaagatcgtaatcctcctctgtggccggaaccaccatgtgcacctctatccgtggtcgtcccttgatggagcggaaggcagctttgacatcaagcttccggaaaccaaaggctgccagctcatggccacggccacactcaagaggaactctggcacctgcctgtttgtggccgtgaaacggctgatcctttgctatgagatccagagaacgaagccattccacagaaagttcaatgagattgtggctcccggcagcgtgcagtgcctggcggtgctcagggacaggctctgtgtgggctacccttctgggttctgcctgctgagcatccagggggacgggcagcctctaaacctggtaaatcccaatgacccctcgcttgcgttcctctcacaacagtcttttgatgccctttgtgctgtggagctcgaaagcgaggagtacctgctttgcttcagccacatgggactgtacgtggacccgcaaggccggagggcacgcgcgcaggagctcatgtggcctgcggctcctgtcgcctgtagttgcagccccacccacgtcacggtgtacagcgagtatggcgtggacgtctttgatgtgcgcaccatggagtgggtgcagaccatcggcctgcggaggataaggcccctgaactctgaaggcaccctcaacctcctcaactgcgagcctccacgcttgatctacttcaagagcaagttctcgggagcggttctcaacgtgccggacacctccgacaacagcaagaagcagatgctgcgcaccaggagcaaaaggcggttcgtcttcaaggtcccagaggaagagagactgcagcagaggcgagagatgcttagagacccagaattgagatccaaaatgatatccaacccaaccaacttcaaccacgtggcccacatgggcccaggcgacggcatgcaggtgctcatggacctgcctctgagtgctgtgcccccctcccaggaggaaaggccgggccccgctcccaccaacctggctcgccagcctccatccaggaacaagccctacatctcgtggccctcatcaggtggatcggagcctagcgtgactgtgcctctgagaagtatgtctgatccagaccaggactttgacaaagagcctgattcggactccaccaaacactcaactccatcgaatagctccaaccccagcggcccaccgagccccaactccccccacaggagccagctccccctcgaaggcctggagcagccggcctgtgacacctgaagccgccagctcgccacaggggccagggagctggagatggcctccagcgtcagtgccaagactgagcgggccctccagtgttgtccaaggaaatgtagaatcactttgtagatatggagatgaagaagacaaatctttattataatattgatcagttttatgccgcattgttcgtggcagtagaccacatctgttcgtctgcacagctgtgaggcgatgctgttccatctgcacatgaaggacccccatacagcctgtctcccacccctgacaacccgagagggcatatggggccctgccaacaccacttcctcagcagaaacccgtcatgacgcggctgcttcggaagcagacatctggggacacagcctcagtacccagtcttttccctagttcctgaaactttcctaggaccttaagagaatagtaggaggtcctatagcattcccagtgtcactagaattttgaagacaggaaagtggaggttagtctgtggcctttttttcatttagccattgcacagtcagctgcagaagtcctgctgaccacctagtcatggacaaaggcccaggaccagtgacaccctgcgtccctgtgtgcattaagttcattctgggtcgcagccatgaagtgtcaccagtatctactactgtgaagtcagctgtgctgttttccattcgcttccacggcttctgcctcctgccataaaaccagcgagtgtcgtggtgcaggcaggccctgtggcctgctgggctgagggaagtcagagccccagggcgccacgaagcagccactgggataccccaccccgccccgccctgcccgccccccccccaccagtcctgcccccgcatggagcccccgtgattagtagcccgtatgatcacgtagacccacccaacacactcctgcacactggccccggcccacggcacagcaatcccctgcgcgtggatttcacctcaccctttgtaccagatgttgagtgaccagctctgtggccctgtgtcgtcagaggcttgtgattaactgtggcggcagacacagcttgtccacagcttgggccaggcttcccctgtcctcccaccggtcggctgcttggcaaggctgttcaggacgtgcacttccccaagtcggcactgagtggcccagcaccgcctagccctgccaccccactgccctcctgggccttctgctggatgggcacctggggggttctggtttttacttttttaatgtaagtctcagtctttgtaattaattattgaattgtgagaacatttttgaacaatttacctgtcaataaagcagaagacggc

SEQ ID NO: 22445 - DNA, 6873 bp, Homo Sapiens
ccccaaccggcagcccatcggcatcgtgctcacggtgctgggagtggtggtcctggacttcagcgccgatgccaccgaggggcccatccgtgcctatctgctggacgtggtggacagcgaggagcaggacatggccctcaacatccacgccttctctgccggcctcggcggagccatcggctacgtgctgggtgggctggactggacccagaccttcctgggcagctggttccggacccagaaccaggtgctcttcttctttgccgccatcatcttcacggtgtccgtggccctgcacctgttcagcatcgacgaggagcagtacagcccgcagcaggagcgcagcgctgaggagcccggcgccctggatgggggcgagccgcacggcgtccctgccttcccagacgaggtacagtcggagcacgagctggccctggactacccggacgtggacatcatgcgcagcaaaagcgactcggcgttgcacgtgccggacaccgcgctggacctggagcccgagctgctgttcctgcacgacatcgagccctccatcttccacgacgcctcctaccccgccaccccccgcagcaccagccaggagctcgccaagaccaagctgccccgcctggccaccttcctcaaggaagccgccaaggaggacgagaccttgctggataatcacttgaatgaagctaaagtcccaaacggaagtggctcccccacaaaagacgccctcggcggctacaccagggtggacacgaagccctcggccacgtcgagctccatgcggcggcggcggcacgcgttccgcaggcaggcctccagcaccttctcctactacggcaagcttgggtcccactgctaccgctaccggcgcgccaacgccgtggtgctgatcaagccgtcgcgcagcatgagcgacctgtacgacatgcagaagcggcagcggcagcaccggcaccggaaccagagcggggccaccacctccagcggggacaccgagagtgaggagggggagggcgagaccacggtgcgcctgctgtggctctccatgctgaagatgcccagggagctgatgcggctgtgcctctgccacctcctcacctggttctctgtcatcgccgaggccgtgttctacaccgacttcatgggccaggtcatcttcgaaggcgaccccaaggccccctcgaactcgaccgcctggcaagcctacaacgccggggtcaagatgggctgctggggcctggtcatttatgccgccactggtgctatttgttcagccctgttacagaagtacttggacaactacgacctgagcgtcagggtgatctacgtgctggggacgctgggcttctctgtcggcacagccgtgatggccatgtttcccaacgtctacgtcgccatggtcaccatcagcaccatgggcatcgtctccatgagcatctcctactgcccgtacgccctgctgggccagtaccatgacatcaagcagtacatccaccacagccccgggaactccaagcgagggtttggcatagattgtgccatcctgtcctgccaagtgtacatctcgcagatcctggtggcctctgcccttgggggcgtggtcgacgccgtggggactgtccgcgtcatccccatggtggcctctgtgggctctttcctgggcttcctgacggccacattcctggtgatctatcccgacgtgtcagaggaggccaaggaggagcagaaaggcctgtcttccccgttggccggcgaaggcagggccggcgggaacagcgaaaagcccaccgtgctgaagctcacgcggaaggagggcctgcagggaccggtggagacagagtccgtggtctgagccgcactcccgtttacacacattccagcgggcgggtgggcgggcgggcgggcggcggggccaggccatgggcgggagcagagacaccgcggaaccctgcagatgctgtggccgacccggcagtgcgggccagagcccctccgcccccatagccacaattcagtagtcgtagggtaggtttgagctactaagcaaataccacactaaccactttttcgataattaaaagaatcatttgaaatattttttttaattgaaaaagatattttaatttcagctcttttattctgcaggtgtattattctgcatgtttttaaatgatataaaacatttatatagacaataagcaacttagaaaaaataagattttgcatttctaaaattataattgaaaacaaaatctgacattctctgctaagtcttatctgaatgcttcagataatggtagtgtagtcagtgactaaaatatttttatcaaatttcctctctgtagacgcctgcaggtattgacgtctgtcagatctcgtcacattggctggtgccgcagctgttggagagtatttttctttatgattattttagaaaaaaaaattttcttttccacaatgtggttctcttagaagaatgacgtatcttcttttcctcagcgagttggacacattgtgcccagggcagccctgtccttgggcagcgaccgcacaccaaagctgggaggaggctggtccggggggcctgggcagaagacagtgatttgcaggggtggctcccagacaccctgcccagggatgggctgggcaccacctgggggcggagcgtgagctccagacgagctcctgcgtgcgcgtgtgagtgtgtctgcgcccagccatgtgaccctgctcgtcccgtctgaaggactctcctaggaggccaggttgcccctccagacccctcccaacgtcagggggaaggaaacgttgactttcactgcactttgattcgtctctaaaccatttgctggggattcctgagagcagagctcccagcgggccctgcctcccaagtcccgccgcaaggctacctcgggtgtgtggatgtgcgagggcctcccccgcttgcgaaggggacatgcgtgctggaacctgtcggaactccatgccttcctcgcctgctcacctgctcgacgctggaatcgggacaggtgcaaagggacgcagacgtctgggacagctaaggcccgtgtcaccggagggctccgcacagtcgttctggtttcaacgaataagcaaaactcgggcaagtactgcagctatttggaaatgttttccaaaccacagtctctttagaactaagcctatttgaaacggtcggtgtaggcttactgagatcaggagacagggaggccccgcacatcacacagataagtcagacaattgtaattaatacttttgctgcctcaagttgttttttaaataaagtactttgaaatgcatgagaatcatgctgcaatatgatcattctagagcaaatatatatatacacgtatatatatttcaagatgaaactaaagcagtttttaaataaattacttgaattttctgtgtatttaaaggaacgactgtttaatgtacttgatgggcctctggtcttgccgtgtctcctgccgctggtggcactttgtagattgtgtgtttgtgtccgggtggcagttgggtacctgctcacgcacggtgtgtctgccaggccacggtgtcccaggatcgcagagggctgacttcaagacttcaagaacattttctggatgtgtggaaacttgagaatggccttgtgaatctcgtgcttggacagggcaagtccgactactgaaagtgctgccagctttgctgcgagccctccggccagcgggagccccgtgggctgggcactgtggcccttcttctctgggggacggcacccctggcttcctcacctcggccgggcgtccgtggcagctcactctatgcaacttgatcctctagcggctttaagactgtagatcccctctctgagacctggctgtacttgtcaggatctcgaggcgcagctcccgtcttagctggtttctccggcttctcgtcctgacgactataaaacagttggaggcaagaaagcagcggatgtggggtggcagtggcctgacccgaatcaagatccgacccaaaccacaccaaatgtgggttcatctgggggccaccccttgcctgaggcttcccaccctcatctgaaggcccaggggccggatccagggctcaccaaagccgattcctcgccagctgggagtgcagaagtctcagggcctggctgcgacttgatttttaggaggaagaggggcttcgcaacccccctctgaatagtgtgttaacccttgagatcccagcctcgactaatctgaagtaaggacaacaaaggccattcagtgccctccacatggccttgccacagtcactgtcagggtatgaatgtgccggaagccagtgccagccagggacaggcgtgactgttgtgtgctcctcggtgacaggagtcggtggctgcacactttgtagactcgtcaagctgtcagcacttcaggtgtttgcaagcaaagcccttcttagtgtgcaggtcagtgtgcagagcccaaatgaggggaccgcaggggctggggtccagggtcagtagagtcggtttctggagctgccttcctgggaggcaggtgtgggtgaccggggctctggcggtgcgtgtgggcccggcctggccacagcggggaccaggtcacgacatctttggcctcaacccctcccctgcactgagattatttccagattgcactcacttgaaaccgtccgtgtcgtcaccttgtgtcttaagggaagccgagaagaagggcagacgggcaggctgtcttgtctgcaaagcgccattgcgcccgcagcttgtgtgggtcaggctgcagctcgggtgtctgtggcttctaaccttgtacctcagacggatgcagtaacaaggcggggctggggacgccggtcagtgtcaaaggggaggtgctctggctgatagccttgcccgagagggacgaggaggccgtgcgggtgccccctggggaagctggccagccatccagtgctgaggacgcagctggagttgggctcgtggcacccttggggtgtgggctgtgcaggctggtggcctgggtgcctctgcacactgagtggagtgtcaggcagggtgtgtcggttggtcgagtcttgtgtaatgtgcgcagaccagttaccaaactaggataatgttggtctcatttgtggtggttttgttccctatacaagtcagctaagtaaagactcttttaacgagcttccccttaacacatggcagaagtttccaggtgcaggaatgcgagctggcgggaaggggcagaggccgtgagctctcagctgggccggcctgcctgtgtcccctttcctgggtctgtcggcagactggcatcatgacgttccctggtggctgaagagctagctttggagtgttgtttttctcactctcaggcaggggccttagctggaatcctccaacctgccactgaacacgtcagtgctgtgtgctgcctcttggacacctgcccttgaaagcctcaggcccctgggagaagcactctgtccagtcctgtccccgggggggaggcagggccactgagccctcctcagatggttagtggcttccaacagccatcaggagtgtttcttgaatgccccaggtgtggaggacttggtctgtgaccacctagaaccccagagctgaacaggaagccgtccctgcagcaacaagagggctggaagggggagctgcaggccaccctcggctctcccactgctggggcggtgatgttcgggtgacatgtttgaaaaatactcttaaagataccaactgttcccttatatggctaatggtttgtgcagccaccagcgatggcggcccctattagagaccaggtttgttaaaacaccaaatattgctgtccacactagacattaaccggcttcagaaaagatggacaccttttcccacgctgtttcgcttcttaactttggtccagctttagccaccacacagcgtgtgagggactgctgctgcggagtcagcctcgtttgtccctccgcctcccaccagcacgcgccgcttctgagagacaccagctccctgcctccaagcctggtgccacaggcctgtcgtgagggacccctgcttccgagagctcctgggggggttctgcccttcaccacctgggagaggtgtcagttcagttccgagttgaacaaggcccgtgcacacagcatgttgggggcccagcccaaagttcttgtcacctcctcatgcaaagccagccatcaccctccggccagagctcaaggtggccccttggccagcccctccttgggtcctccaggaggactgagcacccctcctagcggcatcccttgccctccacagtgctgccaggggcacgtcgctctgtgccgtggactgagaccatcccctggtgacagaatgacccgtttgttggaaatgcctcgttgccagagaaactccccaggcatctcggaacgaaactatttagttccattgtgaactggccacgggacagctttttatcaacttattaagttggagcactgtaatcgcgcttgctgagttagcagtggtggtaagcgtgtgttaaacacataatgttacgttttaggagagagaggtcgtaaggaagtgtcgtgtcgctcatgactctcttctattagttgggtaacagtggcctcatgtttgtgtctgtgtgtacacagagcccttaggttctgctctgtttctttgccaggtgaatgtttgtggcatgcgctgctgtccacgcccctctgtcctgcgcagggttcagctgtgcggcgccctgatttcctccatgcacacagaacctccttgtgtctgtttctctgttcctctgtggctgactcaataaacttttccctctg

SEQ ID NO: 22446 - DNA, 6518 bp, Homo Sapiens
cgcatcaacgagaagtctgtctggtgctgtggctggctcccctgcacaccgttgcgaatcgcggccactgcaggccatgggagctgtgtggacttcctcatccggaagggggccgaggtggatctggtggacgtaaaaggacagacggccctgtatgtggctgtggtgaacgggcacctagagagtacccagatccttctcgaagctggcgcggaccccaacggaagccggcaccatcgcagcacccctgtctaccacgcctctcgcgtgggccgggcagacatcctgaaggccctcatcaggtacggggctgatgttgacgtcaaccaccacctgactcctgatgtccagcctcgattctcccggcggctcacctccttggtggtctgccccttgtacatcagcgcagcctaccacaacctccagtgcttccggctgctcctcctggctggcgcgaaccctgacttcaactgcaatggtcctgtcaacacacagggattctacaggggctcccctgggtgcgtcatggatgctgttctgcgccacggctgtgaggcagccttcgtgagcctgctggtagaatttggagccaacctgaatctagtgaagtgggaatcgctgggcccagagtcgagaggaagaagaaaagtggaccctgaggccttgcaggtctttaaagaggccagaagtgttcccagaaccttgctgtgtctgtgccgtgtggctgtgagaagagctcttggcaaacaccggcttcatctgattccttcgctgcctctgccagaccccataaagaagtttctactccatgagtagactccaagtgctgcggttgattccagtgagggagaaagtgatctgcagggaggtggacaccgagccctgagtgctgtgctgctgctggtctcctgatggctgttgctgcagaagatgtcctcgtagactgtcattgctcctcaggtgcctgggccgctgaacagtccttgggtcattgtcagctgagaggcttatactaaagttattattgtttttcccaagttctctgttctggattttcagttgcatattaatgtaacgggccatggggtatgtacatgtaggggctgaggttggaggcttactaatttccctgtagggaagactcccagcacttctggaactgtgcttctctttatttttctacttctcaatttgatggttcgattaaagccttctagtatctcaatgaaaagggagtttcgtaagcaaaatagaggacagaaatgcagttcatgaacttgctggttggtttttcctgctcctggggtaacacatgcgcttgtcatacacgccccttccttgccccttcagtattctctctttgcgatggaggtctcatagtgagtgtcttcactcaagggtggtttcctggctgcacggcacctgttccaacacctactgtgcctctcatcaggtgtcacgatttttctgccacttcaccttagggagcttccagtgattgattttaggaggcccacaccaaactccccaggaaatgactgccttccttgggaccaaggaccgttccaacagcattcactgccagttctaataggcgaggaaaatgcccgaggcgctgtcttctgtcccccacacgtaccagaaagtgaaaaatgcagggagtcctctgggtggttatgagcctccaggcgcatgctgtccagtggacagaacatctggcggttggttgattgctctcttttgtcttggtcgctgcttctagaatctatgcaggggatagcagtgaggtcagaagtctttcccgggagagagatggcctgggttatcattgctgatagctttggctgcatgagttgggcttccccttacccagggctgcacagccaggtgtgagggtcaccggcaggtgggctggtggctgcagcctcagagccctcccaggttgctgctgtttccagtgaatcacatttcgtcatttgaagcccatgaggaccattgtgtggatccatggtgattctagacttcagatatatttaggaaggcgcagatttcaaatctgtgtttgattttctgtaataagagaaatccaatttgtaaaacttgaacaatgataccgttttatttacttagtagcatcactgtgtgtcttagcaggcaggcagtgtctggccattattgcgttctacagccagaggatagaattctatacccccaaccccttgtgtcacaaatgggctctgtgtgggtcaccccagctgacccgtgtatgtgcagatgcagttccgaagggaagaacagtcctcgggtgattcagaggggaaaatgcaatccgggaggtgtttcctcagctgaggtgacactgttagaagctgtgatggttgtgtaaatgtgggctgtgtgctgttcccgaggggagcttgggattgggtcctgctgaagccaggagggtcttcccaagataggagaggaaccgcaggtggtgagcggctggggagggccaggacagccggggctgggtgctgcaggggcttcagcccgggagagggggtgggcgtgttctttgtggtaccaaagtgggactaggacaaaaattgggctgtggctggggcaggagctatagggagttaaggaatgatgatagggaagttggagccaccaccgtggactgggccttgtcactggaggtcgtaggcagtggctcatcaccctggtagggctgataggggctttcagggaggctggttagctccctgcactctggctctttactggcttactgtttagctcctcccacctcgaggctcttcttcctgccaccctttgggctcagaggagggtggctttttttcgaggtgagccatgttgtagacacatgatacgctctgcgtctgctctactgagtactttctgcaggggcctgttaaggacgaggcctccccagccctgcccggtgcaggaggtggctcagttattgaaccttttgggaagcagcacctgggaatgctgcctcgtgggagtcccatgcgtgagtgtggtggtgtgaccttcaggctgcacagaggcaaggacccagatgtggcagcatgggcgtcatgctcctttgcacagcccagggcctgttttggagggaccaggtcactgcccctggtctctctaggaggagtggactgaatggatcgttgcagagaagactcacccagacctggccagggaatgatgtatctggggagagaatgagctggaggagggggcctctcatggcccttccctggcctgtggcccagcctggctggcctgcaggtgtctagggtctcagcttttcatttgcagaggacatgttcaacttcctctctgttcaagccagcctttgccaattttttcagaatccaaacaatttggaggtttggtatcttgtttcatagctgccaaatatgaatctgaaaacagggtgggtagctaaggtcattcctcctgggttttagtggcattgccttccttcactaaagctcccttttttttctgttggcaaggacaggttacagaataggaagagtagcactttccgcctaagcactttaggaaatcacctttctaagccctggggcgcccaagtcccatgggacagggaaacgtggtcctcagtgaggctgctgcctggctggcccggagtcctccctaggagaggggctcgatgggctgggggaaggagcctgaaggttgcccctggttgcatcccagaagcatctgactgtcaccactgccagtggctgtggaacagtcctgggccctgggccttggctgctgtcaacagatgggctgggctgggctgtggtggggtgggggacaacgttggtaactctgagaattcagctttggagtcccgggtgaggggttttagataaacccatcaatatcacccacattctgtgactctttgcatcactcgtgttatttatttatttatttatattctgccttgttccagaaaagtgtttaaggcaacaacgcttgttttttggtgttttcttttgacatttgaaaatttagtacattgttaaaatgtacttgttaaacaggtaattttaaagagaaggaacaattgtttttagtaagttttctttttcctttttcaatgaattgattcttcaaattaaaagttcttgagagaaggagaggaagatacagcagacataggactgagccaaggaagagtctgcctgagagagacgcttggcctgtgctttgctgccatccgtgcggccttggccacatccctattaacagaggcagctccacttcagacagggacaaggcttcctgctgtgcctttctggcagggttttgtggggtcacatgggaagcaatgtgttacgcaagcagtctccatgtgtgtgtaaactgctgtcctggtgacttgtccctcttcttagtggaaatgcatttgagatggtgacagggctggatgaacgtgtgaccctgggagatccgggctggactgtggaccccgatgggccagtgtccttgtggcccacagcatagcactggggacagagcgctctatgcaggtgaggcgtatgagaacagcatggtaaataattgatgaagtcacatttgttcaacttaaaggattgttctttattctgaagttattttcttccttatttggatgataaaatttccttttatgtaatgaaggtaaaagtagagggcaatatttttgctttttgaaatgctcttggttgcaaaacaaaatgttggttgctgtttgtcagccccagaatttcttcttaagttcgcctgtctctgaaatcccaaagtcacggaaccgcagtctagctgtggtgcatgtttacgtattggtgagaaattcctcttgggttcttgaacagcctgtacgctggcaggcagcactgcagcatttctgctgctcatggccaagaacgagtctggagatcgctgcgtgcggttttaggaagtgccaacacccgtggtgatgggcctctggccacccctggatccatgggacacactcacaggaagctgatgtggccttctcggtgaggactgcaccttaacctgggcactgggagcctgtggcccccctgtatgttggtgatgacactagtgtgggtcttctggctctggggctacagcttctgcctcctcacctggccgtcggtactcggcaagcaggcctggcctcccggggcctggatccctaccggctgggattggcctcctggaagtacctgtttgggccatgtgacctcctttctcacttatgcctcactcccctcctcccgctccaaacccgaacctctcagtgtggaatgaacgctccaaacccgaacctctcagtgtggaatgaaacagtttagatgtgtacatgatgcacgtgggtgggattcacatcccaggagaattccacggagaggaatgtgcagattttgaagtgtacagtgatgtgtggaataaatactagaaattctcagcagacagtgggatggagaagtgagtgggggcaggagggggatttctgttgccttgacatgtcgttgctcagtgcctggattgcaggcgagtctctcttttttatgttgctttgatttcaagatctcttagatatactaggtagtgtatgaatgtgcataaatccagtttgagaatggtgtttatgaagaagctgtttcgtgtgtacagttgctgctgtaatttagccagcagtgccctgccctgccctgcagtgtctgctcagctcccactgcttctctttgctgttgggcatgtgaggcatgacttggaggggggcctggtgcctggggacctgctgaagagaatgctcaccaccagctctctgtttccctttctgctttggtaatcaacacgtgtttgcctgcagtggccgggaccgtgactgtttctgcccttgtgcctagttaagagccttcaaaagcataatgaacacttttgatatgatattgtaactttagtaaatgctttacttccctctaattgcccccaaatgccttaattttgtggactgtttatttcaacaggtggaagtgttggtcgtgcgaaatcttggtattcgcatttcaagaagggagttcttttttctttcttctttctatggaacgtttcaagtgattggatagaaagaagggctctgaagcagttttcacctgctctgagggaacttggggctccagggacgtaccccaaatgttgcccaggttgaaactccctgacagcctgttctacgtagtggctcgtggtttccagtttgaagagagttgtgcccctaaaagtgtttgaaacctgtggctttcaagcaaggtaccgttgtccccacagtgttccgtggggtagggggtgatggagactgtgggcaagcctgttgtttttggccccctgttgttacatgggacctgttttgacggtgggagggtgagatgtgaagatgtgggatgaacctggaatgaacgaattaaataaagacatgcatccatctgtcagcg

SEQ ID NO: 22447 - DNA, 7384 bp, Homo Sapiens
ccccgcatcgggactcagcctacatctccagctcacctcttggctctcatcaggtttttgacttccggtccagtagttctgtaggctctcccactagacagacctatcagtccacctcacctgccctttctccaactcatcagaactcacattacaggcctagcccaccacacacttccccggctcatcagggaggatcttaccgtttcagcccccctcctgtgggaggacagggcaaagaatacccaagccctcccccttcccctctccggagaggccctcagtatcgggccagccctccagctgaaagtatgagtgtctatagatcccagtctggttcacccgtgcgctatcagcaggaaacaagcgtcagtcagcttcctggcagacccaaatctccattatccaaaatggcccagcggccctaccagatgcctcagctccctgtggcagttccccagcaagggctcaggctacagcctgccaaggcccagattgtgagaagtaaccagcccagcccagccgtccattcaagcaccgtcatccccacaggagcctatggccaagtagcccattcaatggccagtaaataccagtcttcacaaggagacataggagtcagccagagccggttggtttatcaagggtcaattgggggaatcgtaggggatggaaggccggtgcagcatgtccaagccagcctgagtgcaggcgccatctgtcagcatggaggattgaccaaagaggatcttccacagcgaccttcctcagcataccgaggtggcgtgagatacagccagacaccacagatcggacgcagccagtcagcatcctattacccagtctgtcactcaaaactagatctggagcgctcctccagccaactaggttcccctgatgtgtcgcatttaatcagaagacctatcagtgtcaaccctaacgaaatcaaaccgcacccgccaactcccaggccgttgctgcattcccaaagtgtaggccttcgcttctctccatctagcaatagtatctcctccacctccaacctaactccgaccttccggccatcttcttccatccagcaaatggagatcccactgaaacctgcatatgagaggtcatgtgacgagctgtcgccagtgtctccaactcaaggaggttaccccagtgagcccacccgatccaggaccacaccattcatggggatcatagataaaacagcacggactcagcagtacccccacctccaccagcagaatcggacctgggcagtgtcatctgtggacaccgtcctcagtcccacgtctccaggcaacctgcctcagcctgagtccttcagtccaccatcatccatcagcaacattgccttttataacaaaaccaacaatgcacagaatggccatttgctggaggacgattattacagcccccatgggatgctggctaacgggtctcgtggagacctcttggagcgagtcagccaggcctcctcctatcccgacgtgaaggtagctcggactctacctgtggctcaggcataccaggacaacctgtacaggcagctgtcccgagactctcggcaagggcagacatcccctatcaaaccaaagagaccgttcgtggagtctaatgtttaaaagacgttttgttggagtgagacccatatgttttcactgcacattttcaggcttggtttccacattcgaggtagttctctggcttaatttctcatgtagtttctgtgtggtgttcagaggtggcagcccacatgctgaaatcctttgcatgcagccgactgggaagcggcctcccgggagccaggacttcagtttctcttgtctgtgcccagccacatgctctctccctctcttcagatgccaacgaggagattttcgtgctgtgtgctttaacccagggagatcagacacactggtcagctttttccaggagacaatcgctttcactgatgttcttgttgtgtaattgtctttttccttttttaaaaaataaggtgttcttgttcgttttcttctagaaactttagaaagagtgcgatgcccctttgcctttgcatccttagccagtgtcacccacacagccagccgcagcgcattctcatgctgtggcccctccccagaccgccagcgccctgcagccaccaggtctgcagtgtgcattaggattattgctggtcttcctagggggtaaaaggatcagagagagaagaattaagtgctaaattggaagaaaaccccaatataattatgtaaaatgtcactacattgattttccaagaggcattgtaggaacatgtcaaaaacagccagccctttaaatattgcagtcagccaaggaaattagatgagaattgtggctattaagagaattcactgagagttattctctagatttttagccgacaattaaccactaaaagctgctgcttttccagggtgggggagggaatgaatacatagaaaaacaaaaaagattgttctggattctcagtgaaaggctataggaagtctgttctggagacatctactttttagatcctgatacatcactgagtgtcatactccactaaaaggaaactctaaccgaaggctggctggtgtgacaatcccgttagttggatcttcacctacagccagattttgttctagtggccctcttcctgtaaacccagatggtgtcatacagaaattgtttctttcagaagcagattggaatctcttgggaccatgagactgagtcccaatatttccacccagggtcatgcccgttgttgtctacttccattttgagatctatagtttgattatctattattacaggaactgtttcttttctttttctaggagtgtttatgagagtgtgatattttaaagtcagacgcagcaaaaactgtttcagggtgaagaaagacccctttcagccctgttttgcagccctgggtgggggcatgagatagacagcaagcttctgatcttgaagcttgtctagaagacacatcttctaggtctcgtggtcatttggtaggctgacctttgagtgagcgaggccactattgagtggatagcaagaacattggaaccaaagcctcggcacaggcctggcactggctgtacatcagctcttacaactaaacaactcaactaagcaactgaaacgaaacaaaggagcattcgttctctgttgttaggaatcattctgctctgttagggaagggctgcaggaagggcagtttcctgaataaaaatctggctgcgaccagtcccatgtgtctggtaagtaagtaagtaagtaagtgccctttgaagggatcattaagacacagggagcatgaacctgagatcagaagcatttctttactaatttagattctgcgaaatagacggacctctccacccccaaacctaaaacaggccaggacttgtctctgtgctgaaagcaaatagcaagactaactcaagccccagcctctttccacactccctgatacctaaggactgctttctcagctagaccagggtgggcatcagcgacgccttctcagctagaccagggtaggcatcagcgtcctctctccatctctatacccctctctctcacatcaggaagatgaaatgtgtagctctagcggcaacctctagccaggagcccagtggcctctcagattgctttttggccaggtctcagcactgctggcatctttacatcttactccttaaaaccgcctctcgctgaggagccactgcattttgaagaatttctcagtgtctgtcaggaaagtgctcctgctcatttggaacgccacacaccacccgcactcacctgtccaggcgaatgagcaggtcctgtagctttacaaatatgccgctgatgccgcttctccccagggtctctcagttttccaggacaaaaagatttagggcctataccctatgggcaaaacacctaaaatgtcaacagtcaaaatgccattctttttggccatcataagagggagtaggtatcactgctgcatgccagttgtttttgactagaatatgccaaccagagcttgttggggcaggagacgtttttccttacaagcagactgcctgtgccctgtgccctgtttgctacttcactgccatggaatgatccgagtactgtatttcagagctgccccttccccagcagcaaacactcgctgagtccatgtctggcttcaggtgggaggaaatgtttcagatgaaacttactcaattcataccaccctgaaatggaggacagaggtgacaaacttcagtttaataggtttctcaccaagttgtatgttccattggcccaggattcttgcactaatgggtttctatcacatcatgtctataaatgggtgcactttactgtttgaatttgtaactgaagtactggatatttaagtgtgagtaatgtcttcattagaaaatagcagaaccgctcttgtcttttagtgtatttttcaagaaaaaaggaaaggaaagacatcaagcagtggatcacaacatttatagcacaagaaataacttgtatataagcatcaaaaagattaagaattttttaatatgaaaaatatttgcagtgattttaaagtgcttttccagcaatgttcttagggactcctgagacacggttactttatctactggatcagtaaggcacacaattaacaattaacaattaatgtttatttacaaagtaaagggaaaacctgtgtaacatgagaatttggcatgacaaaatggagaccattttgtatctgctgttgtatcttgtccgggttgcagacgtgcactattaaagtcccaagttaatagagcacaaacccttctcgctcctcccccatgtgcccctctttttagatgtgtataacttaaactcgatggctcaggaaaattccactaattagaatcatgtacagtaccccaggtcgttgtccagatatacaagtttgctaatgtagttaagcctggattattaaacacttttcctaaattattgtaaacagaacagcttagagaaaggtattctcagtccttaatattgtatagtagtttatgagcccctctctaaatattggtatttttatattccagagatgtacccaatagaaaaaattaaaaattaatcagtatctaatttaatatccataagtatttttccttagattttagtcacgtacagtgggctatgtggatgtcacttgtgcttcaccatagtttaccactaggtgtcactgtggctctgcactgcgcttgttttgtagcaaagaacagcggcatcccctcgggagagaggagctgcttccagggcaacaggcaagcgggctcagaggttcaggagaaggcaacagaggcctggaaggggtcttcgtgcatctgtgccagttgtgcaagacgaactctttgaacactacatgctttggacttcagccaggcagaggctggaagaaggttgaccagagctcccttgctctggtagagggatgggtacatggagaagccccttcttccccatgagcctccctcctgtcagttcctctcagcctccagcttttataactccagaagcgtcacagttgggtggtttgattcagagagagttatttttctactgcagaaatgccttggacaaaaccagtgctcactgaatctttgccacaaaatggaataggctatcccagggggcaagaggtgcccgcccctgtgcccagcctcctcttgatgctcccagtgcccagcagcctcgcacaccctgcctgtctgttcctgggctgcccatttctcaagaaaccgacctgcaaaggcagccggctgctgcctccacaccgagggctgtgcggtcctgctgctcgctcactgggaggtgcagctctttctcctcttcctctaggaattccagaccgaccatctaccatgactaacaacaatgaacaaagggcttaggggcaagagctacctgcaaagacgtgtcatggaacccttcaccatgcaatgccttgaactcagctctggctgctcccaagaaaaggtggctggctgggggcctggacacaagcacaatggggctggtggagccactgtgcagagctacttgaataatcactgggttttcatcaactccttttgtcatacagaccactcaagggctgaagtgttggtaaccttcatttcggtgtccaaagcctcacagcaggtgagccaccctgagatgcttgtggccacatggtggccacagtcagagctttgaaagtcagtaccaaatgaacgcataattggacaccaaaaatcaagtgttactttcatgtttcctcaccccatcatctcattgcctcctgctgactctgataccgacgctgagctgacttgccaggctgccgctggacgcgtagagatcaggccagcgccgcgctcatttttccaggtagacctactctgtggaacggaagtgccctagctgctttgtttttgtagcacttgctggctgaatttttcttttgctaatcgctaaccagaaagtctggttagagggggctcaactcaatccctttggtccccagcgccagacaagagttaattctggaaaattcagtacttgaatgtacctgccttattgcataccaatttactggggggaaaaaaaaagttaagagatgccggctccagatctccacttcattcacaggtgattttggaaatcctgtaagttacacttcctgttctggttttgttttgttttttgtttcctttggctgattcctgctgagtgaggccagttcctcatcaggctcagggcaggtgccttttcaggcgtggcctcctttccatctagcacagcatctttgtctctgttctgtctcctccaaatccaagatgattttaattagtacagacatgtacagtctacaattaaagagtgatttgtactaatatgattttgattcttcctcctctttgctgtcctttcaagacacttgctggaaaaagctttaatgcacttagttttcctttaggttttctatgactcagatgtaaaggactttctctgtacagtatattatccaatgcatgtttgttctctctcctgatatattgaacaccacacagttgtgaagccgtgcagtggggatgccccacaccccacagaggcatctacccctgtgtataaggaaagacattttcctttgctgtacttgcttgagcagttttattgtctgtacatgtgagctgtgtgagatagatgtgaaaagttcaaatgaatgcattttcctgccccatgtatacagattgtcatctgtacaaggaactgtatgtatgaaagcaaatgtacttatttataaatggctaacacttggaaaacc

SEQ ID NO: 22448 - DNA, 6256 bp, Homo Sapiens
cccggcggtgagagtcggcccaaaaagcggcggccgttggaggtggctgcggcagctgatgtggcctcatggatgagctggtacacgacttagcctcagccttggagcagacatctgagcagaataagcttggtgaactgtgggaggagatggcgctgagcccccgacagcagaggcggcagcttcggaaacgccgaggtcggaagcgtcgttctgacttcactcacctggcagagcatacctgctgctacagcgaggcctctgagtcaagtctggatgaggccactaaggactgtcgagaagtggctccggtgaccaattttagtgactctgatgacacaatggtagccaaacgacacccagctctcaatgccattgtcaagagtaagcaacattcttggcatgaatctgactcctttactgaaaatgcaccttgtcgaccactcaggcgcaggcggaaggtgaagcgagtgacatcagaggtggctgctagccttcagcagaagctgaaggtgtcagattggagctatgagagaggctgcaggttcaagtctgctaagaagcagcgtctgtcccgctggaaggagaatactccctggacctcatcaggccacggattgtgtgaatcagcagaaaataggactttcctaagcaaaacaggaaggaaagaaaggatggagtgtgaaacagatgaacaaaaacagggctctgatgagaacatgtcagaatgtgaaaccagcagtgtgtgtagcagcagtgacactgggctctttaccaatgatgaagggcgacaaggtgatgacgaacagagtgattggttctatgaaggagaatgtgtcccaggattcactgtccctaatcttctgcccaagtgggctcctgatcattgttctgaagtagaaagaatggattctggattggataaattttcagattccacattccttttaccttctcggccagctcaaagagggtaccatactcgcttgaatcgtctacctggagctgcagctcgatgcctcagaaaggggcgaagaaggctggttgggaaggtgatacctctcacagttagcttggctcagtggggagataatattccctatgggagttgtgtatcctattaacaatcagaggtgctacagaactccctgaagttaatggagccaactggaatgtgttgggagtttacaagagtgaacattatgtagaatgtgaatggatatacaaataaaagatgaaacgtaattcatatagaagtactgacaaaaaaaaaaacactgtcattacagtgtctattgcctgtaaacctacaagcctgagctgtgtcttctgtaacttttgattaatgttatgttattattgtgtaagttaaaatactcttggcttctttatgactcctcttgaattcatgaatgcatctttgttctttcctaattttggtctttcatcctagaattcattaaaaaaaaaaaacaaaactgttactgagtttcaagagcccctccttggccatgagggagaactatctgctgtttattcagttctgcctttgccagggatggtactagggactcagctcatttaatccttccagcaacctacaagggcaagcaccttcagcagatgaggaaaacttaggttcgaagaagttaaggaatgtctgatgttacccagataggaatggtagaatagagatttgaacccaggtctacttttatctttttacatttttattgaattttattttttactctactttgagattgaggaataaattaagacagggctcatcctcagtcagagaagatggtggtgggcaaagaataaggaagggagaggcattgagagcattaatttgtttgttcacttggtaagcatttagaatgcctgctaggtggcacaatatgtgccacagtctggcttcccttaaggggatactgttttatagtctgaccagggaacagttttctgaagttttaagcatgcaaaagaaatgagactgtttatttccagacgagcccaagattcttatttctttttatctttaaattcaagttcaaatcttttttttttttttgagatggaatctcgctctgtgacctaggctggaatgcaatggtgcgatctcggctcactgtaacttcctgccttccaggttcaagcaattctcctgcctcagcctcccaagtagctgggattacaggcgccccaccatgcctggctaatttttttgtatttttagtacagatggggttttaccatgttggctaggctggtctcaaacccctgacctcaggtgatccacccgcctcggcctcccaaagttctgggattacaggcatgagccaccgtgcccggcctcaagttcaaatcttgaattagaagacatttgattattggaaaactgatacctttcaaattactcattttacagacaaaacgctgctttttctgttttgggagcttattgttaacagggatagctagcagaatagcagtacatggggtggaagaaggagaggttttacttttattgtttaggcttgacagataatgttccccctgccacctgtgttactttctttcagctcttataaaataagagccatccacttccatggaaacaagtcactttatcttgaaggtttccctttagcttgcctggaagggagtgagggcctgttggatgtgcctttaatgatttcaaatgaataggataatatttacttgtttaattcatcttcatcaccttaaagggatatttatcatttctagaagaggtcaccgctctgccccccttcttccccctcccccatctctcttctgcttttctaaattgtaatcataaataatgagtttcattcacagctccctgccagtgagctgctaattacacaaagtactgcttgtaatttacacagtaataaactgtaaatttaaacattacggcactttaagttaataatttttctgctgtaacaaatagctcatttttcacccatcttttcccttggcccccctaccatgtctgtctgtgaccaggaggcatagctataagaaatgcagaacatgaagaatatagtatatgaaaacttctcatttaactccactaccgcccggactctgacctcagagtaatttttctacagccagttctgctgaaatgtgtagcctgatgtttagcacggtccacacacatagatgaatatagacacaaatgtgtttgaagaacagccttgatgttcttggcattcacgcccgtgacttgtgttctctcaacacaacagttactcagatgtgtgttggtatgctttcccaggtgccatggtaggtaagcattgtgaatgtactcaagttaaatgaagagtgaattgccgttttccaattttttggaaatggttcgtttctgaactctttgtggtgttatgggtaagcttttacactataatcttgagaaccctgaatttaggaatcaattttatacaaatttctatttttatttcatgagatgatgtttgagggacaaagtacagagtaacaatttttgcaagtcacaaaattctcttgatgtatttatatttagtcagcagatatttacattttaccagtgaggatttggtaatgtcccaggatgaaggctgttggaactataatcaaatcacgtagctctctaggaagcttggtgtgttggcctgttaaaaattggctactgttgaactttctaaaaaaggatttttactcctatatacttcagtagttacaggaggtatagtacttattaaaataccatatatggtgaacagtgtctatgatgtatttataaagacttttggatcactagagaataataaatgtagggtaacatgtaatacttttaagatggattccaataaaaagaagtatagttgctgttttattttaagattgacttttaacatgtgccttttgaggttgccttagctggcacagttatgggaaagattgatattgtactttatatgtttgtttctgtggttggatgatactcttgtctgccttttctttttaggagaccagcataaacactttggggactgagaggataagccatatcattagtgaccctcggcagaaagatttctggttaccatcagctgggaaaagagaacgaaatcaggtaagatcatttttctttgtcatctttattttatcatttggtttccttttctttagaaagaataaagcgttggcttctgattttcctcacatttctgcttgtgcacatgaggtaaggtttcctctttcttgttattttgattttcttggagaaccgttttctaagagtatccaacacttactggtaaaaactgcagctaattcctctttgtaggttcaactgtgatcattagtttcttgtagcatatatttcataggaatcctgtttttattttagttttgaactttgcagtaagaaagcagaatgaatctgatttgcatatggtttagttcaacatcagaatcctgcattgagaagtactatgttgaagcctaaacgtatggagcagaaggtagagctgctttgggtgaagtggggtcaaagccttagagcagtggtccccaaccttatgtcaccaggaaccatttttgtagaagacagtttttccatggacccgggttgggggcgtggtgaggggggtggttttgggatgattcaaatgcattacatttattgtgtactttatttctgttgttattacattgtaatatataatgaaataattatacaactggtcataatgtagcttgtgctcctgcaactacacagtcccacctgggggtgatgggaaacaatgacagatcatcaggcattaggctttcataaggtgtgcacaacctaggtccctctcatgctcggttcacagtagggtttgcactcctataagaatctaatgtggctgttgatctgacaggaggtagagctcaggcggtaatgcccacgatggggagcagctgcttgctgacagctcacctcctgctgtgcggccccggggttggggacccctgccttagagcctctccttcttagtcttttccctggctaccccctgaggggccccttggcatatttaggcccatgtggagggctcacaatttaaaaattaactcacagtggttatcgatatgtttctttatgtgtgaagctttgtgatttttttggaggattgcattatcttggtgattagttgtaaaatagatgaacactgacaggtgaaaagttgtaggcttcctgtttgttgtgggtttttttgtttttttttttttaacaacttagtagcttactgagttgatatacacgatccacattttagacttggaatcttcattatgaatttgctgtttcaaaatgaactagagtggtagaagacataactggtgtatatgtatgagatgattttagatggcatatagatgcccaatttttaagttatgtattatagtgtacattggaaaagatgtaattatggtatcaagcctgttatttcacggaaatatagtaaggacaaagctgagcaaaaataattgatatgaggaaaaataataagtaaacagtagtacaggttgtaggcagataaggaaagtcatgaaggtggtatgtgagagactgcagtttggggaacactaagctagagcactaatcatgtttgcatcagaggatccaaaggcagaaggggacctgtggcagtcacctgatccagatccgttatttgcaaatgacgaactggagatctgtaagattcaaactatttgcccaaagtgatacagctaatagaaccaagattggaacctctgtggcagatagaacagttgcttagtttgtattctcataaaacaagtttgaagttatcattccgggttcttccagtctttgtatgtcagagggtattaagttctaaactttttagagaggactgttatgttgtgggaaaagtccaaagaaagctagcaaacataaagtgagggatctcctttgatcctcacagccaccttttgaagtcaaatagatgttttgcagatgagaaactgaaattatactctgaaagcaatatttcatttagccctcataataaccctgtaaaataggtagggcaggcctggcacagtggctcatgcttgtaatcccagcactttgggaggctgaggcaggtggatcacctgaggtcaggggttcgagaccagcctggccaacatggtgaaaccctgtctctactaaaaatac

SEQ ID NO: 22449 - DNA, 5839 bp, Homo Sapiens
atgtacaccttcctgcccgacaacttctcacctgccaagcccaagccttccaaagagctgaagccgctgctgggctccgcggttctggggctgctgcttgtgctggccgcggtggtggcctggtgctactacagcgtctccctacgcaaggcggagcgacttcgcgcggagctgctggacctgaaagctggcggcttctccatccgcaatcagaagggagagcaggtcttccgcctggccttccgctccggcgcgctggaccttgactcctgcagccgcgatggcgccctgctgggctgctcgctcacggccgacgggctgccgctgcacttcttcatccagactgtgcggcccaaggacacggtcatgtgctaccgcgtgcgctgggaggaggcagcgccgggccgggccgtggagcacgccatgttcttgggcgacgcggcggcccactggtatggtggcgccgagatgaggacgcaacactggcccatccgcctggatggccagcaggagccccagccgttcgtcaccagcgatgtctactcctccgacgccgcgtttgggggcatcctcgagcgctactggctatcttcgcgcgcggccgccatcaaagtcaatgactcagtgcccttccacctgggctggaacagcacggagcgctcgctgcggcttcaggcgcgctaccacgacacgccctacaagccacccgccggccgcgccgcagcgccagagctgagctaccgagtgtgcgtgggctcagacgtcacctccatccacaagtacatggtgcgtcgctacttcaacaagccgtcaagggtgccagcacccgaggccttccgagaccccatttggtccacatgggcgctgtacgggcgcgccgtggaccaggacaaggtgctgcgttttgcccaacagatccgcctgcaccacttcaacagcagccacctggaaatcgacgacatgtacacacctgcttatggcgacttcgacttcgatgaggtcaaattccccaacgccagcgacatgttccgccgcctgcgcgacgccggcttccgcgtcacgctctgggtgcacccttttgtcaactacaactcgtcgcgcttcggcgagggcgtggagcgcgagctgttcgtgcgcgaacccacgggccggttacctgcgctggtgcgctggtggaacggcatcggcgcggtgctagacttcacgcacccaaaggcccgcgactggttccagggacacctgcggcggctgcgctctcgctactccgtggcttccttcaagttcgacgcgggcgaggtcagctacctgccgcgggacttcagcacctaccggccgctgccggaccccagcgtctggagccggcgctacactgagatggcgctgcccttcttctcgctggcggaggtgcgcgtaggctaccagtcacagaacatctcctgcttcttccgcctggtggatcgcgactctgtgtggggctacgacctggggttgcgctcactcatccccgcggtgctcaccgtcagcatgctgggctacccattcatcctacccgatatggtgggcggcaacgccgtgccccagcggacagccggcggcgatgtgcccgagcgcgagctctacattcgctggctggaagtggccgcctttatgccggccatgcagttctctatcccgccctggcgctacgacgcggaagtggtggccatcgcgcagaagttcgccgccctgcgggcctcgcttgtggcaccgctgttgcttgagctggcgggcgaggtcaccgacacgggtgaccctatcgtgcgccccctttggtggattgcgcccggcgacgagacagctcaccgtatcgactcgcagttccttattggggacacgctgcttgtggccccggtgctggagccaggcaagcaggagcgcgacgtctatttgcccgccggcaagtggcgcagctacaagggtgagcttttcgacaagacgccggtgctgctcaccgattacccggtcgacctggatgagatcgcctactttacctgggcgtcctgacccagcccagggcccggtaaccgcaaagcccccagtcttcatgcagaccttgaaccctccgtcacacccgcaccatgtactcccaggaacctccacctctataccacccattaagtggctgctgacttaaatgtgctggaaccagctgctgaaggtggggcctagggagggggcactgaagcaatctcctgctccaacgcacaatccttactgtgccctttccacccccacactcacaccaatctgcagaaacctcttccctggggtggaagccagagagcttagaggaaaaaggtcagctctcttcctgttatacatggttatacatggttggggtttaaaagcacaaagagaaacctccccctcctggctttcgtggccatctttgtccatcttaggtggggacttgatcttatttaaggtctccaaatagcccccaccacacttagaacgtgtgttttcttagtgttagaagccaggccctgagtccccagcactcacctgaactgtggctgatttggtcccagtccagctggggaggtgtttggctgacaaggaggcaagagatcccctcccagggaacaggaggactgggcttagcacagagccatcatcatgttcccaatttgtgaagagactcctaacactgcactaacccatttgtgtacatacatgggctcagccctgggccaaatgtgcctgatgggaacagacttgcagggccatgcaggccagacttcgtgccttaactgaagagtgtgcgtgtgtgtgtgtgtgagagagagagagagagaaacacgcatcatgggtccctgatctatgaaatgaacacaacctctctgaggctggatgatctggaggaagggggcatggagcaaatttgaggctctgattgctgagccagcctcctcccaggcggtttccccaggactctcgtaggaaataaatagccctttcaagattcctcagctgcctcaccccctgcacatgtgcctggggtgtggcctagaagggagtgatgttcttactctggtggtctgtgcttctgaacacaggctacatgcacacactgacaactaccaataaacagacaggggaaggtctttcatctcagccattttctcttccccccgcccccccttagatggagtcttgctctgtcacccaggttggagtgcagtggcacaatcagctcactgcaacccctcctcctaggttcaagcgattgagtagctgagattacaggcatgcatcactatgcctggctttttgtattttttagtagagatggggtttaccatgttggccaggctagtctcaaactcctgacctagtgatgcacccaccttggcctcccaaagtgttgggattacaggcatgagccaccacgccagccattttctctttctaagaagagcaacctcagccggagtgagttttttctgactttgcagctgagtctggagaaaagtggcatgccagagcgggtcggtgggaaacagggtgaactttagcttccatcaacagctctggtagcaaaaccagtcccctaccccctagagaatgcatccgtttccccacctgatatggtttggctgtgtccccacctaaaactcatcttgaattgtagctcccataattgccatgtgttgtgggaaggacccagtgggagataattgaaatatgggggcagtttccgccatactgttctggtgatagtgaatagatctcatgagagctgatgattttataagaggtttccccttttgcttagttctcattctctcttgcctgccgccatgtaagacgtgcctttctgtcatgcttgtgaggcctccccagccacgtggagctgtgagttcattaaacctctttttctttataaattacccagtcttggttatgtctttatcagcactgtgaaaatgaacctatacagtaaattggtaccagtagagtggggcgctgctgtaaatacccaaaaatgtggaagcaactttggaactgggtaacaggcagaggttggaacagtttggagggatcagaagacaggaaaatgtgggaaagtttgggacttcctagagacttgttaaatggctttgaccaaaatgctgataatgattgggacatgaaatccaggctgagttggtctcagatagcgatgaggaacttgtttggtactggagtaaaggtgactcttgctatattttagcaaagagactggctgcattttgcccctgccctagagatttgtggaactttgaactcgagggagatgatttagggtatctggcagaagaaatttctaagcagcaaagcattcatgaggtgacttgggtgctgttaaaagcattcagttttaaaagggaaacagactataaaagtttggaaaatttgcagcctgatgatgagatagaaaagaaaaacccattttctgaggataaattcaagccccctgcagaaatttgcataagtaacaaggagccaaatgttaatcactaagacatggggaaaatgtctgcagggcatgtcagagacctttgcagcagtgcctcccatcacaggcctggaggcctaggagggaaaaaatggttttgtgggccaggcccaaggtccccttgctgtgtgcagcccagggacttggtaccatgcatcccagctgctctagtcatggctaaaaggggccaagatacagctcaggccttggcttcagagggtgcaagccccaagtcttggcatcttccacgtagtgttgagcctgcaggtgcacagaagtcaagaactgaggtttgggaacctctgcctagatttcagagaatgtatggaaatgcatgtatgtccaggcagaagtttgctacaggagtgaggccctcatggagaacctctgttaaggcaatgtggaaggggaagcccccacacagagaccccactgggacactgcctagtagagctgtcagaagaaggccaccgtcctccagacatcagaatggtatatccactgacagcttgcaccatgcacctggaaaagccacagacactcaacgccagcctgtaaaagcaaccgagaagtaggctgtaccctgcaatgccataggggtggagctgcccaagaccatgggaacccacctcctgcatcagtgtgacctggatgtgagacatggagtcaaaggagaccattttggagctttaagatttaactgccctgctggatttcagacttgcatggggcctttagccacttcgttttggccaacttctcccacttgaaatgggtgtattcagccaatgcctgtacctccgttgtatctaggaagtaactaactagcctttgattttacaggctcataggtggaagggacttgccttgtttcagatgagactttggagtatggacttttgagttaatgctgaaatgagttaagactttgggggactgttgggaaggcatgattgatttttaaatgagaggacatgagatttgggaggggccagggagagaatgatatggtttggctgtgtccccatccaaatatcaccttaaattgtagctcccataattgtgggagggacctggtgggagataattgaatcataggggcagtttctcccatactgttctggtggtagtgaataagtctcacgagatctgatggtttaataaggggtttccccttttgcttggctctcattctctcttgtctgctgccatgtaagatgtgccttttgccttccaccatgattgtgaggcctcccagccacatggaactgtgagttcattaaacctctttttcttcat

SEQ ID NO: 22450 - DNA, 4568 bp, Homo Sapiens
cccattccttgcccagttacacagcactactggacctcagtcacaacaacctgagccgcctgcgggccgagtggacccccacgcgcctgacccaactgcactccctgctgctgagccacaaccacctgaacttcatctcctctgaggccttttccccggtacccaacctgcgctacctggacctctcctccaaccagctgcgtacactggatgagttcctgttcagtgacctgcaagtactggaggtgctgctgctctacaataaccacatcatggcggtggaccggtgcgccttcgatgacatggcccagctgcagaaactctacttgagccagaaccagatctctcgcttccctctggaactggtcaaggaaggagccaagctacccaaactaacgctcctggatctctcttctaacaagctgaagaacttgccattgcctgacctgcagaagctgccggcctggatcaagaatgggctgtacctacataacaaccccctgaactgcgactgtgagctctaccagctgttttcacactggcagtatcggcagctgagctccgtgatggactttcaagaggatctgtactgcatgaactccaagaagctgcacaatgtcttcaacctgagtttcctcaactgtggcgagtacaaggagcgtgcctgggaggcccacctgggtgacaccttgatcatcaagtgtgacaccaagcagcaagggatgaccaaggtgtgggtgacaccaagtaatgaacgggtgctagatgaggtgaccaatggcacagtgagtgtgtctaaggatggcagtcttcttttccagcaggtgcaggtcgaggacggtggtgtgtatacctgctatgccatgggagagactttcaatgagacactgtctgtggaattgaaagtgcacaatttcaccttgcacggacaccatgacaccctcaacacagcctataccaccctagtgggctgtatccttagtgtggtcctggtcctcatatacctatacctcaccccttgccgctgctggtgccggggtgtagagaagccttccagccatcaaggagacagcctcagctcttccatgcttagtaccacacccaaccatgatcctatggctggtggggacaaagatgatggttttgaccggcgggtggctttcctggaacctgctggacctgggcagggtcaaaacggcaagctcaagccaggcaacaccctgccagtgcctgaggccacaggcaagggccaacggaggatgtcggatccagaatcagtcagctcggtcttctctgatacgcccattgtggtgtgagcaggatgggttggtggggagattctgccccaggagaggtaatgcacccctgaaggatatgaggggatggaagagagggctggctgcccaagggaatggattcctcctgacctcaagggaattggtcccaggtacaacagagagcaagaccccaaacagggcgtggctgccacgattttcaaatgggggtatattaatcctcaggcaaatgctacacccgtacccaaagccctgccaattctcagtgtggtagaggaagagaagcatgtctgagttggatgggaatgaggaaggagtgaggggaagaacagattccctaaactttcatgaggtcatccctagctccttaagagaaaaacatttagaaaaaaaaattttttctatctctgcccacccacacctgtgatgttgtgtgtgttgggggagcttccacaggagccacactggggaaaagctgtagtatcttctttgtttagcaagtcaaacttcacagctggggaagttgaaaacctttggaaaatgagtcaggaaaaggctgagacctcaatcggtaacaattccccaaagctgttgtaagactttgcattaaagcctttctttttcctgatgtgccctgggtggatggatctttgcaggagcctggcctgctgccttttagttacaacagcaatgtgggatgtggtatctgtgccttgtcctgggaccaatggcacagagggttatagcatgaactgaagggtccatgtcacagcataggtgccagcacgaaacttgtagatggggggtgaattccagataggctaattccctggttggtgaaacccttggttagtatttgattcccagcatctgtgtgtcaggccagagtgggggctgctgaaggcagagcttttatggatgcctgccacagacgtggtacatgggcccacttcacgatagaaggatgaaggtaaatcagcctctattatgtagcatccagctggacctagctgattctcaatgtatgccatctcttcatccagtctccttatcaagctcaggtgggattctgaattttccctaatatgctgctctgtaaagggaggagtccaagaaagcctggccccagctggcttagagtaggcttggcgatagtgaaaatccagtatatatctcctctgtgtggacaaggttgccttgctcctctcagagataccacctctgctgcaaagtcaaagcatggggttttgacatcagaagggttggaattgggtggtctctaccccagaatggcaatttggagtgcagcttcaagttctgccctctccacagattccaggcaatcctgaagcagagataatcagtagtactaaactttcagaaggggagttctgccaccccattcctccatcgagaggtctttgcagttgtggttgtgaggccagaggaacttaagaagaatgagctcaacattccattccatccaaggttgcagaatactttgagtatggagatgaccgatccctttaacctttccctttgactatactgcatgccctgtgagtggctgctctgagctttggcgggggatgagcagggtgaaggtgaaaatgttctctgatgttggtttttcttagtgtctcttctctcccacgtttctagtccattggaagttctccagatcctctagatttctgacctctttttacattctaagaggtgtcatttacctgtgggtgaggggcttggagggcctgactattaagcttcctattatgattggggaaggggactcaacatcttccccttgtctggtcctgggaactcaagactgctgtccatcctttattagtaacctagttttgttgagagagaggtgcagcatttccctcaagtacctgcatgctcataggtatgcatgcttataggtatgcatgcacaccagcaccttgacttccaccaggacagtgaatctgtagtccccattaatgatactctcagaatggtctccaccaatgtgcacaacttcatgcacacaattgtattcctctttaggagagacagtgaccatgccaggctcttcaaatacacactcctgtattttcatttctgaactccctgaagcttcacccacatctccatggcactgaatcacttttctgcccaggctggagttagaagaaccatgggttgaaggccttgggagaagaggtggtaaggagctacctggttctttggactcctcagaaacctcccgtgaagactatatatatgagcaatatatgagcaattaagatagaactaggtcattgaaggactcagaaggaaactggcaaggggctaagtagctgtgagctgctcttcctgttaactgtcctcaggagagaaaagttgtcttgatttattccagagactcctgagaattttgttactggagctataggaactaggactccctcctcagactcatcaggaaatctgggaaaatctcatctccatgctgcagtctccccgcttggcaccatctagggctctgaagatctttaaagtgagcgttaaatgaagcaggccttctggggcatcgtgatggagctcctgaggactgggagggccgttttcttcataattcctacccagtttagggaatgagaaaaggccctgtggctcttaagtctcctgactatatccactagtttggccttgagtttgagacacctggtagatgtacctggctgccctaccaagagatttgatttgtttcttcccgtggtttcaggtgatagaacccaaaggtagctttttaattggagaattgaataatcagcatatgtaagcgcactagaaccctgtgttgaaaactgccaggtgtgggtataagaaaaggccgagagatcaccacctcctcttaccctaccccacacccataaaccagacatgtctcccaggaagcaggtgtccctggacacagaggatgacagggctctacaatctgtgtaattattattattattattattttgtatttatggggcccaagaaaggggccaggagagggtacaccccagctggggagagcaaagcagatggatccagttttctgtgtgttcttacctctgtacttcctcgtagctctgctgacaaagcaagcaggcctcccgtgtccaagaccccattcctcccacttgtgtacacctaggctggcaaatcttggagcctctgggctctgaaaactagacaatgatcattaaacctggcttgagtctctgttctggc

SEQ ID NO: 22451 - DNA, 2752 bp, Homo Sapiens
gtggccctgctggctgtgagagacaccccggacgaggagccggtggacagcgacacttcggagagcgactcgcaggaaagtggggaccaagaaacagaggagttggataatcctgagttcgtggccattgtggcctataccgacccgtcggacccctgggcccgggaggagatgttgaaaatcgcttctgttatcgagtcgctgggctggagcgacgagaaagacaagcgagaccccctccgacaggtcttgtccgtcatgtccaaggacactaacgggacccgcgtgaaggtggaagaggcgggccgcgaggtggacgccgtggtcctgcgcaaggccggggatgacggggacctccgggagtgcatttccaccttggcgcagccggatctccctccccaggcgaagaaggctgggcgtggcctcttcgggggctggagcgagcaccgtgaggacgaagggggtcttctggagctggtggcgctcctggctgcccaggacatggcggaggtgatgaaggaggaaaaagaaaacgcctgggaaggcgggaagtacaaataccccaaaggcaaactgggggaggtattggcgctcctggccgcccgggagaacatggggtccaacgaggggtcggaggaggcttcggacgaacagtccgaggaggagtcggaggacaccgagagcgaggcgtcggagccggaggacagggcatccaggaagccccgggccaagagggcgcgcacggcccccaggggcctgactccggccggcgcgcctcccaccgcttccggggcccgcaaaacccgcgcgggcggccgaggccgaggccgaggccggggcgtcactcccgagaagaaagccgggagccggggctcggcccaggacgacgccgcaggaagcaggaagaagaaggggagcgcgggctccggggcccatgccagggcaggcgaggccaagggccaggcgcccactggatccaaggccgcgcgcgggaagaaggcccgtcggggccggaggctgccccctaaatgccgctagtggccccccaagaagccgcccaggctgcgagcaggccccgcagggcacccgcccgcctgtggcccccgccctcccctcccctcttcctgtcctccgcagacgcaatctcctcgcttcacagcgcgcccgggccgcgttttgccagcgtcacgttcccctctcgggccctcgcaggccgggggcgccagcgatcccgacggaggaagcccggatgggaggaggaaagagaagtgggcgcccgaggcagcagcgcagggccgagatggggacgcgccaagtggaccaggattgggggcccgggttgcccccggagggggtgtgtgtgtggacgccgggcacctgcagaggcgagcagggctcttcgtggcgctctcggggcctgcgcctggcaggtgctgtaggccgctgtcgcccctaccccagtctgactgggccctgggtctgtggtggaggctcagtcaccagccgcgcagcgcgtgtcagggcgcaactctcagccaggggaggccccagctcccagccaggggaagagatgattccagaaaggaaagtctgagagatagaaggcggttgggaaggggaggaggaggaaaggggagaggaacggtgggagaagggaaagaggaggaggagggggaggggggagcagagggaagacacatgccagccctgcctactggggcgcccctgataacaaaggaaccagccccaggccaaggccacctgcccctgaccacaagttgaatttgtcactcagactgcagtgtttcccaacattctaattatttgcagaggtgttcaatttggggtaattcacttaaaatccagttttggttcttctgggctgagtgggccctggcccctcccataggctgtggctcccctgggtgccccctctccagtggagctgacccaccgctcagcgctggccttgcagcccttactaaaagacttgaaagtccctgggttcaccccctgagtgaattaaaggccagaggggccccgaagggcactgtgagggacagaggctcacctgggcagtgcagaagccggccgcgtgtccctccttacaggggatgaaatgacctggggaggaaaccccagccctgccctggaggttccagagtaggcgggccggtgctgtgaggcttcacaacctgctgtcccaagcacgcttgagttgtatgtgagtctgtgccgtgccgtgccgtatgcttcagctcctgcaaccccggctgagctcgatttttacctaaatatcagtctccacgggaccccaccttcattcatgccttcttgtccctggggcaatgtgtgtgcttcctcgtcccaatttccattccctggcagtgaggagcccatcgtgccagggggccctgccccacttgtccctgggaaggaataggagggtttgggtgtgacctcacagtccagaccagactgtcccagtcctatgtcagggacacccagatgtagaagctgactgagacctgctgcagggcgtgggtgctcccctctgcttggaggctgtccctggacagtgacccacccactgaggaccaggctgggtgtaccttgagctgggcacagcagcctgtggtgttgcctgtgggtggggagggccccaggtgtgcttctcccgtagcagtcctaggcttctctccctgtgccctgtgtcacctggatcctccagtaaagtgaaattcagcactgt

SEQ ID NO: 22452 - DNA, 6111 bp, Homo Sapiens
cagcagggaagcattacgttaagcctctggactctgcctgatgtgcttattatacatctaaagagatttcggcaggaaggagacaggcgcatgaaacttcagaacatggtcaaattccccttgactggcctggacatgacacctcacgtggttaagaggagccagagcagctggagtttgccatcgcattggtccccgtggagacggccctatggactcgggagggaccctgaggactacatctatgacctgtatgctgtgtgcaatcaccatggcaccatgcaaggggggcactacacagcgtactgtaagaactctgtggacggcctctggtactgcttcgatgacagcgatgtgcagcagctgtcagaagatgaggtctgcacgcagacagcatacatcctcttctaccagaggcggacagccatcccgtcatggtcagccaacagctcggtggcaggctccacaagttcttccctgtgtgaacactgggtgagccggctcccgggcagcaagccagccagcgtgacctctgcagcttcctccagacgcacctccctggcgtcgctctctgagtccgtggagatgactggagaaaggagtgaagatgatggaggcttttcaactcgaccatttgtgagaagtgtccagcgtcagagtttgtcatccagatcttctgtcaccagccccttggccgtcaatgaaaattgcatgagaccttcatggtccctgtctgctaagctgcagatgcgctccaattctccatcccgattttcaggggattcgccaattcacagctctgcttccaccttggagaagattggggaggcagcagatgacaaggtctccatctcttgctttggtagcttgcggaacctttctagcagttaccaggaaccaagcgacagtcatagtcgccgtgagcacaaggctgtgggccgggcccctctggctgtcatggaaggcgtgttcaaagacgaatcggacacccgcagattgaactccagtgtcgtagatacacagagcaaacattcagcacaaggggaccgcctgcccccgctctctggtccatttgataacaataatcagatcgcttatgtggatcagagcgactccgtagacagctctccagtcaaagaggtgaaagcccccagccacccaggctcactcgcaaagaaaccagagagcacaactaagagatcccccagttccaaaggcacttctgagccagagaaaagcttgcggaaggggagaccagccttggcaagccaggagtcatccctttcaagtacatccccttcttctcctcttcctgtaaaagtctctctaaagccctcccgctcccgcagcaaagcagattcttcttccaggggcagtggacggcattcatcccctgcccctgcccaacccaaaaaggagtcatccccgaaatctcaggactccgtgtcatctccttcgccacagaagcagaagtcagcctcggccctcacctacactgcttcctccacatctgccaaaaaggcctcgggccctgccacaaggagccctttcccacctgggaagagcaggacttcagaccacagcttgagtagagagggctccagacaaagcttgggttctgacagagccagcgccacctccacctccaaacccaattcccctcgggtgagccaggcccgagcaggggagggcaggggggccgggaagcacgtgcggagctcctccatggccagcctgcgctcccccagcacaagcatcaagtctggtttgaagagggacagcaagtctgaggacaaggggctgtccttcttcaaatcagccttgagacagaaggaaacccggcgctcgacggatcttggcaagacagccttgctctctaaaaaggctggtgggagctctgttaagtctgtctgtaagaacaccggggacgacgaggcagagagaggccaccagcctccagcttcccagcagccaaatgcaaatacaacgggaaaagagcagcttgtcaccaaggaccctgcttctgccaaacattccctgctgtccgctcgcaaatccaagtcttcccaactagactctggagttccctcgtctccgggtggcaggcagtctgcagagaaatcctcaaaaaagttatcttctagcatgcaaacctctgcacggccttctcaaaaacctcagtgatatttctgcaatcaaagtgttttatctgtaaagatgtttatttatttagaacccctgccctcccaccaaagcctcctgtgcttttgttttgtacttttttgagtcacgtgcccgactgtgtgtgtgtgtgtgagtgtatgcgtgtgtgtgtctaattcaattgcaaattgttcaaagcgtcgccttattctgccattgaaccaaataacagccataggcaaaacattgacaccaagctaactggaataattgtagacgatacccaggacggtccctttagcaattgtacatatttctttctagagaactctaatgactttctttggatatgagggttttgaaacctgtgaaccagaaaagctaccattagtgcgtagaaggaggaaggagctgactcgtgtttcttctgagcaggacttgtccttactgtggattgtgggtggcaccaggagctctaaaaactgtgactctaacaacgaaacaaatcgagggaaaaactcttgctttctgcactttcgccccatctaccagtctttgtaaagggcaatattttaacactaatgtttctcaggtatatactcagctagtctaggatggttgcacaccagtaaatggattaaagaggaaggtgccatgtgggtgactgtgtcatttctcctactgccacagatagacattttcgaggtagaaatgaagcctttcaccaccttcctatctgtggtgacatgtgcaccaaaacctgtcttgactcttgggataggtcctaggaagtggcagattggatagccagaaagccagtcactcgtttaattttttttccttctgaaattactagctaaggctcttggaattttgcactgtagtagagcagttaacacctttgacagattcctggaaaaaacttctagattctaaactgggtgaaagactggacatcattttccttgtcaggtgttgcatttttccgttagaggtgggaagctccacgatgccctgtgtctgtgggctcatgttccctcatcttgtagcttggagaggaaagaagttgccttctgccaaaagccaatggtggtatgttgaagcgttgtgtgatcaagtgttacatatgcacttcagatcctgtctgtcagtctctgttagggctgcctttcagtaactcatttattatttcttctttgttcttaagatttcatctcatgcccagaactcacaagcaggttttggagtgtgttccatctggccgtgtcagtgcaaattgcatttcttacaaaggagaacctcaccaaaaaaaacctcacagataagcaaagtatatagttttgcaagctttttcaaggtctcctggcaatactttcctgctcaatttttagcttttcttttttttttaaatgtcaagagagtgaaggtcttgattctctctgaatagcatttgtcactttgccagtaaatacagcatgctaagtttatgtgcttttaaatattagcgtttttcgtcagactcttcaagttcttcttgaacccttggtgcacagatccatatataacctcccttttcagtattgctgtgtgtgaattaactacaacacatatgcatgcatagctgtgaattctgcactactttttttttcttttttccccccaagaatatctcttgggaaaagtttttagtacgttacttaactttattttgctgctaatttgcgcattagccggtaacttgcaagtctggagaccacttactgttgagggtagctggaattttagacccttggcagtatttaagatttagacatttagccttgtgaaagttaccacagtgctccatgtgattcattgactgtgagcctgttgtccattgcactcagccctgtactcacttcttcactcgctgtcctggttttactgttcagattttggtgggttctcaaagcagtaccactctcatctgctcagtacatctgcggcaactggctgccttcgatgctgtcattgcgttcagcccagcacatcacagccccatcagtgtgtagccaccgctctcgtttttctgtatcgcttttatctcctgaaaaagatgcaccaaataagagatcatctatatcaggaattgaatgtctaactcaaacctctcatttttgtttaataggtagatctcatttgaagtctcctatctgaatctctgaaacaattatagtttgattagacaaaggtttttaataacacttcttttttgctgtagtcaagcattaatagaaactagtttaattttcacagtggtaaatatttttattcttgagttatctaggaatggattttccacgatgtctagtgacttaaaaaaaaaaaggaaaaacgtttctacaaatccctttggttttccatgggatctggaataaaatgtcagtgtctataaactgtatgtcatggagtttagtccttgtttcaggtttaatagaaaaaatcaggaagtatcatggcattgtctagacatcatgaagctattttatttccatagttggtaaacagtgaaaatttcattatctccaactactaggtacaactttaggccacaggaaaggttatttggcccgaaagtttggaggtgctccttgaggtgggaagtatcttgtgggaaagtagttacttgattcaatttagttcattggtagggttggggacttggtgttggtttctttctttcttttcttttttttttttttttaattttcccagcaatatttagcacaatgagcgtgtatgtgctttggggttaaaaattatctgctagggatgataggcctgggtttctcgttgacatctagatgggcctgattagagcagtcatctcctggtaggcacaaaataatcaccaacagtaatgttgtatctgtaatgtttgtttgctttttaaagttttattcttgatttcttgtaaacatccattgcactgaggccgtatcattccttaagacagccctacatcttgccttggtaatcccttagataatgtggaaactcaaaccgttaggctccagtcatcttagaccatttcccatccgttttgtattttctcgtcctgaaagcagctgaactgaaagtaagtaataatatgctggaccagtgggaacggatgtgggagtatttgtggtgtgctaaaatactgtaattatctgtgaggctgcctgacacgcttttgcaatcttgttttcatcattcattctgcaaacgtttatggagggccttctttgagcacagaggcaaaactgaaagcttcagggatttgctgtagctgaggagccctgggagcacagcccatcaagcaagggatgtgatggtgtcctaaatggagtgacagttctcctgggaaaagagatcacgtggattccggtcaaatcggctaaggcttgtggttctcttgagcaagtctgttccttctggaaaccaaaagtgcccttcatctttagagacattttactcttccatccaccttttcagactgagctgtctctactatttaggggttgaaaatccattacacagtcactttacgttaacattgggtcatcttatgtttgtatgagacggatgtgggatttgaggggaacattgtcattcccttaaaataactatcatgaaaaaaatagcaacagtatgtaaagggaccaagagtggcagcctttagggaaaatggagcagagaagagctgtgaacaaagctcatttatttgaaataagcgtgctttatttcacatagaggggcatcagacgttacatttcattcggacaaattactgaacagccgaagtgattgtttccaatgtaggttattataattattggatacaaagatttaactagtgtttctgggttggatttttgaaatagtatgcaagtcataagcacagtttcaataaaacacgtattctgg

SEQ ID NO: 22453 - DNA, 6967 bp, Homo Sapiens
ccacccccccacataaccggaggcaccgggctgttactgtgaataaggccaccatgaagacaagcacagttagtactgctcatgcctctaaagttcagcaccagacgtcctccacctctcctctgtcaagtccaaatcagactagttcagaaccccggccactgcctgcccctcggagaccaaaggttaacagcatcttgaatctctttggatcatggttatttgatgcagcatttgttcactgtaaacttcataatgggataaacagagacagcagcatgactgccattacaacacaagctagcatggagtttcgacggaaagggtcacaaatgtccacagacaccatggtttccaatcctatgtttgatgcaagtgaatttcctgataactatgaagcaggaagagctgaggcttgtgggacactgtgtaggattttttgtagcaagaagactggagaagagattctgccagcttatttatccagattttacatgcttttaattcaaggtttgcagataaatgattatgtgtgccatcctgtcttggccagcgttattctaaactctcctcctttgttctgctgtgacttgaaagggattgatgttgtggttccttactttatttcagctcttgaaaccattttgcctgacagagaactctcaaaattcaaaagctatgtaaatccaacagaattgcgaagatcctccattaatatcctgctttctttgttgcccctccctcatcattttggcacagtcaaatctgaggtggtcctggaaggaaagtttagtaacgatgacagctcttcttatgataaaccaataacttttctgtccctgaagttgagacttgtgaatatattaataggtgccttgcaaactgaaacggaccccaacaacacccaaatgatattaggggcaatgttaaatattgttcaagattcagcacttttggaagccattggttgccagatggagatgggtggtggagaaaataacctgaagagtcatagtcgcaccaatagtggtattagttcagcaagtggtggaagcacggagcccacgactcccgatagtgagagacctgctcaagctctcttaagagattatgattcagctgctgggctcctgattcgcagcattcatctcgtcacccaaagactcaactcccagtggcgccaagacatgagcatatcactggcagctctagagctcctctctggccttgcaaaggtaaaagtgatggttgactcaggagaccggaagcgagccatcagttctgtgtgcacctacattgtttatcagtgtagtcggccagctcctttacactccagggatctgcactccatgatagtggcagcttttcagtgtctctgtgtctggctgacagagcaccctgatatgcttgatgaaaaggactgccttaaggaagtactggagattgtggaactgggtatctcaggaagtaagtccaagaacaatgagcaagaggtcaagtacaaaggagataaggagccaaaccctgcatctatgagggtaaaggatgctgctgaagccaccctaacatgcattatgcagttgctcggcgcatttccttcacctagtggtcctgcctctccttgtagtcttgtgaatgagaccactttgattaaatactccaggctgccaaccataaacaagcatagtttccggtactttgtcttggataacagtgtcatcctggcaatgctggaacaacctcttggaaatgagcagaatgattttttcccctctgtcactgtgctggtccggggaatgtctggaagacttgcttgggcacaacagctttgtcttttacccagaggagcaaaagcaaatcagaagctttttgtacctgaacctcgcccagttcctaaaaatgacgttggatttaaatattctgtgaaacatcggccatttcctgaagaggtggacaagattccttttgtgaaagcagatctcagcattccagatttgcatgaaatagtcactgaagaattagaagagagacacgaaaaattaaggagtggcatggcccagcagattgcttatgaaatacaccttgagcaacagagtgaggaggaattgcagaagagaagttttcctgacccagttacggattgcaagcccccgcctcctgcccaggaattccaaacagcccgcctttttctctcacactttggatttttgtccttagaagcactgaaggaacctgcaaatagtcgtctacctcctcaccttattgcacttgattccacgatacctggattttttgatgacattgggtatctggatctcttgccatgtcgtccttttgacacagtttttattttctatatgaagccaggtcagaaaacgaaccaagagattttaaagaatgtggagtcttccagaactgttcagccacatttcctagaatttttgctttcccttggctggtcagtagatgtgggcagacaccctggttggactgggcatgtttctaccagttggtctattaattgttgtgatgatggtgaaggatctcaacaagaagtgatttcctctgaagatattggagctagcattttcaatggacagaagaaggtgctgtattatgctgatgcccttacagaaattgcttttgtggttccttctcctgtggagtccttaactgattcattggaaagtaacatctcggaccaagatagtgattcaaatatggatcttatgccaggaattctgaaacagccatccctgacacttgagcttttccccaatcatacagacaatcttaattcctcacagaggctcagtcccagttccagaatgaggaagctgcctcagggtcgccctgttcctccccttggacctgagacaagagtttctgtagtctgggtggaacgctatgatgatatagaaaactttcccctctcagagctgatgacagagatcagtactggtgtggaaactactgcaaatagtagcacttcactgagatctacaactcttgaaaaagaagttcctgtcatcttcatccaccctttaaacactggattattccggataaaaattcaaggagccactggaaaatttaatatggtcatccctcttgtggatgggatgattgtcagcaggcgagctcttggctttctggtgaggcagactgtaattaacatttgtagaagaaagagactggaaagtgactcctacagtcccccccatgtccgccggaaacagaaaatcaccgacattgtcaacaagtaccggaacaagcagctggagccagagttttatacttcacttttccaggaggttggactcaagaactgcagttcttagaccactgaatttctaagactgttgaactccagtttgggaactataacacagcagaacagtttgataggtgatcactgtaaaaataaaaacaaatcactcccaagagcttactgtttaatcaccagaatagaagaaacacattataacccatttgatagaagactttgggctatctagtgaaatgggctcccagacacaatcatactcctgctgataatgatgatatacattttagccataaactttcttttaaaagtgacaattttagttaaacataagccttttgaggagaaaggcttttatgcatctcagttaaacacgtgcattggtagtatcaacaaatttgcaatatagaagttgaagatagttttttacctcactttttaggaggttgtattcaaaattaaaatctcagaatcttacaggacatttaaagactcatgttgatagcatggaggagaaggaaagaagtcacagccttctactcagttgtaggtcttcttgtcatccagctgtcacactgacaaaaagaaaagatgatacatgttttttgctcagataagaagcctgacattaaaagatgtcatatttttttctccacatttcaaaaagttgtccttctcatcactgcacagatctgtctgaaagcctcagtttctgagtgacccaggaacagatcagaaatggagcatggccttgtcctttaatggggatgcaaataaagtttgtggggttaaaagttataagacagcagtgataccccactctctccattattgtccagcggggtgacataatgacaggaccaagcagcaaactgcagtagtttgtgaaggattctaatatggggttcaggaatagcctctcaacgctactaattcagatctctcccagagaactactggatttcctcataattgacaaacatgagtgaccacctctttgggtggctactgttagaaatggctgttgtcatgttttctggactttgccagccaacagatccctgccaggttttggaaatacttctattacctcgctgctacttttctgcagggataaaacttttgaggtggccagacccagaacatccaaggattcctgttacagtgctacagtatacactgctcatttatcctattctcatgtgctttcttctttagtaagattattttaagaaaataagtgatatttaaagtccaaagaggaatgatcacagttgtataaggggtgttttcccacttgaactctgatgtcagtcgactgtgggtcagagctacaaccatctgtttggtttgatgttttggtggtttacttacggagtggggatagtgtgagacctaattccctgtgcaaatgtctcttattccagaaatgtgcattttgtcatctataagcaagaaatatgggcatagcagctcttggtttaaagtttgccataacctgttcatgtttgttttaagctcaggtaaagataacctcctctttctatgactccagtttccattcaggttatagtattattcaatagttgattttctttttaagctgggcaataaattgatgtttccagatggtaacatgggagagggcatataggataaagatgagcaaattctaccctaaaaatgttctagtagttcacaggaagaagatgaggtttaataactttcaaggtaattctagattgacattttgaggggaaaatgggctcttgttctagttgaagtgagcagagaaggctataaattaatatgtaacttacagcattccagaggttaaaaataactgatgcagatgtacttcttcagtgtgattcttcagatcaaacttttacttttggcatagttaatttcagaaaaatgtgctgtatgtgtgtgtgtatgagggttggtcttgctgatccttcagttagctctaaattctggcaactccttgtaattccaatgtatttgatacatgaacaatcatgttgaatgcatttgtgatctgggagacttcctcgtcttccagggaaggaaggatgtgcagcccctgaaggcatgaaactcccagtgtgtacggagccagtggaatatgggatacccataccttaccaggcgctggttccttctgctcacaataacatctgcccaaagagggagtgggaagaacgcttagctctttcactagtatggatttgagttcatggtcactatttttacccacctgcctttgttaaaaatcactttgagtagaatagcactggaggaacatatttagcacctaatattaatatttagtagtccattgataaatttgccagcatatgttctagcctctggggggaaaccaggaccacttttgtctgtggcttaaacagttcagttgctatatctgttgggtatgccgggggtggatgagtgtggcattccgtgaagaggaaggtggtaagtaaggtttcccttctactgccttcttaagttgcaggagggagcttttctcctcccctctggttgggagcactgaggacagtgaggagggcttttaccttgttaatcctttccttatttagctagctttcctttttgtctagggcttcctcttgagaccctcttccatccattgggcctttgaaaggactaatcagacacacacacacacacacacacacacacacacacactcgcatactcatgcacattttccttcatttccagatcctttatttcagagcagcccattttcctctggattcattgatgaatacaagtacccacacctttggccagtaatgtcagttacctgctgcaggttctgtgtatgaggccttcatgaacggttaccttctccatacactagggaagcatttgtcagactctgcagactgggttctagagaggcagagtctttaagagtattcatttcttctggaaggtggagctttacccaaagtggaagttagccttgctcaaagatgtgttttgtggtaggtggtaaaaataaataaataaataaataataaaaaaagaaacatgtattggaggtaatttgacactgctgctggcagtagttctctattcaccattttaaagcccattcaggttctctcttcctgaaaagaactgattgctgtgtttacatgaaatgacattggagtcagatggtctgttttaaagatttccatgacagcctcttttcctgagttggagagattggaggtggtctatccgtacgatgtggaatcaaacggtgggtttcttagtagctaaagaagccatgtacttctagtgtgtttctcagaatatcaactcatgttcttcagatgcttttctttttttaatggtgagggaaaaggtataatttgggattccacagtgccttgcatatagtaggcgcccagtaaatacttgttgaagcaaaccaagtttcccaagtcctcatctcttatagtgaccaagacatctttctcctctgaagggcttggcagttgtggctaaaaaataagcagtatcattatttgcttgaaatcatatatacagtttgtatgaatttcagtatgttgccaagacatgattttttcttattgtattttctgtaaatatttctggcactgaactgtaaagtaaaggcaaagtgtaaatatg

SEQ ID NO: 22454 - DNA, 5654 bp, Homo Sapiens
cggcaagcaggtctaggaattcgcctggttcccacctcgcgtcccttgccttccttcctagtctacccactgtagtgccccctgcgtcccgctccctcctagccgactcagagcacaagaaggattgccacggtttccattgcagcagccgtggcgcctctgaccctttttttatatcgcggcgacggcgggctgtcgtcacgacgacgtgcggacgcagcggcgggggccttatgtggagaagtcgctgtgaagccacctataaatccatttactgaatttatggagaaggctgtaaatgatggaagtcattcagaagaactcttttgccatcttaaaactatatcagagaaagaagatttaccacggtgtaccagtgaaagtcatctcagctgcctgaagcaggacattctaaatgaaaagactgaattggaagcaacacttaaggaagcggagttggtaactcattctgtagaattgcttttgccactatttaaggacaccattgaaaagattaattttgaaaatgcgaatctttctgcattgaatttgaagatttctgaacagaaggaaatattaataaaagaattagacaccttcaaaagtgtaaaactagctttagaacatcttcttagaaagagagactacaaacaaacaggagacaatttatccagcatgttgctagaaaatctaactgataatgaaagtgaaaatactaatcttaagaagaaggtatttgaaaaggaggcccatatccaagaactttcttgtttgtttcagagtgaaaaggcaaatactttgaaagcaaaccgtttttcccaatcagtaaaagtagtacatgaacgactacagatccaaattcataaaagggaagctgagaacgataagttgaaagaatatgtaaagagcttagaaaccaagatagccaagtggaacctgcaatcaagaatgaataagaatgaggctatagtgatgaaagaagcaagtaggcaaaaaactgtagctttaaaaaaggcatctaaagtttacaaacaaaggcttgaccattttacaggagctattgaaaagcttacttcccaaattagagatcaggaagccaagttgtctgaaacaatttcagcttccaatgcctggaaaagtcattatgagaaaattgtaatagaaaaaaccgaattggaagtacagattgaaacaatgaaaaagcaaatcattaatcttttggaagatctgaagaaaatggaagaccatggaaaaaattcatgtgaagaaattcttagaaaagttcactcaattgaacatgaaaatgaaactctgaatcttgagaatacaaaattaaagcttagattcccatgtagaattactgagtcaaagaatatgaacattttgattgttcttgatatgctttgctacatttcttctgaaaagactacacttgctgctttgaaggatgaagttgtatctgttgaaaatgaactctcagaattgcaagaagtagaaaaaaaacagaaaacccttattgaaatgtataaaactcaggtacaaaagttgcaagaagcagctgaaatagtaaaaagcagatgtgaaaatttgctacataaaaataaccaaataacaaaaaccaaaaataaaaatgtagagaagatgagaggccagatggagtctcatctgaaggagttagagcgtgtctgcgattccttgacggcggcggaacggaggcttcacgagtgtcaggagagtctgcagtgctgcaaggggaagtgtgcagaccaggaacacaccattagggagcttcagggccaggttgatggaaatcacaatcttctgacaaagctttctctggaagaggaaaactgtcttattcagctgaagtgtgaaaaccttcaacaaaaattagaacagatggacgcagaaaataaagagcttgagaagaagctggcaaaccaagaagaatgtcttaagcacagcaatcttaagtttaaagagaaatctgcagaatatacagcattggccagacaactggaagctgctttagaagaaggaagacaaaaggttgctgaagaaatagagaaaatgtcatctagagagagtgctttacaaattaaaatattagatctggaaactgagcttagaaagaaaaatgaagagcaaaatcaacttgtttgcaaaatgaacagtgatccagagactccatgaaatctatttttttaattcccaagtgtctaaaaagttgaaaacctaaaagattcaagagttaaatgatttttggcatgcacaatttgattttattgccatcaaaagtttcatgacaacttagtcagaacaaaacgtcgatcacctttaatttagcacaggccttccatttatttctaaacttttttttaactcaccatttgactttctgatattgtaaaatgtgtgtgctgtttttttgtgtaattgaagcctctgaaaaaataaatgaggtgggttttgctgtaatgtccctagtacttggctaaagctagtaaaataaagagatcccattcacaattgccacaaagagaataaaatacctaggaatccaaattacaaggaatgtgaaggacctcttcaaggagaactacaaaccactgcttaaggaaataagagaggacacaaacaaatggaaaacattccatgcttatgaataagatgaaacaagatcatgaaaatggctatactccccaaagtaatttatagattcagtgctatccccatcaagctaccattgactttcttcacagaattagaaaaaactacttcaaatttcatatggaaccaaaaaagagctcacataaccaagacaatcctaagcaaaaagaacaaagctgtaggcatcacgctacctgacttcaaactatactacaaggctacagtaaccaaaatagcatggtactggtgccaaaacagatatatagaccaatggaacagaacagaggcctcagaaataactccacacatctacaaccatctgatgtttgacatacctgagaaaaacaagaaatggggaaaggattccctatttaataaatggtgttgggaaaactggctagccatatgctgaaaactgaaactggatcccttccttacaccttatacaaaaattaactcaagatggattaaagacttaagtgtaagacctaaaaccataaaaaccctagaggaaaacctaggcaataccattcaggacataggcatggacgaatacttcatgactaaaacaccaaaagtaatggcaataaaagccaagattgacaaatgggatctaattaaactaaagagcttctgcacagcaaaagaaactatcatcagagtgaacaggaaccgacagaatgggagaaaatttttgcaatctatccatctgacaaagggccaatatccagaatctacaaagaacttaaacaaatttacaagaaaaaaaaccccatcaaaaagtgtgcaaagaatatgaacagacacttctcaagagaagacatttagtcagccaaaaaacatatgaaaaaaagctcatcactggtcattcagagaaatgcaaatcaaaactacagtgagataccatgtcacaccaattagaatggtgatcattaaaaagacaggaaacaacagatgctggagaggatgtggagaaataggatgcttttacactgttggtgggagtgtaaattagttcaaccactgcggaagacagtgtggcgattcctcaaggatctagaaccagaaataccatttgacccagcaatcccattactgggtatatacccaaaggactataaatcatgctgctatagagacacatgcacacgtatatttattgtggcactattcacaatagcaaagacttggagccaacccaaatgcccatcaatgatagactgaataaagaaaatgtggcacatacaccatggaatactatgcagccataaaaaaggatgagttcatgtcctttgcagggacatggatgaagctggaaaccatcattctcagcaaactaacacaagaacagaaaaccaaacaccgcatgttctcactcataagtgggagttgaacaatgagaatacatggatacagggcagggaacatcacacaccagggcctgtcagggcgtggggggctaggggagggataacattagaaattcctaatgtagatgacgggttgatgagtgcagcaaaccaccatggcacgtgtatacctatgtaaccaacctgtacgttctgtacatgtatcccagaacttaaagtataataaaaattaaaaaaaataaagatctgatgttttgttaaacctgataagttttgtactagtaaaattctagaattctaagcatagatttaaacattgctgaaaaatgagtttgtgtgttttatgccttccaggggacagttaagtgggcagtatttatttaatatacctgcttcagccccatttgaattgtaagcactctgaaagcatgtctcatagtcgtctgtatccctggtgtctcccacagtgccctgcttacctgcaggcctttttgtattttctgtccaagtaccctaatagggtggtgcagaatggatgtacagatctgtggatgacctcagcagcttaatccaaggcacccctcgggaagcctgaaatgtctttgaagtcttatgtattatcctaaaatccattgacattttatattctaccctacaaaataagtatgtgttactatttttctttccaaattgttgagtaaaactcactgtattcatcctgtggctttgtactgcccagcctagctcattgttttttacctgcctcatttcctgagctgggcattgctcagtttcagaaggtatcaggtgtcattgaacacctgatatgaaggatgtaaaagttctctcttttctatctaggtgtctatattttaattggaggctagatgatatttgcaacctgtctttatctaaagcattgtcagtgaactcacctacttaggaattcatatgcaccttagttaaaaaaaatgtattgtggttttaaattttttcctcaaccactgtaatatgaagaattctttttattttttaagagattctaagaaaatgttcacattatcaaaactagaattctatcaacttttaagacatttaattatttggaataaaatgtgaatttttagacagaaaatggcaaaaactagtatgaaaatatatcatgttacatgtgaaattatgacagttgttaacctattaagttaatcatgttaaatatgtaataatttggggctaaatgaatgtatattataaattatatcagtgaagatcaaccatgtgtatgctttaattattaattttaaagagtgagctctaagaatgaacacatcagatgtaagtattattttaaaaaatcaaaaagaattatctagttattgtatatatgtttttaatattatgactctggtcctttggaatgaatgctattattgcttatctgtatttttttccttttttctttagaaagcacaacatcaggaagtgtgtttgaaagaagtacaaaatagtcttgagaagtcggaaaatcaaaatgagagtattaagaattatttacagtttcttaaaacttcttatgtaacaatgtttgaataaattgtcaaatttattttctct

SEQ ID NO: 22455 - DNA, 5393 bp, Homo Sapiens
ggggaacagcaaattcagtcacagacaatcctccactcggtcaagagccacttttctcttcctgccttgcccccccgcagggggtaaggaactgagcgtttaatctttagccggttggctaccagctaaaattctacttatcttagtttctagtggatagctttcttattttgcccatgttttcttagaatccctgtttaatatacttttgtcagtagtagtatctaggagtagcagggagagtgacaataaattagccccttcttttttcccttgtcattcaggccccttttcctctccagagggaaattaccagtaaactcttctaaatcttccaccccttctcagtcatactgtgaagaaacacactaaagtggacattatttgaccagtgaacacgaacccagcttcaggcattggtttgttgtggcacatggagaaacatctcttttaaaatatctcccaattacccttttcacaatttgtatccacctaggatttgctgctggggtaagtcactagatttatttctcaaagctcccctctctatgagctgaaagactgaccaaccatgaacactagtaggggatggggaaaggggacagagcagagccagttgttccacactttgggaagcaggagtagcttttatcatcttcctctggggagcaggcatagagacataaactgagtgaaaatgggtggaggaagaacttctatacccacgaacaacatgtgaagagagagaaccaaacataaagtaaggagggtagacgttacatccaagaggaaataatccaggcaaggaagcacaagctgatcaagatgtgtagttctgtggctgccaagttgtggtttttgacagatcgtcgcatcagggaagactatcctcaaaaagagattttacgagcattgaaggccaaatgttgtgaggaggaactggactttagggctgtggtgatggatgaggtggtgctgacaatcgagcaaggaaacctgggtctgcggatcaatggagagctaatcactgcctacccacaagtggtggtagtcagagtaccaaccccttgggtgcaaagtgatagtgacatcactgttttgcgccatctagagaagatgggatgtcggttaatgaaccgacctcaagccatcctgaactgcgttaataagttctggacatttcaagagttggctggccatggtgttcctctgccggatactttctcttatggtggccacgaaaattttgctaaaatgattgatgaggctgaagttctggagttcccaatggtagtaaagaatacgcggggtcacagaggtaaagctgttttcttggctcgagataagcaccatttggctgatctaagccatcttattcgccatgaagcgccatacctgttccagaagtatgttaaagagtctcatggacgggatgtacgtgtcattgtcgtgggaggccgtgtggttggcaccatgttacgttgttcaacagatgggagaatgcaaagcaactgctcattaggtggtgtggggatgatgtgctcattgagtgaacaagggaagcagctagctatccaggtgtctaatatcctggggatggatgtgtgtggcattgacctgctgatgaaagatgacggctccttctgcgtctgtgaggccaatgcaaatgtaggtttcatcgcctttgataaggcttgtaatctagatgtagctggtatcatagcagactatgccgcctcccttctaccctctggccggctcacccggcgtatgtccctgctctccgtggtgtccactgccagtgagactagtgagccggagctgggtcccccagccagcactgctgttgacaacatgagtgcaagttccagctctgttgacagcgaccctgaaagcacggagcgagagctgctcaccaagctcccagggggcctgttcaacatgaaccagctgctagccaatgaaatcaaactactggtggactgactccactggtaattaaccaacaaaacccttgtaaaactttctttcttcttttctatttttaaaaccaacttgcaatgctgttcatggaggatgctcaggaagatgagagaaaattagtaggattagttggagagagtgggagatagatgagacctctgctagtaagatgttactttcatttacaaatcctacaaatagagaggcagaataggtggggtatagaaaaatgtcaggctctcatagttacccttttaaattgctaaaaaatgtgtatgctcataggccatgaggaacaaatactttttttttttcatggtcccttgcttttgtttttgtacaaaaaaaaatggttttgctacaaatatccaagtagcataacttcacattgtgttggaagatttgtcatcagtgaggaaaacatctgcttaaattacaggaatttttgtattatacagctctgaaaattctgccatttccttattaactagcagctttagtttgtagtttatgaaatcttgaggggctcttttactgggatttcttatttttttgttttttcccgcttaatttggtgggaggtcaaattgaatataacccaataaaggcttcttaatgacaaaattggcatgtttgcatgatgaaatggaaatgaacagtattgcaatgtccggtatacaaaataacattaattcaatgtagataaaattacactagtttaaaatatgtgcattcacttgtatttgttagtgttttagtcttttttgaaagatgtgctctgttaatgttgctttttttttttttttttaatacatgctagtctaacatttcctgctctatgcctgcatctttaacaatggccaaagtgaagaaaatgctaccttttttgttaacaagacactgacttgaaacatgtacatttaaagccttttattttttccctttttgttttggtagttgggcatttaaataaggacaaggaaaaatatttttgggggcaaatcaagagcctatgagttctaagtataaagctgaagtgatttcgaatgccagcgttatatatttgcatttttcacattttacgagggagtatatgtgtatgtgtgtgcacgcatgcatgtgtatgtgttttgctttttgtttccatcaactaatcaaaaaggataatttagaaaatggagcatgatgggaaacagagtttttgactttaaaaaacagatgagttgttttcataagtagactccactggggtagaggtattcaccttaaaacatagggtgagtagatgcttttttaggcctttttgtgtatatgtacgttgtttgtttttttccttttgtttctagcctgttcagtgtacagtttattcaaggctacatgcttttctttaatgcttctggctatgcattttctctttttacatataggatttgggattgggggtgggttggatgtttttgtttggggacttatttagtagtattgagtctcttatagccctactcttaagccttcaatactgtccactctttatattcctttacttgcagaatttataaaagcccccaaactgcatataatatgagcctttaaaacatgggtaaaactaatcccattgatgggtttggatggtatgttaagaaatggagatgctgcagagcccaacgtaattttttaaacagcaagttttccatctccctacgaatcctctgaagcttttacccaagccctttcttgcctctccagtgctattttccttcagatggaccttaaacataatttcttggacactactagagagacttcgaggcaataataaaagatcagtattaaccagctataacagaggtttgatcatgcttacttgtacagtttttcccccgttttaaaaaggaatgtaataaaatttgttttttccatagaattaaataatattaaaattgagtgaaaggttgattgttgatgaatagaatagtacctctcatctgtgcagtgtctcatttcacctcagagaaaaggatacataagaggagtttgtaatttatcttaggatattctaattgcatttaaaagaacttatcttgcgcagggtaaatgggggactcacatacatatattaatacctctgactcattaacagaaagaaatacttggtacttctttcgctgaatgaccatactgtggaggatgcatactatttggtatagagaaataaatgaggaagaaagaactgcttaattaaattatcattcatatgttcatatagagaccatctggttgccatgtgtattatgacacatacactttgaatagttacatatcacaagtatgtagttcatgtttgtgttggtggggtaaggcatcaggaaaaatgtagttagtcttttcttaacttataccaaattaaccaactatattataggaaatatgtgaaattagttcattagctttattcactattatgcattcacatgatattaaaacgtacactcacatgttagaatgaaaagagcagtagttatcttagattttaaaaacatggatatcttcttgaattccttcaagattgaggtagagaataagagcaaatcattctggaagtaccttaaggaaacaaacagcagcagatatttaggttaaacttattttcataattgtttaataacttttgtataatcttcattgctattatgagagagaatgtatatatcaaatatgtgtaatgataaaatctgaattgtaaaatttttgtatattgttaaaattgtaattctaaattgtatttcaaaaatgattatttctgatattgtttttatgtcacccatgatgaaaactggactttatatatctaaacatacaagtatgaactattctatttaaaatttttaatagtttttttcttttttggtgcctataattgattggtcatttctgctggcttttctccaatgaacattgaaatcttcctgtatatgttaccaataagaaaactaccctggaacagtagaaaaacccaacaagagacttggcattcatcaagcacattatcagactttgagaacatattgaaggcattgactttgaaaatcatctctttttctcaagaagaaagcaatggagaagcaaatttgtttcattcagtgaatccccagtttggggcttgtggggcttagagacattgtgaaatcaaatcttgtgttatacttttctcctggctcactttttttgagaaggtttatgggctatttggctggtgagacacgatcccctcctaagaaaatgtaggtgctcagacaggtaaccactgctgctactgtttttatttgtttgtttgttcaattttatttaagatttgtttttgttgtactaggattttaaaaaatgtaatatattgcaggatttataaccag

SEQ ID NO: 22456 - DNA, 5208 bp, Homo Sapiens
ctaaaggagtcccctggaaggcctccacaacctcacgctagagtcaagaatggatatgttcagcttggatatgatcatcagtgacccagctgcagaagccagcagggctgggaagaagcagctcagaggtgttcagaacccttgcccatctgccagagccagaccccggcacaagtccctcaacataaaggacaagatatcagaatgggaagggaagaaagaggtgcccactcctgcacccagcaggagagcagacggacaggaggattatctgccgtcctctacggtggagaggaggagtagtgatggggtgagaactcaggtcacagaggctaagaatggaatgaggccaggaacagagagcacagagaaggagaggaataaaggagcagtgaacgtcgggggacaggacccagagccggggcaagacctaagccagccagaacgggaagtggatcctagctggggccgaggccgagagccaagacttggcaagctacgctttcagaacgatcacctctccgtgctgaagcaggtcaagaaactcgagcaggctttgaaggatgggtcggcagggctggatccccagttaccagggacttgttactccccacactgccctcctgacaaggcagaggcagggtccacccttcctgagaacctgggaggcgggagtggctcagaagtcagccagagggtccacccctcggacctggaaggcagggagcccacccctgagcttgtggaggacaggaaaggttcatgcagaaggccctgggaccggagccttgagaacgtgtataggggctcggagggttcccccacaaagcccttcatcaaccctctgccaaaaccccggagaacgttcaaacatgccggagaaggggacaaagatgggaagcctggcatcggcttcaggaaagagaaaagaaatctgcctcctctgccctctctacctcccccgcctctgccctcctctcccccaccttcctctgtgaacagaagactgtggaccgggagacagaaatccagtgcagaccacagaaagtcctatgagtttgaagatttactgcagtcttcctctgagagcagcagggtggactggtacgcgcagactaagctggggctgacacgcactttatcggaggagaacgtctatgaagacattctagatccgccaatgaaggagaacccttatgaggacatcgagttacatggtcgctgcctgggaaagaagtgtgtcttgaattttcctgcttctcccacctcttccatccctgacacactcaccaagcagtcattgtccaaacctgcttttttccgacaaaattcagagaggaggaacttcaagctgctggacactaggaagctgagtcgggatggaactgggtccccttccaaaatcagccctccctccactcccagcagccctgatgacattttctttaaccttggagacccacagaacggcaggaagaagagaaagatacccaagctggtgttgcgaatcaacgccatttatgaggtccggagaggaaagaaacgggtgaagaggctgtcccagtcaatggagagcaactcaggaaaagtgacagatgagaacagtgagtctgacagtgacacagaggagaagctgaaagctcacagccagcgcctggtcaacgtgaagtcccggctgaagcaggcgcctcggtacccatcacttgcccgggaactcatcgagtaccaggagaggcagctcttcgagtactttgtggttgtgtctttgcacaagaagcaggccggggctgcctacgtgccagaactcacccaacagttccctctgaagttggaaaggtctttcaagttcatgagagaagctgaggaccaactgaaggccattccccagttctgttttcccgatgccaaggattgggttcctgtccagcagttcaccagtgaaacattctcgtttgtcttaactggagaagatgggagcagaaggttcggttactgccgaagactgctgcctggaggcaaagggaagcgccttcctgaagtttactgcattgtgagccgcctgggatgcttcagcctcttttcaaggatcttggatgaggtggaaaaaagacgaggcatctctcctgccctggttcagccactcatgagaagtgtcatggaagcccctttcccagccctgggcaaaaccatccttgtcaagaacttcctgccaggttcaggaactgaggtgatcgaactgtgccgcccgctggactcccggctcgagcacgtggactttgagtctctcttctcctccctcagcgtccgccacctggtctgtgtgtttgcctccctgcttctggagaggagggtcatcttcattgcagacaagctcagcatcctgtccaagtgctgccacgcgatggtggcgctgatctaccccttcgcctggcagcacacctacatcccggtgctgccacccgccatggtcgacatcgtgtgctcgccgacgcccttcctcatcgggctgctctccagctcgctgccactgctcagggagctgccgctggaagaggtccttgtggttgacctcgtcaacagccggttcctcagacagatggacgatgaggactccatcctgccccggaagcttcaggtggccctggaacacattctggaacagaggaacgagctggcttgtgagcaggacgaagggcccctagacggcaggcacggtccagagtccagccccttgaacgaggtggtgtctgaagcctttgtccgcttcttcgtggagattgtgggacactactctttgttcctgacgtcgggcgagcgtgaggagagaaccctgcagcgggaggccttccgcaaagctgtctcctccaagagcctccgccacttcctggaggtcttcatggagactcagatgtttcggggcttcatccaggagcgggagctgcgccggcaggatgccaaaggtctgtttgaggtccgagcccaagagtatctggaaacactccccagtggagagcacagcggtgtcaataagttcctgaagggactaggcaataaaatgaaatttctccacaagaaataactctcagcctcaagggaaaacttcctcctagtgcagccctattctttaaaaacagttcctggtggcctttctgaaaggctgggtcccaggttgtcacggtgcggaactggaggccgcggtggcttctggccgaggctgggctcttccctggatgaggacctgggagccgcctgggaggacagccccagaaagggagcccgagaccaggcgtgtcgccgacatgcaaatgggttgttttggtggttgggttttttttttttatcttagatattaaaagtaagaaaaatgtgtgggttttctgtttattatgccaaggccaagaggagcctgtcctgccctacacgttcccctcgttcgtcccatccggccgctcagcaatggagctaagaggagtggtgatgggcaacagaaatgaggtgctcctcggagcgggactgacgacacatgaggactgtgaggggaggaggcggagccggtgcctcgggttcagggagtgaggcctcctagtgaaaggctgggcccttgccctagagtggaggctagggaggaacgggagctgtagacggatgtggcttcccagacacgctgctcttccagaagggacagtgatgccacctggtggccgaggccatggacgtctctcttcccaaatggacctgactcttcttgactgccttgttctcttagaagaagccatggaactgtccactgcctgagtagtccctggcttttagaggcacacacacaaaaagaggtcagtaaactgttctaggggtcttcaagtttacgacactgctcacggcccaccttccaacacatagccacaactttgaccccgttcccatctcattccaggggcccagagcagcattaatgcaatagtggatgtgcactgcctgtacacggtggggggcggggggaccttttgcggctgatggtaacaagatggagggtgagaacgctggggcggcgtcatgagccgtgtgcagccagagaggcagcttgcgttttctggaccagaagcagggagggtgtggagaaggccaaaaacctcagggcgacctaagagctgtcctgcagcggggacagtggggacagcagggacagcggggaggcaggaaaagccccgaacacagctgaggcaggttctcagagcaagcctcagggccactaccaggtgacccctgccctcagctctcaccagcgaccctcacagaaacacaaaagggaggggcgccgacctcaacaatggcccagaggggccatactgcctggcaggggttctcaacctttagggagcgggagcaaggggccttccgaggataaatagaaatgaggaaaatgaggggaggtgacctctcatccttcctcttagctggagttatggaccccctcgcccctccaagttctacccaggctttggtgtgtccattactttttcagaggtgaagatccacagtttacatcaaattctcaaagatgctcccagaatggtagaaaccaggctgtgcataaaaattaacctgcctggccgggcgcaatggctcatgcctataatcccagcactttgagaggccaaggcaggcaggtggatcacctgaggtcaggagttcaagatcagcctggccaacatggcaaaaccccatctgtactaaaaatacaagaaaaacttagccgggcatcgtggtgcgtgcctgtaatcccaactacctggaaggctgaggcagaagaatcgcttgaactggggaggagaaggttgcagtgagccgagatcatgccactgcactccagcctggacaacagagcaagactccttctcaaaaaaactctggctgggtgtgtgtgggtggggactagggggatgcctgaatgagaatccctgaatccttgagtgtgggggttcaggaatatgtatctaacaagctccttggattagtcaagtttgtgtgggggctcaggaatatatgtatctagcaagctcctcagactagtcaactttcttaatagtctgcatatttgtatattgcccagaaagggacactttttggaatatactttcttttttttaacttatttcgcattatattgtttacttaataactccaagcaaataaatgtacatctttatc

SEQ ID NO: 22457 - DNA, 9078 bp, Homo Sapiens
ctttaaacacttgtgcatcagtggaaccccaaagatacgttacatactggtcttcttcttgttcaactgtgtggtggtgaaaggtggtggggtcaatttctttctaatgtccttcaggaattgtacaattcggaacagcttctcatctttccacaggatagggtcttcatgttactttcctgcattggtcaaagatcacttagtaatagtggagtattagaaagcttacttaatctcttggataatttattgtcacctcttcagccacagttacccatgcataggaggacagaaggagtactagatattcccatgatcagttgggttgttatgctggtgtccaggttgctggattatgtggcaactgttgaagatgaagcagcagctgcaaagaaacctttgaatggtaatcagtggagttttattaacaataatctacacactcagagcttaaatagatcttctaaaggcagcagtagccttgatagattatattccagaaaaatcagaaagcagcttgttcatcataaacagcaacttaacctactaaaagcaaagcagaaggcattggtagaacagatggaaaaagaaaaaatacaaagtaacaaaggatcatcatataaactcctggtagaacaagcaaaactaaagcaggccacttcaaagcactttaaggatttaattcgtttacgtcggacagcagaatggtcccgttctaatttagacacagaagttacaacagcaaaagaaagtcctgagatagaaccatttccatttactctggcccatgagcgttgtatctcagtagtccagaaacttgttctgtttcttctctccatggactttacatgtcatgcagatctcttattgtttgtttgtaaggttcttgcacgcattgcaaatgccacgaggccaactattcatctgtgtgagattgtgaacgaaccccagctggaaagactgctgttacttttggttggaactgacttcaatagaggagatatatcttggggtggtgcttgggctcagtattccttaacttgcatgctacaagatattttagcaggagaattactggctccagtagccgcagaagccatggaggaaggaacagtgggtgatgatgtaggtgcgacagctggtgactctgatgactcccttcaacagtcctcagttcagttgctggaaactatagatgaacctttgacacatgacataacaggtgcacctcctctgtcctctttggaaaaagataaagaaattgaccttgagttacttcaggatctaatggaagttgacattgatcctttagatattgatttggaaaaggaccctcttgcagccaaggtttttaagccaataagcagtacatggtatgattattggggtgctgattatgggacctacaattacaacccttacattggaggtctgggaattcctgtagcaaagccaccagcaaacacggagaagaacggatcacagacagttagcgtttcagtctctcaggccctggatgctcgcctagaagttggacttgaacagcaagcagaactgatgttgaaaatgatgtctactctggaggcagattccattttacaggcattaacaaatacatctcctacattatcacagtctcccactggaacagatgattcacttctagggggtttacaagcagcaaaccaaaccagccagcttattatacagttatcatctgtcccaatgttaaatgtttgtttcaacaaacttttttccatgcttcaagtccatcatgttcagttggagtcacttctccaattgtggctcacactgagcctgaattctagttcaactggaaacaaagaaaatggagcagacatatttttatataatgctaataggatacctgttatttcattaaatcaagcatcaataactagctttctcacagtgttagcttggtatcccaatactttgctccggacatggtgccttgtgcttcatagcctaacactcatgacaaacatgcagcttaattctggttccagcagtgccattggaactcaggagagtactgctcatttgttggtttcagatccaaacctaattcatgtattagtgaaatttctttctggcaccagtccacatggaacaaatcaacacagtccacaggttggtcctacagctacacaagctatgcaagaatttcttactcgattacaagtgcatctttcttcaacatgtcctcagatattcagtgaatttttgctcaagctaattcatatactttcaactgaaaggggtgctttccagacaggccaaggacctctcgatgcccaagtgaagctcttagaattcactctggagcagaattttgaagtcgtttcagttagtactatttctgccgtgatagaatcggttacatttttagtgcaccactatatcacttgctcagacaaagtaatgtcaagaagtggatcagatagctccgtgggtgctcgagcatgctttgggggactctttgccaatcttattcgtccgggtgatgcaaaagcagtttgtggcgaaatgacaagagatcaactcatgtttgatttgttaaaacttgttaacattttagtgcagctgcctctttcaggcaatagggaatacagtgcaagagtgtctgtgaccacaaatacaacagatagtgtttcagatgaagaaaaagtctcaggaggcaaagatggcaatggaagcagtaccagtgttcaaggatcgcctgcatatgttgctgacttagtcttagccaaccaacaaattatgagccagattttgtctgctctgggcctgtgtaatagcagtgccatggcaatgataattggagcaagtggattacatctcactaaacatgaaaactttcatggtgggttggatgccatatcagttggggatggattatttaccatactgacaacccttagtaaaaaagcttctacagtccacatgatgctgcagccaattttaacatacatggcctgtggatatatgggcagacaaggctctcttgctacttgccagttatctgagccattattgtggttcattttgagagtattggatactagtgatgccttgaaagcatttcatgatatgggtggtgttcagctcatatgcaataatatggttactagtacaagggctattgtgaacactgcaagaagtatggtatcaactattatgaaatttcttgactctggtccaaataaagctgttgacagcacattgaaaacaagaatactagcttctgagcctgacaatgctgaagggattcataactttgcacccctcggtacaatcacatctagcagtcctactgcccaaccagctgaagtgctattgcaggccacacctcctcacagaagagctcgctctgctgcttggtcctacatctttcttccagaggaggcttggtgtgaccttaccattcaccttcctgcagcagtgctgcttaaggagatacatatccagcctcatcttgcatctcttgcaacctgcccttcctcagtgtctgttgaagtaagtgcagatggggtaaatatgctacctttgtccactcctgttgtcacaagtggcctcacctacataaaaattcagcttgtaaaagccgaagtagcttctgctgtctgccttagactacatcgtccacgggatgccagcacattaggcctttcacaaattaaattattggggctcactgcttttggtaccacctcttctgcaacagttaataatccattccttccatctgaagatcaggtatccaaaacaagtattggatggttacggttattacatcattgccttactcacataagtgatctagaaggaatgatggcaagtgcagctgcacctactgctaatctgctgcagacttgtgcggccttattgatgtcaccttactgtggaatgcattcacccaacatcgaggttgtgcttgtaaagataggactgcagtctactagaattggcctgaagctcatagacattctcctgagaaattgtgcagcatcaggcagtgatcctacagatttgaatagtcctttactttttggaagactaaatggactctcttctgactctacgatagatattctttaccagcttggaacaactcaggatcctggtacaaaagacagaattcaggccttgttaaaatgggttagtgattctgcaagagtggctgctatgaagagaagtggcaggatgaactacatgtgtcctaactcctcaacagtagagtatggtcttctgatgccatctccttctcatttgcactgtgtagcagccattctgtggcatagttatgagctgcttgtagaatatgacttaccagcactcctggaccaagagctctttgagttactttttaattggtccatgtctcttccctgcaatatggttttgaagaaagctgttgacagtctactttgctcaatgtgtcacgtacacccaaactatttttctttgctcatgggctggatgggaattacccctcctccagtgcaatgtcatcatagactgtccatgacagatgatagcaaaaagcaggatcttagttcatctttaacagatgactctaaaaatgcacaagcacctctcgcattaactgaatcacatttggctacccttgcttcctcttctcaatctcctgaagctattaaacaattactagactcaggtttgccttctcttcttgtgaggagtctggctagtttctgctttagccacatttctagctcagaaagcattgcccagtcaatagatatttcccaggacaaactcaggcgccatcatgtcccacaacaatgtaataagatgcctatcacagccgacctagttgctcctattcttaggtttttgacagaagttggcaatagccatattatgaaagattggcttggtggttctgaagtcaatccactatggacagcacttctgtttttattgtgtcactctgggtccacttctggaagccataatttaggtgcacaacagaccagtgcaagatcagcttctctttcttcagctgctacaacaggactgactactcaacagcgcacagcaattgagaatgcaactgttgcgttctttctacagtgcatttcatgccatcctaataatcaaaagctgatggcacaggttctttgtgaactatttcagacatctcctcaaagagggaaccttccaacatctgggaacatttcagggtttatacgaagattatttttacagttgatgctggaagatgagaaagtgacaatgtttcttcagtctccatgtccactgtacaaaggtagaattaatgctactagccacgtcatccagcatccaatgtatggagcaggccacaaattccgtactcttcatttgccagtctcaacaacattatcagatgttcttgacagagtgtcagatactccaagtatcacagctaaattaattagtgaacaaaaagatgacaaagaaaagaaaaaccatgaagagaaagaaaaagttaaagcggaaaatggatttcaagacaattacagtgttgttgttgcctctgggctgaagtctcaatctaaacgtgctgtgtcagctacaccacctcgcccaccatccaggagggggaggacaatacctgataaaataggaagtacttcaggagcagaggctgccaacaaaataattactgtcccagtgtttcacctgtttcacaaactcttggcaggccagccattgccagctgaaatgacacttgcccagcttttaactctcctatatgaccgaaaacttcctcagggttaccgctcaatagatctgactgttaaattgggatcaagagttataacagaccccagtctatcaaaaacagattcttataaaagactacaccctgaaaaagatcatggagacttacttgctagctgtccagaagatgaggctctcactccaggtgatgaatgcatggatgggatactggatgaatctttgcttgaaacctgtccaattcagtcaccattacaagtttttgcaggaatgggtggactggctcttattgctgaaagactacccatgctatatccagaagtaattcaacaggtgagtgctccagttgtaacatctaccactcaggaaaagccgaaggatagcgatcagtttgaatgggtgaccattgaacagtcaggggagttagtttatgaagcaccagaaactgttgcggctgaacctccacctatcaagtcagcagtacagaccatgtctcccatacctgcccattctttggctgcttttggattatttcttcgtcttccgggctatgcggaagtgctactgaaagagagaaaacatgcccagtgccttcttcgattggtattgggagtgacagatgatggagaaggaagtcatattcttcaatctccatcagccaatgtgcttccaacccttcctttccacgtccttcgtagcttgtttagcactacacctttgacaactgatgatggtgtacttctaaggcggatggcattggaaattggagccttacacctcattcttgtctgtctctctgctttgagccaccattccccacgagttccaaactctagcgtgaatcaaactgagccacaggtgtcaagctctcataaccctacatcaacagaagaacaacagttatattgggccaaagggactggctttggaacaggctctacagcttctgggtgggatgtggaacaagccttaactaagcaaaggctggaagaggaacatgttacctgccttctgcaggttcttgccagttacataaatcccgtcagtagtgcggtaaatggagaagctcagtcatctcatgagactagagggcagaacagtaatgcccttccttctgtacttctcgagcttctcagtcagtcctgcctcatcccagccatgtcatcttatctacgaaatgattcagttctggacatggcaagacatgtgccactctatcgggcactgctggaattgcttcgggccattgcttcttgtgctgccatggtgcccctattgttgcccctttctacagagaacggtgaagaggaagaagaacagtcagaatgtcaaacttctgttggtacattgttagccaaaatgaagacctgtgttgatacctataccaaccgtttaagatctaaaagggaaaatgttaaaacaggagtaaaaccagatgcgtctgatcaagaaccagaaggacttactcttttggtaccagacatccaaaagactgctgagatagtttatgcagccaccaccagtttgcggcaagcaaatcaggaaaaaaaactgggtgaatactccaagaaggcggctatgaaacccaaacctttgtcagtattaaagtcacttgaagaaaaatatgtggctgttatgaagaaattacagtttgatacgtttgaaatggtttctgaagatgaagatgggaaattgggatttaaagtaaattaccactacatgtctcaggtgaaaaatgctaatgatgcgaacagtgctgccagagctcgccgccttgcccaggaagctgtgacgctttcaacctcactgcctctgtcttcatcctctagtgtgtttgtacgctgtgatgaggagcgacttgatatcatgaaggttctaataactggtccagcggacaccccttatgcaaatggctgctttgagtttgatgtgtattttcctcaagattatcccagttcaccccctcttgtgaatctagagacaactggtggtcatagcgtgcgattcaatccaaacctttataatgatggcaaggtttgtttaagcatcttaaacacgtggcatggaagaccagaagagaagtggaatcctcagacctcaagctttttgcaagtgttggtgtctgtccagtcccttatattagtagctgagccttattttaatgaaccgggatatgaacggtctagaggcactcccagtggcacacagagttctcgagaatatgatggaaacattcgacaagcaacagttaagtgggcaatgctagaacaaatcagaaacccttcaccatgttttaaagaggtaatacacaaacatttttacttgaaaagagttgagataatggcccaatgtgaggagtggattgcggatatccagcagtacagcagtgataagcgggtaggcaggactatgtctcaccatgcagcagctctcaagcgtcacactgctcagctccgcgaagagttgctgaaacttccctgccctgaaggcttggatcctgacactgacgatgccccagaggtgtgcagagccacaacaggtgctgaggagactctaatgcatgatcaggttaaacccagcagcagcaaagaactccccagtgacttccagttatgagctgcatgatgtggacttcatagacacaaaggcttcgaagcacaagccaaatatgtcaatatttgtatgtaagaaactaattatgtaataggtaatgaaactgaaactatactatgcccttaaggagatccagtttaattcaaggtgatcttttatttacctgtacaggagtgtaaacttttttgtgcttttatttttcaattgtgagaaccactgattggtatgttcaacaaatttgtgtatacaaagaaatggataaatcactgctatataagggaaactaccttaggaaagaatgtttactgaatgtttattttatttttttttttttttactatagagtgaggggttgttaacaaagaatatatattggtcattcttacaactactatttaaagtcagcaacttttcactgaatttgatagattttatgtttggccatatcttcatgctcacatttgatttctgaagacctcctacatacacttcaataaaagttaaatggacatactccctcttttttgatttactggtacatttttaaaataataaatctgccataaaatgcattatatctggagacttgcacttgtatggatgaatttattacattcaacatatttaattttatgccttctaattctaagatgcagaaaaaaataaatgaacatgattttattctatgccaac

SEQ ID NO: 22458 - DNA, 1538 bp, Homo Sapiens
  misc_feature (11)..(11): n is a, c, g, or t
ggcgcacgccnccacgcccagctaatttttttttgtatttttagtagagacagggtttcaccacgttggccaggatggtctcgatctcttgacctcgtgatacacccgcctcggcctcccaaagtgctgggattacaggcataagccaccgcgcccggtcccctgtttctttaattactgttactgaaaggcatagcctttgaatgagttattaatccaaaatcttttgttttccattcttgctctagtcacagcttatttttccagaccatactgttctaagcctcaattacattaaggccaggaggccaccgaagaactccacatgccactgcactggcgggtggagcaagtcaagcagggcagctcatgaacgcccgggagtccaggaggcccgggtggggacgcctggatgacgtcactcgaggtgggcaggccccgcgcggggcgtgacgtcacgcgggcggtcccgtcagccgtgaggtcacctggtgggcgcggccaggccgaatccccagtgtcgtcacgggagggggcgggcccagagcgtgtcagtgcagccgaatcaaaacaagccggagacccgccttttccctccggctcgggagcgtctcgcttgcgccccgggcccgcggcgcccgcgcggctgcgagcctcgggtggccgcgtgccggctccaggaagccggagagggcgcggcggccaggatggcgcggcacgggccgtgcggctagacgggagccgagggaaccgccggctcgcgccctccgttctttcccggagccggcttcacgcagggccgggaacggccgtgcctctgggatccgccttcgctgacgccgggcacctacctggacgcgagcgagcgagatgcccaaccccaaaaacagcaaaggcggccgcaaaaacaagcgcgccaacagcagcggcgacgagcaggaaaatggagccggggccctggcagcggcgggcgcggcgggagcggcggccgggggggccctggcggcggcggccggttgcggggcggcggcggcgggcgcgccgggcgccggaggcgcggcgggcgccggaggcgcggggactggcgccgcgaacgctgcggccgccgcgggggctgcggccgcgggcgatgccaaaaacggtaagacggggctggcggggcgagcgccaacttcctccccgacggggacggcgcggtggcggggccctgggtggcgcgggcggtgcgtggacaatgcgagagtcaggaagtgctcaccccgcccctccgccccgccgcggctgccccttcgcggtccccacgcctggcggcggggacagatctgcggcccctgcccggtgtccgcgcggggggcagcccgcgccccacactctgaggggctcccggctgcggcagcgctgccctcgggcccagcctgctgcccgcgctggcactgccccgccgtgtgtgccgggccgaagggaggaaggaagggaggaaagagccgcccaagttgagaagaatgatccgattgaaaacttaggcaccggttaattct

SEQ ID NO: 22459 - DNA, 744 bp, Homo Sapiens
atggaggagcagccccagatgcaagacgccgacgagcccgcggactccggaggggaaggccgggcaggcgggccaccgcaggtcgccggcgcccaggcggcgtgcagcgaggaccgcatgaccctgctcctcaggctgagagcacagacaaaacaacaactcttagaatataaatcaatggttgatgcaagtgaagaaaaaactccagaacaaattatgcaagaaaagcaaatcgaagctaaaattgaagacctggaaaatgaaattgaagaggtaaaagttgcttttgagataaaaaagcttgcattagacaggatgagactttcaactgcacttaaaaaaaacctggagaaaattagcagacagtctagtgtgctcatggataacatgaaacacctattagagctaaataaattaataatgaaatcacagcaggaatcttgggatttagaggaaaaactgcttgatattagaaagaagagattgcaattaaaacaagcttcagaaagtaagcttttagaaatacagactgaaaagaacaaacagaagattgatttggacagtatggaaaactcagagaggataaagatcatacgacaaaacctacagatggagataaaaattactactgttattcaacatgtgttccagaaccttattttggggagtaaagtcaattgggcagaggatcctgcccttaaggaaattgttctgcagcttgagaagaatgttgacatgatgtaa

SEQ ID NO: 22460 - DNA, 1341 bp, Homo Sapiens
  misc_feature (69)..(69): n is a, c, g, or t
actggggcccacagtcagacatgagccactggtgggacagaaataggctcctggttctgtgtgatccanagttggtgcttttctgtctatccctagctgttggtcaccaccagctttctgcatattttctcacggtgcctctcatttcccagagccgcctggagcccaaggctgtacacgtgccctgtgctgattctctgcctaggaaaggaccatgcagctagagatcaaagtggccctgaacttcatcatctcctacttgtacaacaagctgccccggcgccgggcagacctgtttggggaggagctagagcggcttttgaaaaagaaatatgaaggccactggtaccctgagaagccactgaaaggctctggcttccgctgtgttcacattggggagatggtggaccccgtggtggagctggccgccaagcggagtggcctggcagtggaagatgtgcgggccaatgtgcctgaggagctgagtgtctggattgatccctttgaggtgtcctaccagattggtgagaagggagctgtgaaagtgctgtacctggatgacagtgagggttgcggtgccccagagctggacaaggagatcaagagcagcttcaaccctgacgcccaggtgttcgtgcccattggcagccaggacagctccctgtccaactccccatcgccatcctttggccagtcacccagccctaccttcattccccgctccgctcagcccatcaccttcaccaccgcctccttcgctgccaccaaatttggctccactaagatgaagaaggggggcggggcagcaagtggtgggggtgtagccagcagtggggcgggtggccagcagccaccacagcagcctcgcatggcccgctcacccaccaacagcctgctgaagcacaagagcctctctctgtctatgcattcactgaacttcatcacggccaacccggcccctcagtcccagctctcacccaatgccaaggagttcgtgtacaacggtggtggctcacccagcctcttctttgatgcggccgatggccagggcagcggcaccccaggcccgtttggaggcagtggggctggcacctgcaacagcagcagctttgacatggcccaggtatttggaggtggtgccaacagcctcttcctggagaagacaccctttgtggaaggcctcagctacaacctgaacaccatgcagtatcccagccagcagttccagcccgtggtgctggccaactgaccatctacctgcccgtggggccaggagcacccaagaccacagaaaagagaaaggaaaggccaaaaaaaagaggaaaagaaaaaaaaaaaaaa

SEQ ID NO: 22461 - DNA, 3888 bp, Homo Sapiens
atgggcgacccagcccccgcccgcagcctggacgacatcgacctgtccgccctgcgggaccctgctgggatctttgagcttgtggaggtggtcggcaatggaacctacggacaggtgtacaagggtcggcatgtcaagacggggcagctggctgccatcaaggtcatggatgtcacggaggacgaggaggaagagatcaaacaggagatcaacatgctgaaaaagtactctcaccaccgcaacatcgccacctactacggagccttcatcaagaagagccccccgggaaacgatgaccagctctggctggtgatggagttctgtggtgctggttcagtgactgacctggtaaagaacacaaaaggcaacgccctgaaggaggactgtatcgcctatatctgcagggagatcctcaggggtctggcccatctccatgcccacaaggtgatccatcgagacatcaaggggcagaatgtgctgctgacagagaatgctgaggtcaagctagtggattttggggtgagtgctcagctggaccgcaccgtgggcagacggaacactttcattgggactccctactggatggctccagaggtcatcgcctgtgatgagaaccctgatgccacctatgattacaggagtgatatttggtctctaggaatcacagccatcgagatggcagagggagccccccctctgtgtgacatgcaccccatgcgagccctcttcctcattcctcggaaccctccgcccaggctcaagtccaagaagtggtctaagaagttcattgacttcattgacacatgtctcatcaagacttacctgagccgcccacccacggagcagctactgaagtttcccttcatccgggaccagcccacggagcggcaggtccgcatccagcttaaggaccacattgaccgatcccggaagaagcggggtgagaaagaggagacagaatatgagtacagcggcagcgaggaggaagatgacagccatggagaggaaggagagccaagctccatcatgaacgtgcctggagagtcgactctacgccgggagtttctccggctccagcaggaaaataagagcaactcagaggctttaaaacagcagcagcagctgcagcagcagcagcagcgagaccccgaggcacacatcaaacacctgctgcaccagcggcagcggcgcatagaggagcagaaggaggagcggcgccgcgtggaggagcaacagcggcgggagcgggagcagcggaagctgcaggagaaggagcagcagcggcggctggaggacatgcaggctctgcggcgggaggaggagcggcggcaggcggagcgcgagcaggaatacaagcggaagcagctggaggagcagcggcagtcagaacgtctccagaggcagctgcagcaggagcatgcctacctcaagtccctgcagcagcagcaacagcagcagcagcttcagaaacagcagcagcagcagctcctgcctggggacaggaagcccctgtaccattatggtcggggcatgaatcccgctgacaaaccagcctgggcccgagaggtagaagagagaacaaggatgaacaagcagcagaactctcccttggccaagagcaagccaggcagcacggggcctgagccccccatcccccaggcctccccagggcccccaggacccctttcccagactcctcctatgcagaggccggtggagccccaggagggaccgcacaagagcctggtggcacaccgggtcccactgaagccatatgcagcacctgtaccccgatcccagtccctgcaggaccagcccacccgaaacctggctgccttcccagcctcccatgaccccgaccctgccatccccgcacccactgccacgcccagtgcccgaggagctgtcatccgccagaattcagaccccacctctgaaggacctggccccagcccgaatcccccagcctgggtccgcccagataacgaggccccacccaaggtgcctcagaggacctcatctatcgccactgcccttaacaccagtggggccggagggtcccggccagcccaggcagtccgtgccagtaaccccgacctcaggaggagcgaccctggctgggaacgctcggacagcgtccttccagcctctcacgggcacctcccccaggctggctcactggagcggaaccgcgtgggagtctcctccaaaccggacagctcccctgtgctctcccctgggaataaagccaagcccgacgaccaccgctcacggccaggccggcccgcagactttgtgttgctgaaagagcggactctggacgaggcccctcggcctcccaagaaggccatggactactcgtcgtccagcgaggaggtggaaagcagtgaggacgacgaggaggaaggcgaaggcgggccagcagaggggagcagagatacccctgggggccgcagcgatggggatacagacagcgtcagcaccatggtggtccacgacgtcgaggagatcaccgggacccagcccccatacgggggcggcaccatggtggtccagcgcacccctgaagaggagcggaacctgctgcatgctgacagcaatgggtacacaaacctgcctgacgtggtccagcccagccactcacccaccgagaacagcaaaggccaaagcccaccctcgaaggatgggagtggtgactaccagtctcgtgggctggtaaaggcccctggcaagagctcgttcacgatgtttgtggatctagggatctaccagcctggaggcagtggggacagcatccccatcacagccctagtgggtggagagggcactcggctcgaccagctgcagtacgacgtgaggaagggttctgtggtcaacgtgaatcccaccaacacccgggcccacagtgagacccctgagatccggaagtacaagaagcgattcaactccgagatcctctgtgcagccctttggggggtcaacctgctggtgggcacggagaacgggctgatgttgctggaccgaagtgggcagggcaaggtgtatggactcattgggcggcgacgcttccagcagatggatgtgctggaggggctcaacctgctcatcaccatctcagggaaaaggaacaaactgcgggtgtattacctgtcctggctccggaacaagattctgcacaatgacccagaagtggagaagaagcagggctggaccaccgtgggggacatggagggctgcgggcactaccgtgttgtgaaatacgagcggattaagttcctggtcatcgccctcaagagctccgtggaggtgtatgcctgggcccccaaaccctaccacaaattcatggccttcaagtcctttgccgacctcccccaccgccctctgctggtcgacctgacagtagaggaggggcagcggctcaaggtcatctatggctccagtgctggcttccatgctgtggatgtcgactcggggaacagctatgacatctacatccctgtgcacatccagagccagatcacgccccatgccatcatcttcctccccaacaccgacggcatggagatgctgctgtgctacgaggacgagggtgtctacgtcaacacgtacgggcgcatcattaaggatgtggtgctgcagtggggggagatgcctacttctgtggcctacatctgctccaaccagataatgggctggggtgagaaagccattgagatccgctctgtggagacgggccacctcgacggggtcttcatgcacaaacgagctcagaggctcaagttcctgtgtgagcggaatgacaaggtgttttttgcctcagtccgctctgggggcagcagccaagtttacttcatgactctgaaccgtaactgcatcatgaactggtga

SEQ ID NO: 22462 - DNA, 4775 bp, Homo Sapiens
cagtcgcgcgcggtgcagtcgggaggtggaggcaccggctgcattgttttcgggatcgaggggtgagggcgctatggcacccggctgcaaaactgagttacgcagcgtgacaaatggtcagtctaaccaaccaagtaatgaaggtgatgccatcaaagtttttgtgcgaattcgtcctcctgcagaaagatctgggtcagctgatggagagcagaacttatgcttatctgtgctgtcctccacgagtctccggctgcactccaaccctgagcccaagaccttcacgtttgatcatgttgcagatgtggataccactcaggaatctgtatttgcaactgtggctaaaagcattgtggagtcttgcatgagcggttataatggtaccatctttgcatatggacagactggctcagggaagacatttactatgatgggaccatctgaatctgataatttttctcataacctgagaggagtaatcccacgaagttttgaatatttgttttccttaattgatcgtgaaaaagaaaaggctggagctggaaagagtttcctttgtaagtgttcctttattgaaatctacaacgagcagatatatgatctactggactctgcatcggctggactgtacttaagggagcatatcaagaagggagtctttgttgttggtgcggtggagcaggtggtaacctcagctgctgaagcctatcaggtgctgtctggaggatggaggaatagacgtgtggcatcaacatcaatgaacagagaatcgtctaggtctcatgccgtctttacaattacaatagagtcaatggagaaaagtaatgagattgtgaatatacggacctccctactcaacctggtggatttagcaggatctgaaaggcaaaaagatacccatgcagaagggatgagattgaaggaagcaggtaacataaatcgatcattgagctgcctgggccaagtgattacagcacttgtcgacgtgggtaatggaaaacagagacatgtttgctacagagactccaaacttaccttcttactacgggattcccttggaggtaatgccaaaacagccataattgcaaatgttcatcctggatccaggtgttttggggaaaccctatcaacacttaactttgctcaaagagccaagctgattaaaaacaaggcagtagtaaatgaagacacccaaggaaatgtgagccagctccaagctgaagtgaagaggctcaaagaacaactggcggagcttgcttcaggacagacaccaccagaaagcttcctgaccagagacaaaaagaagactaactatatggagtatttccaggaagcaatgttattctttaagaaatctgaacaggaaaagaagtctctgatagaaaaagttacccaattagaagacctcaccctcaaaaaggaaaaatttattcaatctaataaaatgattgtgaaattccgagaggatcaaataatacgcttggaaaagctccacaaggaatcccggggaggttttctgcctgaggagcaggatcgtttgctctcagaattaaggaatgagattcaaactctgcgagaacaaatagagcaccaccccagagttgcaaagtatgctatggaaaatcattccctcagggaggagaatagaagactgagattattagagcctgtgaaaagagctcaagaaatggatgcccagaccattgcaaaactagaaaaagctttctctgaaataagtggcatggagaaaagtgacaaaaatcagcaaggattttcacctaaagctcagaaagagccatgtttgtttgcaaacactgagaagttaaaagcacaactcctgcaaattcagacagagctgaataattcaaagcaagaatatgaagaattcaaagaacttactaggaaaaggcagctagaattggaatcagagcttcagtctttgcaaaaagcgaaccttaatcttgaaaaccttttggaagcaacaaaagcctgcaagcggcaagaagtttctcagctgaataaaattcatgctgaaacacttaagattataactacaccaaccaaggcctaccaacttcattcccgaccagtaccaaaattaagccctgaaatgggaagctttggctctctatacactcagaattctagcatattagataatgatatattaaatgagccagttcctcctgagatgaatgaacaagcttttgaggccatttctgaagagcttagaacagtgcaggaacaaatgagtgctcttcaagccaaactggatgaagaagagcataaaaacctaaagcttcagcagcatgttgacaaactggaacatcattctacccaaatgcaggagcttttctcatcagaaagaattgattggaccaaacagcaggaagagcttctctcacagttgaatgtccttgaaaagcagcttcaagagactcaaactaaaaatgactttttgaaaagtgaggtacatgacctgcgagtagtccttcattctgctgacaaggagctttcttcagtgaaattggaatatagttcattcaaaacgaatcaggagaaagaattcaacaaactttctgaaagacacatgcatgtacagcttcaattagataatctcaggttagaaaacgaaaagctgcttgagagcaaagcctgcctacaggattcctatgacaacttacaagaaataatgaaatttgagattgaccaactttcaagaaacctccaaaacttcaaaaaagaaaatgaaactctgaaatctgatctgaataatttgatggagcttcttgaggcagaaaaagaacgcaataacaaattatcattacagtttgaagaagataaagaaaacagttctaaagaaatcttaaaagttcttgaggctgtacgtcaggagaaacagaaagagacggccaagtgtgagcagcagatggcaaaagtacagaaactagaagagagcttgcttgctactgaaaaagtgatcagttccctggaaaagtctagagattctgataagaaagttgtagctgacctcatgaaccagatccaggagctaagaacatcggtctgtgagaaaacagaaactatagacaccctgaaacaagaactgaaggacataaattgcaaatacaactctgctttggttgacagagaagagagcagagtgttgatcaagaagcaggaagtggatattctggatctgaaagaaacccttaggctgagaatactttctgaggacatagagagggatatgctctgtgaggacctggctcatgccactgagcagctgaacatgctcacagaggcctcaaaaaaacactcggggctgctgcagtctgcccaggaagaactgaccaagaaggaagccctgattcaggaacttcagcacaagctaaaccaaaagaaagaggaagtagaacagaagaagaatgaatataacttcaaaatgaggcaactagaacatgtgatggattctgctgctgaggatccccagagtcctaagacaccacctcactttcaaacacatttggcaaaactcctggaaacacaagaacaagagatagaagatggaagagcctctaagacttctttggaacaccttgtaacaaagctaaatgaagacagagaagtcaaaaatgctgaaatcctcagaatgaaggagcagttgcgtgaaatggaaaacctacgcctggaaagtcagcagttaatagagaaaaactggctcctgcaaggtcagctggatgatattaaaagacaaaaggaaaacagtgatcagaatcatccagataatcaacagctgaagaatgaacaagaagaaagtatcaaagaaagacttgcaaaaagtaaaatagttgaagaaatgctgaaaatgaaagcagacctagaagaagtccaaagtgccctttacaacaaagagatggaatgccttagaatgactgatgaagtcgaacgaacccaaactttggagtctaaagcattccaggaaaaagaacaactgagatcaaagctggaagaaatgtatgaagaaagagagagaacatcccaggagatggaaatgttaaggaagcaggtggagtgtcttgctgaggaaaatggaaagttggtaggtcaccaaaatttgcatcagaagattcagtacgtagtgcgactaaagaaggaaaatgtcaggcttgctgaggagacagaaaagttgcgtgccgaaaatgtatttttaaaagaaaagaaaagaagtgaatcttgaggattccggtcagctacctaggcatcaccttgtttgaagatgtttcttctcttttacaagtaagacctactcctggccacttaggagagctgaatttatggaccttaattattaaatgtttataaggtggtggtaaccacctcaagtttctgatgaacattctgcatccatatacaccctgtgacagtcagcagtctgctattaagtggcctacttcaaggctttgaatcaacttaagggaaaaccttttgtctttgtaaaaataaaagcctgtagctaaggtttacagtggacattagccagatcattttcttcttagattatgccataatctcctttgattcttatggaagttctaacaatatatggtggttccaacacctgcagtgagtttaatgactgacttagtagcaggtacaagaagcaaacttgttaatatagattatttttgtattcttactttaggtattttacttgagcattttccatgactgtaaataaagccattttttaagataaaaaaaaaaaaaaaaaa

SEQ ID NO: 22463 - DNA, 4955 bp, Homo Sapiens
ggctggccgaagttaggcggagccccgaggcgggggaggcggggccgggccggcgcagggagagtcactcaatggacaggcgagaaagcaggaccggcgcggcggggcggggccggccgagtccctagagctgggggcggggcggacccagcggaccagcggaccacctgggtgctgtcgtagttggaggtggcctgaggagctcagttccctcagcgcccgtagcttcggcggagtctgcgcgatgggcgacccggaaaggccggaagcggccgggctggatcaggatgagagatcatcttcagacaccaacgaaagtgaaataaagtcaaatgaagagccactcctaagaaagagttctcgccggtttgtcatctttccaatccagtaccctgatatttggaaaatgtataaacaggcacaggcttccttctggacagcagaagaggtcgacttatcaaaggatctccctcactggaacaagcttaaagcagatgagaagtacttcatctctcacatcttagccttttttgcagccagtgatggaattgtaaatgaaaatttggtggagcgctttagtcaggaggtgcaggttccagaggctcgctgtttctatggctttcaaattctcatcgagaatgttcactcagagatgtacagtttgctgatagacacttacatcagagatcccaagaaaagggaatttttatttaatgcaattgaaaccatgccctatgttaagaaaaaagcagattgggccttgcgatggatagcagatagaaaatctacttttggggaaagagtggtggcctttgctgctgtagaaggagttttcttctcaggatcttttgctgctatattctggctaaagaagagaggtcttatgccaggactcactttttccaatgaactcatcagcagagatgaaggacttcactgtgactttgcttgcctgatgttccaatacttagtaaataagccttcagaagaaagggtcagggagatcattgttgatgctgtcaaaattgagcaggagtttttaacagaagccttgccagttggcctcattggaatgaattgcattttgatgaaacagtacattgagtttgtagctgacagattacttgtggaacttggattctcaaaggtttttcaggcagaaaatccttttgattttatggaaaacatttctttagaaggaaaaacaaatttctttgagaaacgagtttcagagtatcagcgttttgcagttatggcagaaaccacagataacgtcttcaccttggatgcagatttttaaaaaacctctcgttttaaaactctataaacttgtcattggtaaatagtagtctattttcctctgcttaaaaaaaattttaagtatatcctttaaaggactgggggtttgctcaaaaggaaatccaaaacctattctaaacaatttgcatttatataattttcctgtttaacaacaagagtgtgacctaaatgcttttgtcttgtcactgaaataaaagatggcattatgtggttaagagcatggggcgaggggtcagacatgagtctaaggttctgcccttactccagtgtgtgacccttggcaagtcagttaatcttggtaaacctcggtgtacttatctttaaaatgggagtaatagtaggtcctaaattcatagagtggatattaggattaggatgcaaaaataaatgcttaaccaacactactactgttagcaccactactaattatcattcattgataatattaattgcaatgatgttgtaataaaatactctcatttccttaaaataattgtgattctaggtcctaggatctagaattagatctttgtatttttaatgcttaggggaagaatataagtatctccttaaaaagaacataattctcattcacgcaagaataagttctttgaattccttagtatgtagtgaagaaaatttagttgttagttgctttgggaagcctacttatggagtggaaaccaggaggttatcatggtagttgaccttgtaagaaaaatgattcttcttcagaaattaaaaacataactattgccagatttagctctggaatgtttagaatcaggctagaatagcattttccaaagaatattctaagagctattagctcctctagatattttgttgggggaaaaaggggattctgtggtcagatgagtttgggaaatgctgaacacttcattcttctttagcaagtacagtcagtacatcaaagactgagcagttcagtggtacataaatttatctcgccctgcatattcccaacatacttaacacagatgttttttacctgttaacatctcacccagctagtgttcctcagaacaaagattggaaaaagctggccgagaaccatttatacatagaggaagggcttacggactgagaaagggagaacatggtagggattattgaatcatttcaaatttataccaagcctgaatagtgtaccagcaattgacttaggctgtgtttctttatggttttaaaactcttgagctgttataagagatagttcttttaatgtgactatgcaacatgatagccaatggtgagggaaaaggaggtttctctagaagagtctgatgaaaggccgggaaccaaggtttttgagaagtctgcccctatttatttttagtaagtatcaagaggtagcctgagcctagttagagttagacctgtctttggatgaagaagtcttaatactgaaatactgaatttttaatacattattatttggtattctgtataccccttcaagcagttgtttcccattcccaacaaactgtactttatacaattctggatgctaaaacttagagattttctctttgcataaattttggctccattctttccataacaatctaatcaaaactgggagttctcaagtgaatgcaaaaggagcaggccataactttatttgttagagacactgtcagaaacttgagatcttttggcctatgataataccattaatttttgcattgcttcagtttgccaagtgtttttacatcatctcatttgatctcaaaacagcttgacagagcaactgttattgaaatattacagatggaaagaatgaggctcagggaagttaaatgacttggccaagatctgctcatcgtcactgtctgtacagtatttttttttagaggttgtaatgtctcagatttagtcctttaccatctatgttgatttgcttttgtctatttcctcattaattgaatatactttaaatatatatattaaagtatcaaaatatagagagacatttgaactgtattcaggtaatatgtttaaagatatttatatattgccatacaaaaacttaacatttaaaactgataatatctgtaatgacatcagaatgaaagaaaaaaaattgtacagtgtatattcctttgttttgaatccaaatctttttcataggtaatgacagatgccttaatgtgaagcttatttataatagcaataaacctaactggatttggatgaagaagtcttaatactgacatactggatttttaatgcactggtttgttatttggtattctatctctttttccaggcctccaggttgcacatttatttattatgttcaatactttggttcttagttcttaaagaatcaagaagttgtgtaatcttttaaaaatattatcttgcagataaagaaaaaaattaagagtgtgtttacaactgttttctcttttttacagtacatgtatttaaatcattgctataataaagttaagttcattaggaatataaaaacttgcagttctatgatagattgcatttattaaaaatgtttcattgtatcacatagaaatatggccaggaaggacttgagaagacagtttgatccattgcttttagacaggactgggttttgctgtccaattatatacaataatagtttttcttacaactaagctggccccagccttgtcttgatattaatacatgaaatttttataattgtctcattgtctcatttagaaacatccatatttttctgctttttctattgccattttttatttgtgcatgaattgattattgagaaaatgtagcagtttgcatatttaaaaattaatcattttgcattttacatttaaatatgctaacatcgctgtcatagaattcccaaatttcatttgtagatactgaactaagggctaatgtcaggagctgatttttaatgataaagctgcagatgggctaaataaaagccaaattaatcctacaatcaggtattatgtttttaaaccaagttgagtgaattggtagtggacttgggaaatcttccccagcagaatctggatgaatggcacagaattgaaatctctttgtttcccaccatttccctttaagtgctctgctcctttgtaaaaagttaaagatttgaaagagaatctcatattcccgaggcattaggaagaaaggatttaatcccttcaatttggggcttaatcttgtttaaaaaaatgtaagtgaagatggaaggctggagagaatgattgctttttgtacagttaaataaggtcacaatattcttacatactttgttttacaactgtgttttcattttttcaaatgtctggccatttagcaaagttatttactatttactgtgtacatagaaaggtttattatgtgtggtgtatctaaatttttttttgctgaaatacattatggtcaatcaagccaagcctgcatgtacagaatttgtttttttttcaaataaattagttgttttcttatttttttggcttagtatgttgaaataaactatggtatcttcatcattttgtacatttcctttttgaggaaggtttctttataagtgcaagggctaccctaataaaggaatgtatatacttacaaaaaaaaaaaaaaaaaaaaaa

SEQ ID NO: 22464 - DNA, 8035 bp, Homo Sapiens
cgaaaatcaccatcatcctcagggagccccctcgccctcggaaaacaaaaccagacatgatcctgggctcctgcttctgaaagatctgcccgaccgaggaggagggagcctaggttcaagtcgcaggaaaggtcacggcagggaagccccctcagcccctccgcgtcgcctccccgcgggccgcccctctcggccctgcgccccgcggccccgcagcctccgcgcggcctcccgccccatccccgccactttccccggagctgggccgcgaacacctcactattgatggtgtagcgctttaggggaaggaggtgattgtctaggagtaactgtatgtgcgctcagcacgggtcacaaccaccgtgggatccacttacagagaagatttgtggagagcttcagcctgtttatggtgttactgagaaaggaattgtggccatttgatataattctggatggaagacctcttatttgtattacattgaattagagcatttttgaaacgttggggttgttggagtggttggattttccctggaattgagtgagaaattcagaagactgaagcccaggctcactgtctacctttcacggaggcctagccgtgagaggacagaagaaggcacgtggcgaatcatgacagcggacaaagacaaagacaaagacaaagagaaggaccgggaccgagaccgggaccgagagagagagaaaagagacaaagcaagagagagtgagaattcaaggccacgccggagctgtaccttggaaggaggagccaaaaattatgctgagagtgatcacagtgaagacgaggacaatgacaacaatggagccaccacggaggagtccacgaagaagaataagaagaaaccaccgaaaaaaaagtctcgttatgaaaggacagataccggtgagataacatcctacatcactgaagatgatgtggtctacagaccaggagactgtgtgtatatcgtgtgtcggaggccaaacacaccgtatttcatctgtagcattcaagacttcaaactggtccacaactcccaggcctgttgcagatctccaactcctgctttgtgtgaccccccagcatgctctctgccggtggcatcacagccaccgcagcatctttctgaagccgggagagggcctgtagggagtaagagggaccatctcctcatgaacgtcaaatggtactaccgtcaatctgaggttccagattctgtgtatcagcatttggttcaggatcgacataatgaaaatgactctggaagagaacttgtcattacagacccagttatcaagaaccgagagctcttcatttctgattacgttgacacttaccatgctgctgcccttagagggaagtgtaacatctcccatttttctgacatatttgctgctagagagtttaaagcccgagtggattcatttttctacatattaggatataaccctgagacaaggaggctgaacagtacccagggggagattcgtgtcggtcctagtcatcaggccaaacttccagatctgcaaccatttccttctccagatggtgatacagtgacccaacatgaggaactggtctggatgcctggagttaacgactgtgacctccttatgtacttgagggcagcaaggagcatggcggcatttgcaggaatgtgtgatggaggctctacagaggacggctgtgtcgcagcctctcgggatgacaccactctgaatgcactgaacacactgcatgaaagcggttacgatgctggcaaagccctgcagcgcctggtgaagaagcctgtgcccaagctcatcgagaagtgctggaccgaggacgaagtgaaacgcttcgttaagggactcaggcagtacgggaagaacttcttcagaattagaaaggagctgcttcccaataaggaaacaggggagctgatcaccttctattactattggaagaagacccccgaagcagccagctcccgagcccatcgtaggcaccgcaggcaggccgtgttcaggaggattaagactcgcaccgcgtccacacccgtcaacacaccctccagacccccgtccagtgaattcttggacctaagttcagccagtgaagatgacttcgacagtgaggacagtgagcaggagctgaaggggtacgcctgccgccactgcttcaccaccacctccaaagattggcaccacggaggccgggagaacatcctgctttgcaccgactgtcgcatccacttcaagaaatacggtgagctcccgcccattgagaagcccgtggacccgccaccgtttatgttcaaacccgtcaaggaagaggatgatgggctcagtgggaagcatagcatgaggacacggcggagtcggggctcgatgtcgacactacgcagtggtcggaagaagcagccagccagccctgatggtcgcacctcacccatcaatgaagacatccgctccagcggccggaactcccccagcgctgccagtacctccagcaatgacagtaaagcagagacagtgaagaagtcggccaagaaggtgaaggaggaagcctcttcccctcttaagagtaacaaacgccagcgggagaaggtggcctctgatacggaggaggctgacaggaccagctccaagaagacaaaaacgcaggagatcagcaggcccaactcgccatctgaaggtgagggagagagttcagacagtcgcagcgtcaacgatgagggtagcagtgaccccaaagacatcgaccaggacaatcgcagcacgtccccgagcatccccagcccccaggacaatgagagtgactcggactcgtcagcccagcagcagatgctgcaggcccagcccccagccttgcaggctcccactggggtcaccccagctccctcctcagctcctccagggacccctcagctgcccacgccagggcccacgccctctgccactgcagttcccccacagggctcccccacggcctcccaggcccctaaccagccgcaggctcccacagcgcctgttccccacacccacatccaacaggcaccggccttgcacccccagcggccgccctcaccgcatcccccgccgcatccctcgccacatcccccactgcagcctctgactgggtcggcgggccagccttctgcaccctctcatgcccagcccccactgcacggtcagggcccacccggccctcacagcctgcaggctgggcccctgctgcagcacccaggccccccacagccctttggcctccctccccaggcctcccaaggccaggcccctctggggacctccccagcagcagcgtaccctcacacctccctgcagctgccagcctctcagtcagcgctgcagtcccaacagcctccacgggagcagcccctgccaccagggcccttggccatgccccacatcaagcccccgcctaccactcccatcccccagctggcggcgccacaggcccacaagcaccctccccacctctcggggccctcacccttctccatgaatgccaacctgcctccccctccagccctgaagcccctgagctccctgtccacacatcaccccccgtcggctcaccccccacccctgcaactcatgcctcagagccagccattgccctcctcgcccgcccagccccccgggctgacccagagccagaacctgcccccgccccctgcctcccacccccctacaggcctccaccaggtggccccccaacccccgtttgctcagcacccctttgtccctggaggccctcctcccatcacccctccgacctgcccctccacctctaccccaccggcgggacctggcacctcggcccagccaccctgctctggtgcggcggcttcaggaggcagcatagcgggggggtcgtcctgcccactccccaccgtccagatcaaggaggaggctctggacgacgctgaggagcctgagagcccccctcccccaccaaggagcccgtccccggagcccactgtggtggacacccccagtcacgccagccagtcagctaggttctacaaacacctggaccggggctacaactcgtgtgcccggacagacctgtacttcatgcctctggccgggtccaagctggccaagaagagggaggaggccattgagaaggccaagcgcgaggctgagcagaaagcccgagaggagcgagagcgggagaaggagaaggagaaggagcgggagcgggagcgagagcgggagcgcgaggcagagcgggcggctaaggcgtccagctcagcgcatgaaggtcgcctcagtgacccacagctcagtggtcctggccacatgcggccatccttcgagccaccaccaaccaccattgctgctgtgcccccctacatcgggcccgacacacctgcccttcggactctgagcgagtacgcccggccccacgtcatgtcgcccaccaaccgcaaccaccccttctacatgccccttaaccccacggaccccctgctggcctaccacatgcctggcctctacaacgtcgaccccaccatccgcgagcgggagctccgggagcgggagatccgagagcgggagatccgagagcgggagctgcgggagaggatgaagccgggcttcgaggtgaagcccccagagctggaccccctgcacccagccgccaaccccatggagcactttgcccggcacagcgccctcaccatccccccgaccgccgggccccacccttttgcttctttccacccgggcctgaaccccttggagagggagagactggccctggcgggcccccagctgcggcccgagatgagctaccctgacagactggcagccgagcgtatccacgcagagcgcatggcatcgctgaccagcgatcccctggcccgactgcagatgttcaacgtgactccgcaccatcaccagcactctcacattcactcccacctccacctccaccagcaggaccccctccaccaaggttcagcaggccccgttcacccgctggtcgaccccctgactgccggtccccacctggctcgcttcccctacccgcctggcactctccccaaccctctgcttggacagcccccacacgagcacgagatcgttcgccacccagttttcggcaccccctacccccgtgacctgcctggggccatcccaccccccatgtcagcagcccaccagctgcaggccatgcatgcccagtcggccgagctgcagagactggccatggagcagcagtggctgcatggacacccccacatgcatggtggccacctaccaagtcaggaagattattacagtcgactgaagaaagaaggtgacaagcagttataagttatttatttgttaacgctggctgtggaaaccccagttcttgggggagaaacaggactttttacataaaataggagctgcaaaagcaaaaagaatatcttctaaagatttctttatatatttaaaaacccacaactaaaaatgtatccacatagtagtgttcgtttgtcgagaggatttcctgagactggtttggatctccctgcatgacagtcccccagaaacttagtgagtcctggactggactgaacatccagaaagcttccctgcaatcttggggtttggctttagttttcttttccttgatttctcagtaggtgctagaatccagttcacacccttcactgtgcgtgcagacacactgacacactccgccacgagtgctccagagcccacgaggcttgcagatcgggggcataggaatttggaatccaagagctataatttttaaaaaaaaaaatcttttattttaatacattgtaggaaatcttcataattggagaaagttctgcagcatggctttttacgtctgtaaataaataattttagaacagcctttttttcttccataaactactattgtgatctattttttccagccatgtcactaattgtgaattcctaccaactattgacagaatacagagttgattttttaataaaaagttatatataattatccctttaattaaagggagcaaaggggcgtttcacatggacagaggcttggaccgaggcctggtcacagcagcgagcatccagggtttgcagggacgatgttacagactctgttttctgcctggcgtttcacttgtgtctgctcctagcctgtgctctgccagcagcacagacatctgctccatcagacctcttccattttgcacagggagtgcaggaggtgaatgttcactttctgttctccagtgtcactgttctgtttccacgggatggaaagcgcatgggcctgtgtccattgtagatttccttctagatttctgtgtacacacacttgattgttctggatgaatgtcttttttaatactccgaaaatttcatcatctaagaaaatgattccatacaaataactcagcacacaagtgacccaggacatatgcctgccaaagggatgtgttagaaggctgccttctcatgcgcattgtcacttggatcttgtggtgaggacggccccatctttcttgccacagattgaggccacttttgagcaagggagatcctggagttaagacaggtgttgggggcagcctgtattttaccctaggggcaggtctgcatggtgaccccacattgcactggtaaaccatttgagtcccactcttcatcctggaagtgggaactggagtcccacccacagtgcattcagaaagcatgctgtgtgggggctgcttctcaggaggccaggcccttctgagcggaaccgtcctggagagagcctgccctcgtttccaggctgcagccgtaacgcactttctcccaggctgagggcgggtgttctggggtgtctgccctctgtcggccctgcttcctgccaggacgtggcctcttccgatccttttctctcagacactggaggtctcttctgccattgtgctggtcccatcccaagaattgtaggacagagaccacactgggtcggcggacacaaagtccatccaggacccaggccgcagagggagcaggaagagttgctgatagtttgatctagaaaccagcagctactggctcaaattcaggttctggcgtcaaatagcgacatttccagtttctcttaaaaaccgtgtttggtttcagttgggataggcttgttttgtctgttgaaaatgtttctagttttttttctttcatttttctctcattccatttctgccttaactttagtttgttcacagggaggcaaagctgacatgaaccttttgtcgtgggacttcaggccacattggcttgaaggcattcgtttccttctggggtggggacaggccctcatggcaggcttgttcccgtggctctgagcgaggcctcttcctgctgggctcccagactcctgcatccaggcccccaccttctcggcttctggtttttctttctttttggtagaacacaacatctaccattcagttaaaccttctttatcccctcctttggcatccatttttccaaagaagagtcgagtcctctgaggtctgtgcttgaaaaccgtccgaaggcattcttgttagctttgcttttctccccatatcccaaggcgaacggctgagattcttccatctaaaaaaccctcgacccgaaaccctcaccagataaactacagtttgtttaggaggccctgaccttcatggtgtctttgaagcccaaccactcggtttccttcggattttcctccctttgttcggggtttggtttggctcctctgtgtgtgtccgtatcttgttcggtgtcctcgaggttgagcttcactccactgcggcagaggcagcgtgcacactcggatttgctacgtttctatatatcttgaagctaaatgtatatatgagtagtttgccatgagataacacagtgtaaacagtagacacccagaaatcgtgacttctgtgttctctccatttgagtattttgtaatttttttgaaatatttgtggacataaataaaaccaagctacactacacccttggaaaaaaaaaa

SEQ ID NO: 22465 - DNA, 2786 bp, Homo Sapiens
ggtgcgcggtagggccgtctctgacggaagccggggcgacggtcggagtccggaagaaaaacagtccgcgacagctaggcgcgtgatatccggccgcccgcagtgctctggccgggcgcccgctggccgggagacgcgaacctgccggaccaccgcgcggggacgacggcggccatgagctcgcggaagctgagcgggccgaaaggcaggaggctcagcatacacgtcgtgacttggaacgtggcttcggcagcgccccctctagatctcagtgacctgcttcagctgaacaaccggaacctcaatcttgacatatatgttattggtttgcaggaattgaactctgggatcataagcctcctttccgatgctgcctttaatgactcgtggagcagtttcctcatggatgtgctttcccctctgagcttcatcaaggtctcccatgtccgtatgcaggggatcctcttactggtctttgccaagtatcagcatttgccctatatccagattctgtctactaaatccacccccactggcctgtttgggtactgggggaacaaaggtggagtcaacatctgcctgaagctttatggctactatgtcagcatcatcaactgccacctgcctccccacatttccaacaattaccagcggctggagcactttgaccggatcctggagatgcagaattgtgaggggcgagacatcccaaacatcctggaccacgacctcattatctggtttggagacatgaactttcggatcgaggactttgggttgcactttgttcgggaatccattaaaaatcggtgctacggtggcctgtgggagaaggaccagctcagcattgccaagaaacatgacccgctgctccgggagttccaggagggccgcctactcttcccgcccacctacaagtttgataggaactccaacgactatgacaccagtgagaaaaaacgcaagcctgcatggaccgatcgcatcctgtggaggctgaagcggcagccctgtgctggccccgacactcccataccgccggcgtcacacttctccttgtctctgaggggctacagcagccacatgacgtacggcatcagcgaccacaagcctgtctccggcacgttcgacttggagctgaagccattggtgtctgctccgctgatcgtcctgatgcccgaggacctgtggaccgtggaaaatgacatgatggtcagctactcttcaacctcggacttccccagcagcccgtgggactggattggactgtacaaggtggggctgcgggacgttaatgactacgtgtcctatgcctgggtcggggacagcaaggtctcctgcagcgacaacctgaaccaggtttacatcgacatcagcaatatccctaccactgaagatgagtttctcctctgttactacagaaacagtctgcgttctgtggtggggataagaagacccttccagatcccgcctggctccttgagggaggacccactgggtgaagcacagccacagatctgagccaggatgggagtgaatcccaggcggaggccagagctggcagccagctctgcctttccactgccgggagtgctgggggcccagcctggccccctgaagagacagccaagtgtcgtccacatactcctcccagagtgagctctaaccaggctcatttgctctctccactactcatctctggaattagccgcttaaatacaggtttttgttgctgagatgtgagtgaaaccagctagtgtgtcaacagtgaagacctggggacagttctgcgtctcatttctggattcctaccccctcttctagtcttgcccaagtagtcctgccaggcacatgccccatttggcacaggcctgcattcttgtcgtgccgtcctgggcctcaggctgtctgggaggggagatgctcacatttgtacaggctacatagactggtgcaagcagtgctggattccaggagtcttggcatctcatagcttgtccccgtgaggagtgagcagagggtctgggatttctgctttcagcaaaagcagtctgactcagtgggcagaatggaggggcccctctagccaggctcttacgccatggttatgagcaggttgatgagggtccttcggccagcacaaccttcctccctactcacggcatggagtctgactgcatggaagttccagatcctgacagagagaactgggaaggatccaggttcgcttccgttggtagcttgagtcccatgcctccaccctgccatctgaggaaggggtgacaagtggtcaaggagctgtggccacagacttttccagggtggtccttggcaggtgaggtgcgtctgtcccacccttgtcaggagccattgacgacgggccccccctggaccccccgggacctcagagtgggggcaggcagaagggagaaccagctcaagacattttggaggatctggccctggggttcttcagagaacaccctctaggggctttggggacatggcctgtccccacatccagcacttgcctccgccatggtcactcggcagcccttttcccaggagaagacacctctgggagcctgctcagtgcttgtcctgccatcctgtgtcctgggactgagggttactccagttgctctgtgttgcatactctcccccgcaagcctgtgtatgaagaattgtcccctggcttccagcaggccatggctggctgttttgtgactgttacattgtgcaggggtaattattagcgtggcttttaaaaaaaaaaaaaaaaaaaa

SEQ ID NO: 22466 - DNA, 3015 bp, Homo Sapiens
ggtgcgcggtagggccgtctctgacggaagccggggcgacggtcggagtccggaagaaaaacagtccgcgacagctaggcgcgtgatatccggccgcccgcagtgctctggccgggcgcccgctggccgggagacgcgaacctgccggaccaccgcgcggggacgacggcggccatgagctcgcggaagctgagcgggccgaaaggcaggaggctcagcatacatcaggaggtctgcctgatcccatggtgaaccccgggaatccgaaatcagattgagataagatcctttagggaagtgacttagcctggtctcttgcctgctctttcacggggaacaacgctaatcgcccacttagtctaagttacgatgcttggatttgctgctaatcgtcggatttgagagttggaacaagaaatccggacttttgctctccatcctcttagacatacacgtcgtgacttggaacgtggcttcggcagcgccccctctagatctcagtgacctgcttcagctgaacaaccggaacctcaatcttgacatatatgttattggtttgcaggaattgaactctgggatcataagcctcctttccgatgctgcctttaatgactcgtggagcagtttcctcatggatgtgctttcccctctgagcttcatcaaggtctcccatgtccgtatgcaggggatcctcttactggtctttgccaagtatcagcatttgccctatatccagattctgtctactaaatccacccccactggcctgtttgggtactgggggaacaaaggtggagtcaacatctgcctgaagctttatggctactatgtcagcatcatcaactgccacctgcctccccacatttccaacaattaccagcggctggagcactttgaccggatcctggagatgcagaattgtgaggggcgagacatcccaaacatcctggaccacgacctcattatctggtttggagacatgaactttcggatcgaggactttgggttgcactttgttcgggaatccattaaaaatcggtgctacggtggcctgtgggagaaggaccagctcagcattgccaagaaacatgacccgctgctccgggagttccaggagggccgcctactcttcccgcccacctacaagtttgataggaactccaacgactatgacaccagtgagaaaaaacgcaagcctgcatggaccgatcgcatcctgtggaggctgaagcggcagccctgtgctggccccgacactcccataccgccggcgtcacacttctccttgtctctgaggggctacagcagccacatgacgtacggcatcagcgaccacaagcctgtctccggcacgttcgacttggagctgaagccattggtgtctgctccgctgatcgtcctgatgcccgaggacctgtggaccgtggaaaatgacatgatggtcagctactcttcaacctcggacttccccagcagcccgtgggactggattggactgtacaaggtggggctgcgggacgttaatgactacgtgtcctatgcctgggtcggggacagcaaggtctcctgcagcgacaacctgaaccaggtttacatcgacatcagcaatatccctaccactgaagatgagtttctcctctgttactacagaaacagtctgcgttctgtggtggggataagaagacccttccagatcccgcctggctccttgagggaggacccactgggtgaagcacagccacagatctgagccaggatgggagtgaatcccaggcggaggccagagctggcagccagctctgcctttccactgccgggagtgctgggggcccagcctggccccctgaagagacagccaagtgtcgtccacatactcctcccagagtgagctctaaccaggctcatttgctctctccactactcatctctggaattagccgcttaaatacaggtttttgttgctgagatgtgagtgaaaccagctagtgtgtcaacagtgaagacctggggacagttctgcgtctcatttctggattcctaccccctcttctagtcttgcccaagtagtcctgccaggcacatgccccatttggcacaggcctgcattcttgtcgtgccgtcctgggcctcaggctgtctgggaggggagatgctcacatttgtacaggctacatagactggtgcaagcagtgctggattccaggagtcttggcatctcatagcttgtccccgtgaggagtgagcagagggtctgggatttctgctttcagcaaaagcagtctgactcagtgggcagaatggaggggcccctctagccaggctcttacgccatggttatgagcaggttgatgagggtccttcggccagcacaaccttcctccctactcacggcatggagtctgactgcatggaagttccagatcctgacagagagaactgggaaggatccaggttcgcttccgttggtagcttgagtcccatgcctccaccctgccatctgaggaaggggtgacaagtggtcaaggagctgtggccacagacttttccagggtggtccttggcaggtgaggtgcgtctgtcccacccttgtcaggagccattgacgacgggccccccctggaccccccgggacctcagagtgggggcaggcagaagggagaaccagctcaagacattttggaggatctggccctggggttcttcagagaacaccctctaggggctttggggacatggcctgtccccacatccagcacttgcctccgccatggtcactcggcagcccttttcccaggagaagacacctctgggagcctgctcagtgcttgtcctgccatcctgtgtcctgggactgagggttactccagttgctctgtgttgcatactctcccccgcaagcctgtgtatgaagaattgtcccctggcttccagcaggccatggctggctgttttgtgactgttacattgtgcaggggtaattattagcgtggcttttaaaaaaaaaaaaaaaaaaaa

SEQ ID NO: 22467 - DNA, 3339 bp, Homo Sapiens
gccgccttggtgcagcgtacaccggcactagcccgcttgcagccccaggattagacagaagacgcgtcctcggcgcggtcgccgcccagccgtagtcacctggattacctacagcggcagctgcagcggagccagcgagaaggccaaaggggagcagcgtcccgagaggagcgcctcttttcagggaccccgccggctggcggacgcgcgggaaagcggcgtcgcgaacagagccagattgagggcccgcgggtggagagagcgacgcccgaggggatggcggcagcgtcccggagcgcctctggctgggcgctactgctgctggtggcactttggcagcagcgcgcggccggctccggcgtcttccagctgcagctgcaggagttcatcaacgagcgcggcgtactggccagtgggcggccttgcgagcccggctgccggactttcttccgcgtctgccttaagcacttccaggcggtcgtctcgcccggaccctgcaccttcgggaccgtctccacgccggtattgggcaccaactccttcgctgtccgggacgacagtagcggcggggggcgcaaccctctccaactgcccttcaatttcacctggccgggtaccttctcgctcatcatcgaagcttggcacgcgccaggagacgacctgcggccagaggccttgccaccagatgcactcatcagcaagatcgccatccagggctccctagctgtgggtcagaactggttattggatgagcaaaccagcaccctcacaaggctgcgctactcttaccgggtcatctgcagtgacaactactatggagacaactgctcccgcctgtgcaagaagcgcaatgaccacttcggccactatgtgtgccagccagatggcaacttgtcctgcctgcccggttggactggggaatattgccaacagcctatctgtctttcgggctgtcatgaacagaatggctactgcagcaagccagcagagtgcctctgccgcccaggctggcagggccggctgtgtaacgaatgcatcccccacaatggctgtcgccacggcacctgcagcactccctggcaatgtacttgtgatgagggctggggaggcctgttttgtgaccaagatctcaactactgcacccaccactccccatgcaagaatggggcaacgtgctccaacagtgggcagcgaagctacacctgcacctgtcgcccaggctacactggtgtggactgtgagctggagctcagcgagtgtgacagcaacccctgtcgcaatggaggcagctgtaaggaccaggaggatggctaccactgcctgtgtcctccgggctactatggcctgcattgtgaacacagcaccttgagctgcgccgactccccctgcttcaatgggggctcctgccgggagcgcaaccagggggccaactatgcttgtgaatgtccccccaacttcaccggctccaactgcgagaagaaagtggacaggtgcaccagcaacccctgtgccaacgggggacagtgcctgaaccgaggtccaagccgcatgtgccgctgccgtcctggattcacgggcacctactgtgaactccacgtcagcgactgtgcccgtaacccttgcgcccacggtggcacttgccatgacctggagaatgggctcatgtgcacctgccctgccggcttctctggccgacgctgtgaggtgcggacatccatcgatgcctgtgcctcgagtccctgcttcaacagggccacctgctacaccgacctctccacagacacctttgtgtgcaactgcccttatggctttgtgggcagccgctgcgagttccccgtgggcttgccgcccagcttcccctgggtggccgtctcgctgggtgtggggctggcagtgctgctggtactgctgggcatggtggcagtggctgtgcggcagctgcggcttcgacggccggacgacggcagcagggaagccatgaacaacttgtcggacttccagaaggacaacctgattcctgccgcccagcttaaaaacacaaaccagaagaaggagctggaagtggactgtggcctggacaagtccaactgtggcaaacagcaaaaccacacattggactataatctggccccagggcccctggggcgggggaccatgccaggaaagtttccccacagtgacaagagcttaggagagaaggcgccactgcggttacacagtgaaaagccagagtgtcggatatcagcgatatgctcccccagggactccatgtaccagtctgtgtgtttgatatcagaggagaggaatgaatgtgtcattgccacggaggtataaggcaggagcctacctggacatccctgctcagccccgcggctggaccttccttctgcattgtttacattgcatcctggatgggacgtttttcatatgcaacgtgctgctctcaggaggaggagggaatggcaggaaccggacagactgtgaacttgccaagagatgcaatacccttccacacctttgggtgtctgtctggcatcagattggcagctgcaccaaccagaggaacagaagagaagagagatgccactgggcactgccctgccagtagtggccttcagggggctccttccggggctccggcctgttttccagagagagtggcagtagccccatggggcccggagctgctgtggcctccactggcatccgtgtttccaaaagtgcctttggcccaggctccacggcgacagttgggcccaaatcagaaaggagagagggggccaatgagggcagggcctcctgtgggctggaaaaccactgggtgcgtctcttgctggggtttgccctggaggtgaggtgagtgctcgagggaggggagtgctttctgccccatgcctccaactactgtatgcaggcctggctctctggtctaggccctttgggcaagaatgtccgtctacccggcttccaccaccctctggccctgggcttctgtaagcagacaggcagagggcctgcccctcccaccagccaagggtgccaggcctaactggggcactcagggcagtgtgttggaaattccactgagggggaaatcaggtgctgcggccgcctgggccctttcctccctcaagcccatctccacaacctcgagcctgggctctggtccactactgccccagaccaccctcaaagctggtcttcagaaatcaataatatgagtttttattttgtttttttttttttttttgtagtttattttggagtctagtatttcaataatttaagaatcagaagcactgacctttctacattttataacattattttgtatataat

SEQ ID NO: 22468 - DNA, 2165 bp, Homo Sapiens
tcggtgaacgatgaagggccggcggcggcgacgccgagagtactgcaagttcgcgctgctgttggtgctgtacacgctggtgctgttgctcgtcccctccgtattggacggcggccgcgacggggacaagggcgccgagcactgccccggcctgcagcgcagcctgggagtgtggagcctggaggcggcggcggccggcgaacgcgagcagggagcggaggcgcgggccgccgaggaagggggcgcgaaccagtctcctcggttcccaagcaacctcagcggcgctgtcggggaggcagtgtctcgcgagaagcagcacatctacgtgcatgccacctggcgcaccggctcgtccttcctgggcgaactctttaaccagcacccggacgttttctacttgtatgagcccatgtggcatctatggcaggcgctgtatccgggcgacgccgagagcttgcagggcgcgctgcgcgacatgctgcgttcgctcttccgctgcgacttctccgtgctgcggctgtacgcgccgccgggggaccccgctgcgcgcgccccggacacggccaatcttaccacggccgccctcttccgctggcggactaacaaggtcatctgctcgccgccactgtgtcctggcgcaccccgtgcccgggccgaggtgggcctcgtcgaggacaccgcctgcgagcgcagctgcccacccgtggcgatacgcgccctggaggccgagtgccgaaagtacccggtggtggtcatcaaggacgtgcgcctgctcgatctgggcgtgctggtgcccctgttgcgtgatccaggcctcaacctgaaggtggtgcagcttttccgcgacccgagggcggtgcacaactcgcgcctcaagtctaggcagggactgctgcgcgagagcatccaggtgctgcgcacccgccagaggggcgaccgcttccaccgtgtgctgctggcgcacggcgtgggtgctcgccccgggggccagtctcgcgcgctgcccgccgcgccgcgcgccgatttcttcctgaccggtgcgctcgaggtgatctgcgaagcctggctgcgcgatctgcttttcgcgcgcggcgcgcccgcctggctgcggcgccgctacctgaggctgcgctatgaggacctggtgcggcagccacgcgcccagctgcgccgcctgctgcgcttctccgggctacgcgcgctcgcagcgctcgatgccttcgcgctcaacatgactcgcggcgcggcctacggcgccgaccggcccttccacctgtcagcgcgcgacgcccgggaggcggtgcacgcctggcgcgagcgcctgagccgagagcaggtgcgccaggtggaggtcgcctgcgctccagccatgcgtctgctcgcctaccctcgcagcggagaggagggcgacgcggagcagcccagggaaggggagacgccgctggagatggatgccgacggcgccacgtagcctcccatccctgtccccggcacggatccgggtcagtcaccacgaacaggggcactcggcatgctgccccagcactggagaagcagcgctgtgggggcaatctgtcacactctcagagtctgggacttgacttgctaccaacaactgctgtgcaattctgctgagcaggaatatcatgagctgttcaataatgacggacgcattggttgagatgaagtttccagtaaggaagtgacagtgcaatgtggatatttatggctgtaaaataggaagagctttagttcccaggctgaacctgccactgctggagccatttcaacaaggcatcctcacaacaaagaagagatgtgatttggtaccatttcacaccagcaggtgtctggacgaaaacatcaatgtgaataagggccaagtgcagtcctgtcttgattaaattacttaataatattattaaataataataggtctgggcagtattgtttttaacctgactcatccagctgtccttcaaatagctccgtctccctctacccagaactgatttttaaaaagaagtaatttttctccctgggctgggaaaaccctaatgaactgaaacacacttttactttaaaatttttctgtctggcgtttttgtaatcatactattaaatgactctggagtcatgttaatgaaaaaaaaaaaaaaaaaaaa

SEQ ID NO: 22469 - DNA, 5921 bp, Homo Sapiens
ccagacatggcggaagaggaggtggccaagttggagaagcacttgatgcttctgcggcaggagtatgtcaagctgcagaagaagctggcggagacagagaagcgctgcgctctcttggctgcgcaggcaaacaaggagagcagcagcaagtccttcatcagccgtctgctggccatcgtggcagacctctacgagcaggagcagtacagcgatctgaagataaaggttggggacaggcacatcagtgctcacaagtttgtcctggcagcccgcagtgacagctggagtctggctaacttgtcttccactaaagagttggacctgtcagatgctaatcctgaggtgacggtgacaatgcttcgctggatctatacagatgagctggagttcagagaggatgatgtgttcctgactgaactgatgaaactagcaaatcggtttcagctacagctcctcagggagagatgtgagaagggtgttatgtctctagtgaatgtcaggaactgtattcgcttctaccagacggcagaggagctgaatgccagcacactgatgaactactgtgcagaaattattgcaagtcattgggacgacctgaggaaggaggatttcagcagcatgagccctcagttgttatacaaaatgatcaaatccaagacagagtacccgctacataaagccatcaaagtggagagagaagacgtggtctccctgtatctgattgaaatggattcccagctccctgggaagctgaatgaagcggaccataacggggacctggcattagacctagccctctcacgacgactggagaatattgccaccacgctggttagtcacaaagctgatgtggcatggtggccaagagtgctggagctgttacacaaagggatccaagaggatctctttgctgccactttcctcattaagaatggggcctttgtcaacgctgctacactagggtgccaggagacaccactgcaccttgtggccttgtacagttcaaggaaccactcagcagatgtgatgtctgagatggcgcagattgcagaggcccttctgcaggctggtgccaaccccaacatgcaggacagcaagggaaggacccctttacatgtgtccatcatggccggggatgaatatgtgttcagtcacctgctgcagtgcaaacaactagatttagaactcaaagaccacgagggcagcacggctctgtggctggcagtgcagcatatcacagtgtcttctgaccagtctgtgaaccccttcgaagatgtccccgtggtaaatgggacttcatttgatgagaacagctttgcagccagactcatccagcgcggcagccacacagacgcacctgacacggcgacaggaaactgtttactacagcgggcagctggagcaggaaacgaggcagcagctcttttcctggcaaccaacggtgcccatgtcaaccacagaaacaagtggggagaaaccccgttgcacacagcgtgtcggcatggcctggccaacctcacagcagagctcctgcagcaaggcgccaacccaaacctgcagacggaggaagctctgcctctgccaaaggaggccgcatccctgaccagcttggcggacagcgtccatctgcagacgccactgcacatggcgatcgcctataaccatccggatgtggtgtctgtcatcctggagcagaaagccaatgctcttcatgccaccaacaacttgcagatcattccggacttcagcctcaaagattcccgagaccagactgtgctgggcctggcattatggactggcatgcacacgatcgcagcccagctgctgggctctggagccgccatcaatgacaccatgtcggatgggcagacgctactacacatggccatacagcggcaggacagcaagagcgcactcttcctgctggagcaccgggcagatataaatgtcaggcctcaggccggggagacagccctccagctggccatcagaaaccagcttccactcgtagttgatgcaatatgcacccgaggggctgacatgtctgtgccagatgaggaggggaaccccccgctgtggcttgcattggcaaacaatctggaggacatcgcatccactctggtcagacatggctgtggtgccacatgctggggtccgggacctggtgggtgccttcagacgctcctgcacagagccattgatgagaacaacgagcccaccgcctgctttcttattcgcagtggctgtgacgtgaacagtcccagacaaccaggcgccaatggagaaggagaggaagaggctagagatgggcagacccctttgcatttggcagcctcttgggggctggagacagtacagtgtcttctggagtttggtgccgacgtgaacccacaggatgcagaaggaagaaccccatgccacgtggccatcagcagccaacacggtgtcatcattcagctgttggtttctcacccgatatccagtttgaatgtacgggacaaacaagggctgaccccgtttgcctgtgccatgactttcaaggacaacaagtcagccgaggccattctcaaacgggggtccggggctgctgagcaggtggataacaagggccggaattcccttcatgtggcagttcagaactctgatattgaaagtgtgctgtccctgatcagtgtccacgctaatgtgaattcaagagcccaggatgcccccaagttgacccccctgcacctggttgtccaagaaggctcagaaattattgtccgcaatttgcttcttgcgggagccaaagtgaccgaattaaccaagcatcgcaagactgccctccatcttgctgcccaggaggacctgcccaccatctgctcagtcctcctagagaatgccgtggactttgctgccgtggatgagaatggaaacaatgctcttcatcttgctgtaatgcacggccggctcaacaacatccgggttctcctgacagagtgcacagtggacgccgaagcctttaatctcagaggccagtcaccactgcacattttgggacaatatggcaaggagaatgcagcggccatctttgatctcttcctagaatgcatgccggggtatcctctggacaagccggatgcagacggcagcacggtgctgctcctggcatacatgaaagggaacgccaacttgtgccgcgccatcgtccggtcgggggctcgcctcggggtgaataacaaccagggagtcaacatcttcaactaccaggtcgccaccaagcagctcctgttccgactgctggatatgctgtccaaggagcccccgtggtgtgacggctcctactgctatgagtgcactgccaggttcggagtcgccactcgcaaacaccactgtcgtcactgcggacgtcttctttgccataaatgctcgaccaaggagattcctattataaagtttgatctgaacaagcctgtgcgggtttgcacaatttgttttgatgtactgactctgggtggggtttcttagtgagcccccggaggtccaggcacgtccttggtcacctcccagcagcttctctctcaccagcctgacccacccagagcaggagctggcgggtgtcttcctgcggcaatagacttggacgattaaggaccatggtgtgatagatccatgtcaaatgatcccatatgattgtcagtgtgtgtgtcagactgtgatcgatttcactagatgtctaactcatcagcccagccattggcctaagtggtaaatgtgattaggaattagacctctccccattctgctagcaacatacaggacacttggaaaaccatttccccttccagtagcttggtgtccatcccagagcattcatgaagtcttcccgcctggctgactgatgagcagagcctctcagcgtaggaagctggctgcttaatgagctggctttactctagggtaagtggctgtggacttttctgcacagtgttttcataaagataataggatcctcttgccctgaagtcttttttctttttacgctaagctgtatttttagtgagctaccccttttaaaaaggtgaaatctttcttaacagggttcaaagatgagagctgaaaaatcgtggccttaacaactgaaagctttacagtgttcatgctactgaggtgtcaggagtgcagctgggccgcttgacacctcgtagcagccgtctcattctctcgtcttgctgcgtcctgtctgtggagtcctcagtcactctgctgttggagagtgctggaggaaatgcacttttactgtgctgcactttttatagagctgcattgtcggtgattccagtttaaaatccatattcaaaatacctaacacatccctgcatcagtgattctaatgatcagctttgactggacctcagctcacacgatctccaaggaaaactctacagggcatcttttagagcagagatcatacaggccagtgatgagaggggagtcaccaaggcttcagcccaagggcatctccagcctcaggccggcaggtcctatgtccttgacacaaacgttcttgctgaaatcctccctagtgatgctgcgagtgctgttggtcccagttctgtgtagcttgccctgccccatgaagggccaccagccaagggccctggccacgtgtgcgccaccttactttgggaagtctctggcttgtgtgctggatgaggctgccagaacttgttgggcgttcatcgctgttagtacatatattaaccgtgagtgttaaacttttcttttgaaggtttggcagtttctaaaaaatgcacatttaaagagaagcatctaccacggctttaaaacaaaacaactctgagatgaacaatatgtgttatactcagagattaacaatctcaatcatacatactgattctttcagacatttaataaccactacatttttttgcattaatgaagtttgactatatgtgtaaagggcctaaatattttcgcacagcctgttctttgttcattctttctggatagtgtgtcctctgtattgcggtagattatacatctgttgcctaaatatgtgtgtaatgagctgataaactggagtactacttaaaaaaagtctgtgatttataagatgtatatgcttctatgtgatataagcttgtcacaatgtttaaaggaaacaatgaattagaagggatcccccgtcccagtctgacatattcatacagatgtttaaagaaaactctgctagtcttgcaaacattggccatgtgagcatgtggcagttccatttctattacctggaaaggccataaggaagcaggcagggcttaggtagcttggttacctaagttagaaagtaagagaatcatggttcggatatgaattgaagtgggtggtacatggatacctgttctttaaaaggaatgtggagatgagtcaagggtgaggccgattgttctgcccatgccctaccataccaatttcaataacaatcttgcctgtcattgcactcagaatcttaagatcatgtttcaaatatgttgattcaaacttgcttctaagcctgagtccagggatagcaatggtactgaccagctatggactggagaacattgagtcctgttttccattggcttcagggcgcatccatgtggatataggaaaagcctctttccacagacttaggaagccccccgacccacgcggacgctcgctgggctgcactcagcaggctgcttgagtgggagctgactccaacatgccctgccctggctgggactaggcatgcttccagcccttcccgtgctctccctgctgtcaacacttgcgtacaaacctgcctagctgttgtaagttttcatcagtagcttaagtactagtagcaaaaacttaaattcattcagaaagttgccacttctgaatgagtagagcag

SEQ ID NO: 22470 - DNA, 4125 bp, Homo Sapiens
gcggccgcagcggggcggaggccgaagccgaggccgccccggaaccagagagccaggcgggaagtgcacaaaggcacgaggccacgcccaggaggggcgggccctttggccggaagggggggggccggcgcgcggggccggtcgcctaggcaacgggctcgcgtggcgtccaggcttctcagaaagcccaaaatccgggagctttgggagggtagaggggcgacgcgggggagggcggtccggggagctgaatggcctcaggacgccggccgaccgggtgtctgcatactgtgggcggcctttccaagtgtggggagcggcctccgagaacggtgtccatgacacagggcgggaagagataaggcctagggaaggcgcccctcgggcctatccacctcttctggggctcggcactaggaagcagcttccctctcaggcccctttgtctccaagccgttccaaactgagtaccgggagacgacacaaagggagggcggtgacggatggcgcaggcgcgggagccgcctaggctgctgggagtggtggtccggccgcggaatgggtaggtctcccgcgcactctgcggccgcagctcaaaggacaccgagagggtgccagtgcgcatgcgccgccacttccgcccgtgcccggccctccccttccttccgcctcccggaggacttgggtttctagtagtaagagtccggggggcattactcacggtctccccgcctcctcttcatcgtgattgggctgtcaaagtgatgttggcaagtagattggctactgcggttgccagttctgcttcgggccctacttatactgctctgtggggcggggacgaagagtcaggggctgaggagcgagttgcggtagttgctgtgtaccatggtctcggaggttttgtcccgcggcccgttaggtcctggtcgggttttcagcgaagcaggccgctcccctgcgtttcccagcgggcgtgctgtgccgcccaacaggctctgcctccaagtgccaaaaactcctagtaaagtttgcgcctcgcccgccgtccacaccccagcggccctgacgctgtcccctccgcgaccctcgcctctggaaaaagtgacaggcaaggccacgcccccgcgagggccggcctggagcccgcagcccccagggcctgggacggtgaggggcgtgaatgcgtcggggggcggggccgttgccgggggagggggccggggcgcatgcgcgctgcgcagcggggctgaatgtttcccaagtgtttgaaactggtatttgggttttccacgttggacaagtgcggctcggcggccagcggagcgcgccccttcccgctgcccgctccgctcctctcttctacccagcccagtgggcgagtgggcagcggcggccgcggcgctgggccctctcccgccggtgtgtgcgcgctcgtacgcgcggcccccggcgccagccccgccgcctgagagggggcctgcgccgccggccggggcgtgcgcccgggagccaccgccaccgcggcccgcgccctcaggcgctggggtccccgcggacccggaggcggcggacgggctcggcagatgtagccgccgggccgaagcaggagccggcgggggggcgccgggagagcgagggctttgcattttgcagtgctattttttgaggggggcggggggtggaggaagcggaaagccgcgccgagtcgccggggacctccggggtgaaccatgttgagtcctgccaacggggagcagctccacctggtgaactatgtggaggactacctggactccatcgagtccctgcctttcgacttgcagagaaatgtctcgctgatgcgggagatcgacgcgaaataccaaggtacggccgggtgatggatgggcgggggcggccgcctccttcccggcgggtccgggcgcgccgcggagccgggccggtcctgccgtggaccggaggaagcggccggctccgcagcggcggccctcggcaggggcaggaacaaaaggtctggagcgcctttgattcgccaaggtccttgtgtgcaaagcccgggacacggaggaggaaggaggcgcgagaggtctcgctgcaaggctgcgcgaccaaagcgctctttgtagtgaagtgatgaggcgggtgctgcgggggagggggcggcgggtccaagccgcctcctctaggagggggtgcagattacggcgcgagatggagggatgtgccggcgcctggggctatagggcgccgagacggggctgcaggaggagggcggctgtgggccggggttcccgcggacccggtgcctcggtcccgggcaacgccgttcctctggcccttcttcgtcgccccccactcagtcccgaatctgagtgttacataaagtaccgggtagtactccgctcggggtaggtcggccgcccccgcccagccccctccggccctcacttggagctggacaccgagtaggggccgactgcgaggggcgacgccgccggttgtagtttgcggaggacgagggcttttctctgtgtgccgtagggaagggaagggaaggggaggagcggaggcggggaaggcgcccatctgcgctgcgctcgggggggcgcgggcagatcgctggcttggagaggactgtggcaggtgagaggacctgtgcgtcgttctctgcagacctggccgccccgggtgtcagagagaggtggcgagttcgtgtccgccgggaattgttggctgttggggaaactttcctgcgaggtcagtcaaggctttgggggctctgttttgaatgtggatcaccactcggagtttactaatgtttacaaggctgcgcagtagggaaacggaagaattgggtgggggcaaaaaaaaaaattgaccgctatccccgaaagtactagacgcctctgccgggaaggcgcccctgcgcgttctatccgaaacgtagcttcgcagcgaattttataggaacttcattagcatattatggaacgtcccgcctcagccccccagtagttggctgtgatgtccttcgtggaatgtccttatcattcccctgcggaacgattggtcgctgaggcggatgaaggcgggcctagcgcaataactggtatgggtctgtgtttccgctgtcttcttttttctttttcggggaggagcggggtggagggtggacgagttgatttgaacgtcttcgggtcgctcggcctccagccttggattggttcttctcgctgctggggcgggccgtgctcttccgccctgcggtgtggttggttctcctcctggcctccgccctccaaatcggcgattcccataggcggcggctctcggggtgcggggcgagtctcccgctggcctcctccccattggctggaggcctggcgggtgtcgccccggcccctctccccgctcagcccggccactttcgggcgcggatttatagcagtagcagtgatcccgggcctgtgggctcggggccggggctgcagttcggaccgcctcccgcgacccgcggggccggctcggagacagtttcaggccgcatctttgctgacccgagggtggggccgcgcgtggccgtggaaacgtgagtgactggggctgcgtccacgagggggaccctcggcgcagaaacttttctggaaggtgctgtcctcgggccggacgggccccgtggggtgaccctggggctccggacggaaggaaggcaggggctgagaccactttgatcgttcgacgatagaaaaaagtagcgcggggcggggtgcagggttccagctgtccagacagcaaagttcatggagccactttgtcctcctgtcgttgctggggagagcctggcttgctgcttgcttcatgttcacctagggtgatgaactttttggcttcaggaaagatcacagtcctgcccccccgggagtactggagcggcgcagctgggagcgccgagaagcgaacgaatctgtcgcaagggtcacagctccttggacttcggtgtaaatgctgactctgccgcgtagttctgaaagacttccacagacctactctgtaggaattcaaacgtcttttgcttagtaggcatcagttgtatgttaattcataaacttggattataattag

SEQ ID NO: 22471 - DNA, 6816 bp, Homo Sapiens
gaacgctcacagaacaggcagtgcaattccatgttcctcttaagtatgttagccctaccgggagctgagctggccagtctacttggagaggaaaagtagatctggggaaggtggaagggtcagttcctaagtgacttcctcctcggggatggtaagggcatttgctgatctccagtgactgcctggtgcctcatggtcagactcggctgtctcactcccagatatctgattttgcaaaaagggacacacctatctgcagcaaagaagacactgaccagattgcgagcggtgcttttggatgctctgtagccacccggggcccaggaggactgactcggcagcaggattcgtgcatgggaatcggagaccatggcagtgcagctggtgcccgactcagctctcggcctgctgatgatgacggagggccgccgatgtcaagtacatcttcttgatgacaggaagctggaactcctagtacagcccaagctgttggccaaggagcttcttgaccttgtggcttctcacttcaatctgaaggaaaaggagtactttggaatagcattcacagatgaaacgggacacttaaactggcttcagctagatcgaagagtattggaacatgacttccctaaaaagtcaggacccgtggttttatacttttgtgtcaggttctatatagaaagcatttcatacctgaaggataatgctaccattgagcttttctttctgaacgcgaagtcctgcatctacaaggagcttattgacgttgacagcgaagtggtgtttgaattagcttcctatattttacaggaggcaaagggagatttttctagcaatgaagttgtgaggagtgacttgaagaagctgccagcccttcccacccaagccctgaaggagcacccttccctggcctactgtgaagacagagtcattgagcactacaagaaactgaacggtcagacaagaggtcaagcaatcgtaaactacatgagcatcgtggagtctctcccaacctacggggttcactattatgcagtgaaggacaagcagggcataccatggtggctgggcctgagctacaaagggatcttccagtatgactaccatgataaagtgaagccaagaaagatattccaatggagacagttggaaaacctgtacttcagagaaaagaagttttccgtggaagttcatgacccacgcagggcttcagtgacaaggaggacgtttgggcacagcggcattgcagtgcacacgtggtatgcatgtccggcattgatcaagtccatctgggctatggccataagccaacaccagttctatctggacagaaagcagagtaagtccaaaatccatgcagcacgcagcctgagtgagatcgccatcgacctgaccgagacggggacgctgaagacctcgaagctggccaacatgggtagcaaggggaagatcatcagcggcagcagcggcagcctgctgtcttcaggttctcaggaatcagatagctcgcagtcggccaagaaggacatgctggctgccttgaagtccaggcaggaagctctggaggaaaccctgcgtcagaggctggaggaactgaagaagctgtgtctccgagaagctgagctcacgggcaagctgccagtagaatatcccctggatccaggggaggaaccacccattgttcggagaagaataggaacagccttcaaactggatgaacagaaaatcctgcccaaaggagaggaagctgagctggaacgcctggaacgagagtttgccattcagtcccagattacggaggccgcccgccgcctagccagtgaccccaacgtcagcaaaaaactgaagaaacaaaggaaaacctcgtatctgaatgcactgaagaaactgcaggagattgaaaatgcaatcaatgagaaccgcatcaagtctgggaagaaacccacccagagggcttcgctgatcatagacgatggaaacattgccagtgaagacagctccctctcagatgcccttgttcttgaggatgaagactctcaggttaccagcacaatatcccccctacattctcctcacaagggactccctcctcggccaccgtcgcacaacaggcctcctcctccccagtccctggagggactccgacagatgcactatcaccgcaacgactatgacaagtcacccatcaagcccaaaatgtggagtgagtcctctttagatgaaccctatgagaaggtcaagaagcgctcctctcacagccattccagcagccacaagcgcttccccagcacaggaagctgtgcggaagccggcggaggaagcaactccttgcagaacagccccatccgcggcctcccgcactggaactcccagtccagcatgccgtccacgccagacctgcgggtccggagtccccactacgtccattccacgaggtcggtggacatcagccccacccgactgcacagcctcgcactgcactttaggcaccggagctccagcctggagtcccagggcaagctcctgggctcggaaaacgacaccgggagccccgacttctacaccccgcggactcgtagcagcaacggctcagaccccatggacgactgctcgtcgtgcaccagccactcgagctcggagcactactacccggcgcagatgaacgccaactactccacgctggccgaggactcgccgtccaaggcgcgccagaggcagaggcagcggcagcgggcggcgggcgcactgggctcagccagctcgggcagcatgcccaacctggcggcgcgcgggggtgcggggggcgcggggggcgcggggggcggtgtgtacctgcacagccagagccagcccagctcgcagtaccgcatcaaggagtacccgctgtacatcgagggcggcgccacgcccgtggtggtgcgcagcctggagagcgaccaggagtgccactacagcgtcaaggctcagttcaagacgtccaactcctacacggcgggcggcctgttcaaggagagctggcgcggcggcggcggcgacgagggcgacacgggccgcctgacgccgtcgcgatcgcagatcctgcggactccgtcgctgggccgcgagggcgcccacgacaagggcgcgggccgtgccgccgtctcagacgagctgcgccagtggtaccagcgttccaccgcctcgcacaaggagcacagccgcctgtcgcacaccagctccacctcctcggacagcggctcgcagtacagcacctcctcccagagcaccttcgtggcgcacagcagggtcaccaggatgccccagatgtgcaaggccacgtcagctgccttacctcaaagccagagaagctcgacaccgtcaagtgaaattggagccacccccccaagcagcccccaccacatcctaacctggcagactggagaagcaacagaaaactcacccattctggatgggtctgagtctccacctcaccaaagtactgatgaatagaggagctacaatgatagctgtttcctggattcctccctctatccagaactagctgatgtccagtggtacgggcaggaaaaagccaagcccgggaccctcgtgtgagccagcccggcctaatctgaccgcctcaacgccattctgagatcacctcactgcctctcatttgccttacccagacgcaccgtcaccctgcaccagctttggccctcagcactttttttctcctgtctccgcattccctcccccttgaaaacctgactgaggagacattctggaaggttccggtcccactgtgtgtcccctggcgctcttgcccatagagagccagacaccaatcctcaatggcaccttggtggcttccctctgccatgacagcccctaggccaggaaccatcaggggggccagccggcatccaattcctgcggataagtagcgttgggagagaacgggaaaggggacttgggttacagggtgacccagaaagacgattcagctgtgtccagcctgccacccatacgtaggccaaccaagcacttcatgaagaggaggcctcgtggcatattcagtttacacctgaaatattccttgatgggacagcttgtggggatggctatgggggaaggggaggttgagaaaggaagttctcgacaccagaaatgcatcggaggaccacaatcagttctatgctgccaaagattaaaaataaataaaaacataaaaaattaagaggggccaagaggaagacattctttctgcaaggaaatttcttttaaattctgaactgctactacacacaagtgaaagtcaaccctatgtaaactggtgtcctctctctagccctctcccttactggcccacttctctctccgtagagagcctgaaaaactgccccaatgccacggtaaaggcgaggaagtcttggctggcgttgctgactcacagtcgccatccatctggacacaaagagagacctgtgggagtcatagagggtactgttagccccggtccatgcagggggttcagccgagcccaagactcaaagctgctttcctttcaggatttgtagtaacgtaaggtgataatggccaaaagtggttctctctcattaaaccaaccagtaaaagcgtatcctatttttttgcataaggtgtttcattttcgtttttatgggaaaccaagggaaaagcacattgcgatccattcagtgtttaactgtcgtggctcattttctgttcgttagcacttgtgtgacaaaagagctcagatccgacttctcctatgtgtcacttattccaagaacccaactatgcccttaggtagaaagatttgactcgtgtgtctactagccaacaggcagagcagggttgaaaaaaatatcagctcccaaagggcccatgtgtctacatcatcagttactgtcatgcaccacatttgtgtgcagataccaaaagaggaggaaagaagaaaaaaattaatgtgtgggagctgcacgtttacatgttttgagctatgcttcaaacacaactggaaagccatcaatcttcaaaggcctcaaaaatacttttatagtaacaagtgcacgactttagttgggttattcaagatggcacaaaaaggtttccgcagaggtggtatgctgtgcttttggcgcaagtggtggggggatgggggtgggggtggaatttttttctcactctaatgacttcctattggaaaggcattgacagccagggacaggagccagggtgggggtagttttgtgggaaagcagaactgaagttagcttaagcataaaaacaaagaaaaatcttcgcttttcatgtatgtggaatccaagaataaccataggctctaccagaccaggagggtaaggatggacactaaaatgaaacaaataccaaggtattccttctgctgcagcctggagaccaccgagagtcgagctggggcacacacacacctggccgggacccggcagggacaaggcgggccgtggcctcctccaccaagtctctctagacaattcagggcctgctttccccagctccatgcatggctggactggtgattccagggtgcagaagggattcatattcccagaacgctttaagtgtacacctgcaggataaagagataccggttacattattaaatgattctagggattcactgggggatatttttgttgcttttactttcatggttagagctacaaagaacagtgattttttttttttctcccttccccattcagaaacattatacattgggccatttttctttctcccaaagaagattcatggatagtcagactgaactgtgtgcaacaggaaaagtcaaaagggaaaaggcagctgatgaggttacatggttacatgttctacatcatgcagagtagcttgaaatctagtctggagaaaactggatcaagattctagcccactggagttgcaaggaatgagaggcaaaaattctaaagatttgggttatattttcaacttgggggacagagagaaatggagagcaggaattacagttccaacaaacatcatgatagtctggtagtcaagacagagattaagtaaaacaggttttactgtttagctgagttcagttaatacaaaatgtacataaaacgttagtcctttgagactgacatgattaatgatcagtgtggtgggaaatgatgtagttattgtacacaagcacttgcaaactctttatccctatttctttaaaacaaaataaggtgaaatacgaagtccttggtctgatataaagcccctattggattcttcggatgcgtaaaagaaattgcctgtttcagccagaagactggtgaaaacacatacatcagactatgttgtgagccaggttgattttttattttattatatgcaggtgagtgttgaaactgttaaaattccaatttgttttcattcagtattagtttagttctaaatatagcaaaccccatccaggtgctatcagatgaccagttactgcttagttaactaggtgtaaagttttacatatacattaatttcaatagtttattacaagttgtgtaaaatggactctagtttaataatgggggaaaaaagattaggttgctcctgaaactgactgtagagcatgtaaaatgattttactggattctgttcaactgtaatcaatgaaaaagatgtacgttgtagacaaagttgcagaattaaaaaaagaaatctgcttttaatttattctttttgtattaagaatttgtatagtatctttacattttgcaaaacagtgttgtcaacacttattaaagcattttcaaaatg

SEQ ID NO: 22472 - DNA, 5601 bp, Homo Sapiens
tgccttaaagtttgggacaggtttttgtctacaatgaagcagaatgccctgcaaggtgtggtgcccagtgagacagaggatctgaatgtagaacacctgcagatgctcctcctcattttccacaatttcaccgagacaggccggcgggccatattgtcgctttttgtccagatcatccaggagttgagcgtcaacatggatgctcagatgcgcttcgtgccgcttatcttggctcgcctccttctcatctttgattatctgcttcatcagtactccaaagcccctgtgtatctatttgagcaggtacagcataacctgctaagtcctccctttgggtgggcaagtggatcccaggacagcaacagccgccgggcaaccactcctctctatcatggattcaaagaagtagaagaaaactggtctaagcatttctcatcagatgctgtcccacaccccagattctactgtgtcctgtccccagaagcctcagaggatgatttgaaccgacttgattctgtggcatgtgacgtccttttctccaagcttgtcaagtatgatgagctttatgctgcactgacagccctgcttgcagctgggtcccagcttgatacagttaggagaaaggaaaacaagaatgtaacagccttggaggcctgtgcccttcaatattacttcttgatactgtggaggatcctaggaattttaccaccatcaaagacttacattaaccagctatccatgaactcacctgagatgagcgaatgtgacatcttgcacactctgcgatggtcttctcggctccggatcagctcctatgtcaactggataaaggatcaccttatcaaacagggaatgaaggctgagcatgctagctcgcttctagaactggcatccaccactaagtgtagctcagtgaaatatgatgttgaaatagtagaggaatacttcgctcgacagatctcatccttctgtagtatcgactgtaccaccatcttgcagctgcatgaaattcccagtctgcagtccatctacacccttgatgccgcgatctcaaaggtccaggtctctttggatgagcatttttctaagatggctgctgagactgatcctcataagtcgtctgagattaccaagaacctacttccagccacgctgcaactcattgacacctatgcatcgttcaccagagcctatttgctgcaaaactttaatgaagagggaacaactgagaaaccttccaaggagaaactgcaaggctttgctgctgttttggctattggctctagcaggtgcaaggcaaatactctgggtccgacactggttcagaatttgccatcgtcagtgcagactgtgtgtgagtcctggaacaacatcaataccaatgaatttcccaatattggatcctggcgcaatgcctttgccaatgacaccatcccttcagagagttatattagtgcagtgcaggctgcacacctggggactctctgtagccaaagtctgcccctggctgcttccctgaagcataccctcctctcactggtcaggttgactggagatcttattgtttggtcagatgagatgaacccaccacaggtaattcggacactgctacctcttcttttggaatcaagcactgagagtgttgccgagatcagtagcaactccctggaacgcatcttgggccctgctgagtctgatgagttcttggctcgtgtttatgagaagctgatcactggttgttacaacattctggccaatcatgcagatcctaacagtggactggatgaatccatcctggaggaatgtctccagtacttggaaaagcagctggaaagtagccaggctcgtaaagctatggaggagtttttctctgacagtggagaacttgtacagatcatgatggcaacagccaatgagaacctctctgctaaattctgtaaccgagttttgaaattcttcaccaaactcttccagctgactgagaagagccctaacccgagcctgttgcatctctgtggctccctggcacaactggcctgtgtggaacctgtgcgcctgcaggcctggctcacccgcatgactacatcgcccccaaaagattctgatcagctggatgtaattcaggagaaccggcagctgctgcagttactgaccacatacattgttcgggaaaacagccaagttggggaaggtgtgtgtgctgttcttctgggcaccctgactcccatggcaacagagatgctggccaacggtgatgggactggcttccctgaacttatggttgtgatggccactctggccagtgcaggtcaaggtgctggtcaccttcagcttcataatgctgctgtggattggctgagcagatgcaagaaatacctgtcacagaagaatgtagttgaaaaactgaatgccaatgtaatgcatggaaagcatgtgatgatcttggagtgcacatgccatatcatgtcttacttggctgatgtcacgaatgccctgagccagagtaatggtcaaggcccaagtcatctctcagtggatggggaagagcgggccattgaagtagactcagactgggtggaggagttggcggtggaagaggaagattcccaggctgaggattcagatgaagattctctttgcaataaactctgcacttttacgatcacacagaaagaattcatgaaccagcattggtaccactgtcacacctgtaaaatggtggatggcgtgggtgtctgcacagtgtgtgctaaggtgtgccacaaggatcatgagatttcctatgccaagtatggatccttcttctgtgactgtggagccaaggaagatggcagctgtttggctctggtgaagagaactcctagcagtggcatgagctctaccatgaaggagtcggcatttcagagtgaacccaggatttcagagagtctagtgcgtcatgccagcacctcctcgccagctgacaaagccaaggttaccatcagtgatggaaaggttgctgacgaagagaagcccaagaagagcagcctctgccgcacagtagagggctgccgggaggaattacagaaccaggccaatttctccttcgctcctctcgtgttagacatgcttaatttccttatggatgccattcagaccaacttccagcaagcttcagccgtcgggagcagcagccgtgctcagcaagccctcagtgagctacacactgtggagaaggcagtggagatgacagaccagctgatggttcccaccttagggtcccaggaaggtgcctttgagaatgtgcggatgaattacagtggagaccagggccagaccatccggcagctgatcagtgctcatgtgctcaggcgggtggctatgtgtgtgctctcctctccccatgggcgccgccaacatttggctgtcagccatgagaagggcaagatcaccgttctgcagctctctgcactcctgaagcaagcagattccagcaaaaggaagttaactctgacccgcttggcttctgccccagttccttttactgtgttgagcctcacaggaaatccctgcaaggaagactacttggcggtttgtgggctaaaggactgtcatgtgctcacctttagtagctcaggctctgtttcggatcacttggttttgcaccctcagttggcaacggggaacttcatcatcaaagccgtgtggttacctggttcacagaccgagttagcaattgtcaccgcagactttgttaagatttatgacctgtgtgttgatgccttgagtccaaccttctattttctcctgccaagctcaaagataagagatgttaccttccttttcaatgaggagggaaagaacatcattgttataatgtcttcggctgggtacatctatactcagcttatggaagaggccagcagtgcccagcagggacccttctatgtcactaatgtgttggaaatcaatcatgaggacctgaagcaggacagtaacagccaggtggcgggcggtggtgtgtccgtgtactactcccacgtgttgcagatgttgttcttcagctattgtcaaggcaaatcattcgcagccaccatcagcaggacaaccctggaggtgttgcaactcttccccatcaacatcaaaagttccaatggtggcagtaagacttctcctgctctttgccagtggtctgaggtgatgaaccaccctggcttggtgtgctgtgtccagcaaactacaggggtgccgctggtagttatggtgaaaccagacacttttcttatccaggagattaagactcttcctgctaaagcgaagatccaagacatggttgctattaggcacacggcctgcaatgagcagcagcggacaacaatgattctgctgtgtgaggatggcagcctgcgcatttacatggccaacgtggagaacacctcctactggctgcagccatccctgcagcccagcagtgtcatcagcatcatgaagcctgttcgaaagcgcaaaacagctacaatcacaacccgcacgtctagccaggtgactttccccattgacttttttgaacacaaccagcagctgacagatgtggagtttggtggtaacgacctcctacaggtctataatgcacaacagataaaacaccggctgaattccactggcatgtatgtggccaacaccaagcccggaggcttcaccattgagattagtaacaacaatagcactatggtgatgacaggcatgcggatccagattgggactcaagcaatagaacgggccccgtcatatatcgagatcttcggcagaactatgcagctcaacctgagtcgctcacgctggtttgacttccccttcaccagagaagaagccctgcaggctgataagaagctgaacctcttcagtgagtcaccaacccctggtgcagactctgtcctcattgtgactgcgaaattgggagccactggcctgtggctgtccaacattctgggatctctccactctgctgatttttctgtcctttcatcaggaaactttgagcttcatttgatgtattaaagaggcaaggtgacaggaaaggagtacaccggagcatggtagcagtaaagatagggctgcactgtgttgagtattcatttcaatagtgttgtgtccacctcactaatggggctacttctgtgtttaggccgagaggaggcagattgacatgaaattgcaaggctttcttaacgcacagaggaagacctcaggtcacacatggctgagagatggttggcaatggcttgctatgccactgaaaactaaactctcagaatacaaatccttgagccttactcaagactgcatttctctgtcatttattggccactgtctgatattctttcttctagatatagttgctgttagtgtgaatgatcatgatctgtactttgaacaaagaaagtgtgtagagacccctgggagtgaggggtaggggatacaatactctgaagcagaagaggacccttgcagtgatggttagggactcttctgagtaggagacgtaatcggcttttggtccatggaacttttaccacatgtattcagcatatatacacgattaaagtgctgcaaatatctcag

SEQ ID NO: 22473 - DNA, 5774 bp, Homo Sapiens
gtaagagtcgaggcctgagtcgcagtagaagccgaagtagggggcgcagcaaagaccgggatccaaataggaatgttgagcacagggaaagatcgaagtttaagagtgaaaggaatgacctggagagttcctatgtgcctgtgtctgcaccacctccaaactcttctgagcagtattcctctggggcacagtctattcccagcactgttactgtgatcgcacctgctcaccactctgaaaacacaactgagagttggtctaattactataacaatcatagctcttccaattcttttggtcgaaacctaccaccaaagaggcgatgcagagattatgatgaaagaggattttgtgtacttggtgacctttgtcagtttgatcatggaaatgatcccctagttgttgatgaagttgctctgccaagtatgattcctttcccaccccctcctcctgggcttcctcctccaccacctcctggaatgttaatgcctccaatgccaggtccaggcccaggcccgggcccaggtccaggcccaggcccgggcccaggtccaggtcctggccatagtatgagacttcctgttccccaaggacatggtcagcctccaccatccgttgtgcttcccataccaagaccacctataacacaatcaagcttgataaacagccgtgaccagcctgggacaagtgcagtgcccaatcttgcatcagtgggaacaagactacctcctcctttaccccagaacctcctttacacagtatcagaacgacagcccatgtactctcgtgaacatggtgctgctgcatctgagcgacttcagttggggacaccgcctcctctgttggcagctcgtttggtgccacctcgaaacctcatgggatcctccattggataccatacctcagtctccagccctacccctctggttccagatacatatgaaccagatggttacaacccagaagctcctagtattactagttctggtagatctcagtacagacagttcttttcaagaactcagacacagcgtcccaatctgattggcctaacatctggagatatggatgtaaatccaagagctgctaacattgtgatccagactgaaccaccagttcctgtttcgattaatagcaacataaccagagtagttcttgaaccagatagtcgaaaaagagctatgagtggtttggaagggccactcacaaagaaaccttggctgggaaagcaaggaaataacaatcaaaataaaccagggttcttacgaaagaatcagtatacaaacaccaaattagaagtcaagaaaatccctcaggaattgaacaacattaccaagctcaatgaacacttcagcaaatttggaactattgttaatatccaggttgcttttaagggtgacccagaagcagccctaatccaatatcttaccaatgaggaggccaggaaagccatttctagcacagaagcagttctaaacaaccgattcattcgagtcttgtggcatagggaaaataatgagcaaccgacactacagtcctcagcacagctgctcctgcaacaacagcaaacacttagtcacctctcacagcagcaccatcacctgccacagcatctacatcagcagcaggtgctagtggcccagtctgctccttcaacagtgcacggaggtatccagaagatgatgagcaaaccacagacatcaggtgcatatgttcttaacaaagttcctgttaaacatcgtcttggacatgcaggtggtaaccagagtgatgcatcacatttgttgaatcagtctggtggtgctggagaagattgccagatattttcaactccaggccatccaaaaatgatttacagctcctcaaacttaaagacaccttcaaagctctgttcagggtctaaatctcatgatgttcaagaagtgcttaaaaaaaaacaggaagcaatgaagttacaacaagatatgaggaaaaaaagacaggaagtgttagaaaagcaaatagaatgccaaaagatgttaatatccaagttagaaaaaaacaaaaacatgaaaccagaagaaagagcaaatataatgaagactttgaaagagcttggagagaagatctcacaattaaaagatgaattaaaaacatcttctgcagtctccacaccatctaaagtgaagacaaaaacggaggcccagaaggagttattagatactgaactggacctccacaagaggctgtcctcaggagaagacaccacagaattacggaaaaaactcagtcagttacaggttgaggctgcacggttaggtattttacctgtgggtcgaggaaagaccatgtcctctcaaggtcgaggaagaggccgagggcgtggaggaagaggaaggggctcactaaatcacatggtggtggaccatcgtcccaaagcactaacagttggaggattcattgaggaagaaaaagaagacttgcttcagcatttctcaaccgcaaaccaagggccaaaatttaaagaccgtcggctacagatatcatggcacaagcccaaggtaccatctatatccactgagactgaagaagaagaagtcaaggaggaggaaacagaaacctcagatttgtttttgcctgatgatgacgatgaagatgaagatgaatatgagtctcgctcatggcgaagatgaaatctgatgctagctgtataatttttaggaatattgtttagaagaacaacttttaaaaattatttaaaagaagtcaatgagccaaaaaaaatttttttatttttcttttcaacacagtaggttcaagaacagcaagtttgctatttaaacacatctcataactgtacatgatattaaagcaccaaaggcctagtgacttttacacagttgtgaagatccacagcaatgacatggataatctctagagccttattttccacaccaccttttttttgttgctgttggtgttggattatgatgtaaatgacagggtgttcagaaattttattttggattataatctactgataaaatttaattaaatgtcaaaatcacctgtaatcttttaactctcagttgttatggatgggtcatcagacagtaggaaatatttgtaattaaaatacccttttgctttcaagagtggtcttggaagaaaaatatgtttattttaattttaatttttttttttttttactttggaggagcccaatttgtattcagtctaaatttgtttttcatggtttttatgtgtggtagtactagttcagtgaaaatcacaacaaactgtgtgttcttaaatgctacagcaatggtagctagctctatagtatttccattctcttgtcatatgaactcctggacttttcctgctactgattcttagtttgctttgatatttagtgagcgctggttcggctggtctttttaaaaatttttataactcagaatgtaaaaggctttcacctattgcccctttctcgtcccccttttcttcctcttgcctttctattaataggcctgacttagtcatcattgatataagtggttcatttgggcaaccgcaggcagtctccaataaaaggttcaaaccagcacctggataaataagtgatgttttgatgagaatgatggaaggattttggggagaagagaatcaccagctttattttttccctcttttgaagcttcagttcagtatagttacacagaagggtttaaaaatgtctgaaattcttttcctaaatttaaaccatgatggtgaggtgactggggggtggggggtggaggtgggagggggttgagggctgagtatgctagtaataaatgggagtcatatatgactttgttcagatgaccttattttttcataattttgtagcttgttgctatccatgaacatacgcatccctcagtagacagtttcctttactgtgtgcatttttactgtacactgtatagagtagagtatctgttaagtaaaatatatatgtaaatttatgtcttcgtgttctgaatgttagatggaaaagcagaggagcaacactacactgtactgacccctgggaaaataaaatgattaatgtacctaggctgtcactttttcaaggatatacacatctgtgtttttatatatgtgtggtatgaaaatttgaaacctcctgttgtctccaaaagggtcttggtgaccactatatcaaggattttgtttgctgaggtaaagacaatttctcaatatagaaactattcactaagaacttaaaaccatcaggattctagatttacttagctataagaagttaaatcccacgttctgataatctttattcttctacatgttttcctggaatgatgtgtcaaaccagggtcatttttaagttcatataattttctttcataataatgaggacttcctttttctaggttattgttatatttctagtaacactgaaggtaaaataagcttataaaagaaggaaaacatcagaatggtgtatctagaatacacaatcttgctccttactcctccatcatctctaatgaaatttttcttgatgtctgtggctcagtcagtatatattttgaaagattcattgtggtgaatattttgagtcctgacagtttaaacgtgatagagggaacaaaggatttatatattttttgtacaaagttttttcttaaactgtataattttgtaaataatttgtttgggttttttttttgtgtactaaaactaccagcgtatagatttcaataagaattgttgtatttttgtatttggaaactgaaaattacagtaaataaatggaactctaagaaaaatttcagtagacagttcaacagaatgagattccttttcatatgatttttttgacctcaaaatggacatcttatttcactctcagtaaaaagttgaaaatttgactttttagtattgggggcagaagatagaagtgtgttaaagtgaaaaacagttttttcagtaaggtttgaggccctttctataagttttcagtacaccttaaacaggactaaaaatactttaaaagtgtgctttcaaagaattttaaaacatgtttgactcaaagatgaatttgaagtgagttaattataatactggaaaacttcaggttagcataaaatagtttatatatatcccctgccccctttgggatttacttccaccatcaaatcttcaactgttagaatttcacttaaaagtgaataactgccatacatgttttcttggcatcttcatttacagaaataacatacagcatctaaagcaagttctgtccctcttaatgtgtatgacatctttttaagtagctgatcagcaataatagccaccagttgactaggtcagcctgatatactagtggatcactgtccaagataaaaaggtaaccccaagtattgcaaaatttccctcaatttctttatgtaacattgaagaaatgttgttaccagctaagatgataaattggaaaacagtcttgttaaggtgaaaggggtccttggtgatggatcattatttcaaaaaagaaaaaaatcatgtgaaaaggaatagtggttcctcttgatgtatagtatgcctgtattatagtttttacaaaattgtgaacttgtgtaatagtataataggagatattgttgaatttctaactgtttatacatttaaattcatatatgtaatgtttgttttatcaattacaatctgaatttctaagaagcatgttgacttttgcaataaagatgcaatatggaatggttcacaattgg

SEQ ID NO: 22474 - DNA, 4994 bp, Homo Sapiens
ctcctgctcttctttccgcttggcctccaacagcctctgctgctcctcctgagcccgcctttccagcatgagattcagagaaggaaagaagagataaaagaagagaaaaaaaggaaagaaatggctaagcaggaacgtttggaaattgctagtttgtcaaaccaagatcatacctctaagaaggacccaggaggacacagaacggctgccattctacatggaggctctcctgactttgtaggaaatggtaaacatcgggcaaactcctcaggaaggtctaggcgagaacgtcagtattctgtatgtaatagtgaagattctcctggctcttgtgaaattctgtatttcaatatggggagtcctgatcagctcatggtgcacaaagggaaatgtattggcagtgatgaacaacttggaaaattagtctacaatgctttggaaacagccactggtggctttgtcttgttgtatgagtgggtccttcagtggcagaaaaaaatgggtccattccttaccagtcaagaaaaagagaagattgataagtgcaaaaagcagattcaaggaacagaaacagaattcaactcactggtaaaattgagccatccaaatgtagtacgctaccttgcaatgaatctcaaagagcaagacgactccatcgtggtggacattttagtggagcacattagtggggtctctcttgctgcacacctgagccactcaggccccatccctgtgcatcagcttcgcaggtacacagctcagctcctgtcaggccttgattatctgcacagcaattctgtggtgcataaggtcctgagtgcatctaatgtcttggtggatgcagaaggcaccgtcaagattacggactatagcatttctaagcgcctcgcagacatttgcaaggaggatgtgtttgagcaaacccgagttcgttttagtgacaatgctctgccttataaaacggggaagaaaggagatgtttggcgtcttggccttctgctgctgtccctcagccaaggacaggaatgtggagagtaccctgtgaccatccctagtgacttaccagctgactttcaagattttctaaagaaatgtgtgtgcttggatgacaaggaaagatggagtccccagcagttgttgaaacacagctttataaatccccagccaaaaatgcctctagtggaacaaagtcctgaagattctggaggacaagattatgttgagactgttattcctagcaaccggctacccagtgctgccttctttagtgagacacagagacagttttcccgatacttcattgagtttgaagaattacaacttcttggtaaaggagcttttggagctgtcatcaaggtgcagaacaagttggacggctgctgctacgcagtgaagcgcatccccatcaacccggccagccggcagttccgcaggatcaagggcgaagtgacactgctgtcacggctgcaccatgagaacattgtgcgctactacaacgcctggatcgagcggcacgagcggccggcgggaccggggacgccgcccccggactccgggcccctggccaaggatgaccgagctgcacgcgggcagccggcgagcgacacagacggcctggacagcgtagaggccgccgcgccgccacccatcctcagcagctcggtggagtggagcacttcgggcgagcgctcggccagtgcccgtttccccgccaccggcccgggctccagcgatgacgaggacgacgacgaggacgagcacggtggcgtcttctcccagtccttcctgcctgcttcagattctgaaagtgatattatctttgacaatgaagatgagaacagtaaaagtcagaatcaggatgaagattgcaatgaaaagaatggctgccatgaaagtgagccatcagtgacgactgaggctgtgcactacctatacatccagatggagtactgtgagaagagcactttacgagacaccattgaccagggactgtatcgagacaccgtcagactctggaggctttttcgagagattctggatggattagcttatatccatgagaaaggaatgattcaccgggatttgaagcctgtcaacatttttttggattctgatgaccatgtgaaaataggtgattttggtttggcgacagaccatctagccttttctgctgacagcaaacaagacgatcagacaggagacttgattaagtcagacccttcaggtcacttaactgggatggttggcactgctctctatgtaagcccagaggtccaaggaagcaccaaatctgcatacaaccagaaagtggatctcttcagcctgggaattatcttctttgagatgtcctatcaccccatggtcacggcttcagaaaggatctttgttctcaaccaactcagagatcccacttcgcctaagtttccagaagactttgacgatggagagcatgcaaagcagaaatcagtcatctcctggctgttgaaccacgatccagcaaaacggcccacagccacagagctgctcaagagtgagctgctgcccccaccccagatggaggagtcagagctgcatgaagtgctgcaccacacgctgaccaacgtggatgggaaggcctaccgcaccatgatggcccagatcttctcgcagcgcatctcccctgccatcgattacacctatgacagcgacatactgaagggcaacttctcaatccgtacagccaagatgcagcagcatgtgtgtgaaaccatcatccgcatctttaaaagacatggagctgttcagttgtgtactccactactgcttccccgaaacagacaaatatatgagcacaacgaagctgccctattcatggaccacagcgggatgctggtgatgcttccttttgacctgcggatcccttttgcaagatatgtggcaagaaataatatattgaatttaaaacgatactgcatagaacgtgtgttcaggccgcgcaagttagatcgatttcatcccaaagaacttctggagtgtgcatttgatattgtcacttctaccaccaacagctttctgcccactgctgaaattatctacactatctatgaaatcatccaagagtttccagcacttcaggaaagaaattacagtatttatttgaaccataccatgttattgaaagcaatactcttacactgtgggatcccagaagataaactcagtcaagtctacattattctgtatgatgctgtgacagagaagctgacgaggagagaagtggaagctaaattttgtaatctgtctttgtcttctaatagtctgtgtcgactctacaagtttattgaacagaagggagatttgcaagatcttatgccaacaataaattcattaataaaacagaaaacaggtattgcacagttggtgaagtatggcttaaaagacctagaggaggttgttggactgttgaagaaactcggcatcaagttacaggtcttgatcaatttgggcttggtttacaaggtgcagcagcacaatggaatcatcttccagtttgtggctttcatcaaacgaaggcaaagggctgtacctgaaatcctcgcagctggaggcagatatgacctgctgattccccagtttagagggccacaagctctggggccagttcccactgccattggggtcagcatagctatagacaagatatctgctgctgtcctcaacatggaggaatctgttacaataagctcttgtgacctcctggttgtaagtgttggtcagatgtctatgtccagggccatcaacctaacccagaaactctggacagcaggcatcacagcagaaatcatgtacgactggtcacagtcccaagaggaattacaagagtactgcagacatcatgaaatcacctatgtggcccttgtctcggataaagaaggaagccatgtcaaggttaagtctttcgagaaggaaaggcagacagagaagcgtgtgctggagactgaacttgtggaccatgtactgcagaaactgaggactaaagtcactgatgaaaggaatggcagagaagcttccgataatcttgcagtgcaaaatctgaaggggtcattttctaatgcttcaggtttgtttgaaatccatggagcaacagtggttcccattgtgagtgtgctagccccggagaagctgtcagccagcactaggaggcgctatgaaactcaggtacaaactcgacttcagacctcccttgccaacttacatcagaaaagcagtgaaattgaaattctggctgtggatctacccaaagaaacaatattacagtttttatcattagagtgggatgctgatgaacaggcatttaacacaactgtgaagcagctgctgtcacgcctgccaaagcaaagatacctcaaattagtctgtgatgaaatttataacatcaaagtagaaaaaaaggtgtctgtgctatttctgtacagctatagagatgactactacagaatcttattttaaccctaaagaactgtcgttaacctcattcaaacagacagaggcttatactggaataatggaatgttgtacattcatcataatttaaaattaaattctaagaagaggctgggtgcagtggctcacacctttaatcccagcactttgggaagccaaggcaggaagactgcttgaaaccaggagtttgagaccagcctgagcaacaaagcaagaccccatctctataaaaactaaaaaaattagttgggcatggtggcacatgcctgtagtcccagctactccagaggctgagatggatcatctgagcctcaggaggttgaggctgcagtgagctgtgactgcgccactgcactccagtctgggacaacagagcaagaccctgtcttaaaaaaaaaaagaaaaaaaaattttttttctaagaagctgtcctacaaagttgagctttgttagtttttcatgtgtaatatattataaatttatcttttgggatataataaatgctttcatat

SEQ ID NO: 22475 - DNA, 4055 bp, Homo Sapiens
ggctcactgcaaactctgcctcccaaagtgctgagattataggcatgagccactgtgcccagctgaatggacttttttaacgggaaagtttcattgaatttgctactttagtttttgctaaaccagcctcccttaaccctaccttcttctcactaaaaaacaagtcagtgtgaaagcaattaaaaccatatattcattatccatgtatttattgcttttattattctgtttagtgagattgccccagcttaggaaaggaattacttgatttttctcttttttgccccagacatggagcccaaacctgcaaccaagaatgctacacgaacaaaggctatttctgaagatttatcacaggaggccatactagagaaacttacagagaatggtctgtgggattccagaatggaagggttatggaaatggaatgataggatattgagattacaaaataatcaggagaatcatttgagtcaaagaataattccactcaagaagactcccactagtcaaagaggctttagatttgaatctattcttattccagaaccaggcattgccacagaagagcttcacagcagatgccaaacacaagaggaaaatttcacagagaatttaaatttgattacagatacccatttggggaagataatttgcaaggagatgaaaggcagcaaagccataaggcagacttcagaactaactttggggaaaaaatccaataataaggaaaaaccctacaaatgtagtacatgcgaaaaggcctttcattatagatcattgctcattcaacatcaaagaactcatactaaagaaaaaccttatgaatgtaatgaatgtgggaaaacattcagccagccttcatatctcagtcagcacaaaaaaatccacactggagaaaaaccctataaatgtaatgaatgtggaaaggccttcattgcttcttcatcacttatggtacatcagagaattcacactaaagagaaaccttatcagtgtaatgtgtgtgggaaatcttttagccagtgtgcccgtcttaatcagcaccagagaattcaaactggagagaaaccctataaatgtagtgaatgcgggaaagcttttagtgataaatcaaaacttgcaagacatcaggaaactcacaatggtgagaaaccctacaaatgtgatgattgtgggaaagcctttaggaacaagtcatatcttagtgtacatcagaagacccacactgaagagaaaccatatcagtgcaacgagtgtgggaagtcttttaagaataccacaatttttaatgtgcatcagaggattcatactggagagaaaccttttagatgtaacgaatgtggaaaagcctatagaagtaattcaagccttatcgtacatataagaactcacactggggaaaaaccctatgaatgtaatgaatgtgggaaagcattcaaccgcatcgcaaatttcacagaacatcagcgaattcacacaggagaaaaaccctataaatgtaatgaatgtgggaaagcattcattaattattcatgccttactgtacaccacagaatgcatacaggagagaaaccttataaatgtactgaatgtggaaaggccttcatgcgttcttcttctctaattatacatcagcgtattcatactgaagagaaaccttatctgtgcaatgaatgtggggagtctttcagaataaaatcacacttaactgtacatcagagaattcacactggagagaaaccatataaatgtactgactgcgagagggcattcaccaaaatggtaaatctcaaggagcatcagaaaattcatactggagtgaaaccctataaatgttatgactgtggaaagtcctttaggactaaatcataccttattgtacatcagaggacccatactggagaaaaaccatataaatgtaatgaatgtgagaaagccttcactaatacatcacagcttaccgtgcaccaacgaaggcatactggagagaagccctataaatgcaatgaatgtggaaaggttttcacaagtaactcaggctttaatacacatcaaagaacacatactggagagaaaccatttaaatgtaatgactgtgggaaagcatttagccagatggtacatgtcacagaacatcagaaaatccatagtggagagaagccctataagtgtgatgtctgtggaaaagccttcaggaggggttcttaccttacagtgcattggagaacacacactggagaaaaaccctacacctgtaaggaatgtggaaagggttgtattactctatcacagctaaccctacatcagagaattcatactggggagaggccctataaatgtgaagaatgtggaaaagccttcagaactaactcagactttactgtacacttgaggatgcatactggagaaaaaccctataaatgtaatgaatgtggaaaagccttcaggagtagttcgagccttactgtacatcaaagaatacatcaaagagaaactcagttaatataaagaacaataagtcattcacctagatgtcaactccacaagatgaatcttataaactatattttatgaatataggaaaatcttcattaggaatttatcagaaagtatacagagaaactataagcaattatgtgggaaatcatttaataatattaaatcttagaagttataaggaaactctcactagaggaaaataatgaacaaatgaaagtgttcatccagatttcatactttactcatttaacaaattatctttagttaattgcctatatatgtatttgcctatttttctattcatttatctgtcttttcttataaacctggaggtgctttttatatatttttgatattaatcctttgtcattatgtagcagatgtttttcttaatctagcatttgtctttatagtaatgcacaacatttttataggaaaatatttgtatcatttcctttttagattttttattttactcattttacttaaaagagatctccttaatccctaggttatacgtagtatcctaaatgtgtttttaagatttttatgattttattttttacacttaagtctttaatccctctggactggatggttcttcataggagagcaactgtaggtgatcattatcctgtgaaaatattttgaacctaaaaagcactcagggaaatgcaaattgaaatgctcagtgagatgaaacttccccttcatggatctggcaaaaattaagagatcttttgctagctattggggtttgggaaaccatgtactattacttaaaggttgtgtaacatacttccaccagcagtccaacaatatatgtttaaaaatttaaaacatatatactcttagacccagcagtctcacttttggaatctgtccgttagaaataaaagcagcatcaatgcataagaatgtaaataaacatgtttgttgaagtactgtttgtagaggggggcaaagccccaactgcaaacaaagtgaatgcccattaatagggaactggttagataaattgtgacatacccatattatggaacagtgtgagagtaattttaaaaacgacttatatctatgctagctgatttcaatgtatttccacaatgtattgataaataattgctttataacaaatgtatatatacaatatatcatttttgttaaaataatcacacccatttattttgtgtttatgtgtgtgtgtgtggttagatgcacatggagacaggtatggaagaatatacaccaggctgttaatattgattaccttgaggggagtgagaaaaggagaagtagagataagggaaggggagactgtaaaaacagaaaaatgtaaatgctgcctttatggtataaaactgtaaatgtaatattatgtaattatgtgaacttttgagagagatgaaaggatggtctccaaaaaattaatgatggttatttctgttttagtggttcatcaattttttgttttttactttcttttctgtgtttttaagttaattttttccttgcaatgaacctgtaatatttacattaaaaggaaaaatatt

SEQ ID NO: 22476 - DNA, 4036 bp, Homo Sapiens
gtggagccgagcggtgcggagcagatctggtggttctccggagagcagcttccttgggtgttacatgagccaagccctcactgtacagaagagtgagagctgaaacctgttccctgagctgatcagaaggacatcccttggcccctccatctgggctcctgtggataggaggggctgggtgagcaggccagctgggctatggtgtggtgcctcggcctggccgtcctcagcctggtcatcagccagggggctgacggtcgagggaagcctgaggtggtatcggtggtgggccgggctggggagagtgtggtgctgggctgtgacctgctgcccccggccggccggccccccctgcatgtcatcgagtggctgcgctttggattcctgcttcccatcttcatccagttcggcctctactctccccgaattgaccctgattacgtgggacgagtccggctgcagaagggggcctctctccagattgagggtctccgggtggaagaccagggctggtacgagtgccgcgtgttcttcctggaccagcacatccctgaagacgattttgctaacggctcctgggtgcatctgacagtcaattcaccccctcaattccaggagacacctcctgctgtgttggaagtgcaggaactggagcctgtgaccctgcgttgtgtggcccgtggcagccccctgcctcatgtgacgtggaagctccgaggaaaggaccttggccagggccagggccaggtgcaagtgcagaacgggacgctgcggatccgccgggtagagcgaggcagctctggggtctacacctgccaagcctccagcactgagggcagcgccacccacgccacccagctgctagtgctaggacccccagtcatcgtggtgccccccaagaacagcacagtcaatgcctcccaggatgtttcattggcctgccatgctgaggcataccctgctaacctcacctacagctggttccaggacaacatcaatgtcttccacattagccgcctgcagccccgggtgcggatcctggtggacgggagcctgcggctgctggccacccagcctgatgatgccggctgctacacctgtgtgcccagcaatggcctcctgcatccaccctcagcctctgcctacctcactgtgctctacccagcccaggtgacagctatgcctcctgagacacccctgcccataggcatgccgggggtgatccgctgcccggttcgtgccaaccccccactgctctttgtcagctggaccaaggatggaaaggccctgcagctggacaagttccctggctggtcccagggcacagaaggctcactgatcatcgccctggggaacgaggatgccctgggagaatactcctgcaccccctacaacagtcttggtaccgccgggccctctcctgtgacccgcgtgctgctcaaggctcccccagcttttatagagcggcccaaggaagaatatttccaagaagtagggcgggagctgctcatcccctgctccgcccaaggggaccctcctcctgttgtctcttggaccaaggtgggccgggggctgcaaggccaggcccaggtggacagcaacagcagcctcatcctgcgaccattgaccaaggaggcccacgggcactgggaatgcagtgccagcaatgctgtggcccgagtggccacctccacgaacgtctacgtgctgggcactagccctcatgttgtcaccaatgtgtccgtggtggctttgcccaagggtgccaatgtctcctgggagcctggctttgatggtggttatctgcagagattcagtgtctggtacaccccactggccaagcgtcctgaccgaatgcaccatgactgggtgtccttggcagtgcctgtgggggctgctcacctcctagtgccagggctgcagccccacacccagtaccagttcagcgtgctagctcagaacaagctggggagtggtcccttcagcgaaatcgtcttgtctgctccggaagggcttcctaccacgccagctgcacccgggcttcccccaacagagataccgcctcccctgtcccctccgcggggtctggtggcagtgaggacaccccggggggtactcctgcattgggatcccccagagctggtccctaagagactggatggctacgtcttggaaggccggcaaggctcccagggctgggaggtgctggacccggctgtggcaggcacagaaacagagctgctggtgccaggcctcatcaaggatgttctctacgagttccgcctcgtggccttcgcgggcagcttcgtcagcgaccccagcaacacggccaacgtctccacttccggtctggaggtctacccttcgcgcacgcagctgccgggcctcctgcctcagcccgtgctggccggcgtggtgggcggagtctgctttctgggagtggccgtccttgtgagcatcctggccggctgcctcctgaaccggcgcagggctgcccgccgccgccgcaagcgcctccgccaagatccacctcttatcttctctccgaccgggaagtcagctgcaccctctgctctgggctcaggcagtcctgacagcgtggcgaagctgaagctccagggatccccagtccccagcctgcgccagagtctgctctggggggatcctgccggaactcccagcccccacccggatcctccatctagccggggacccttacctctggagcccatttgccggggcccagacgggcgctttgtgatggggcccactgtggcggccccccaggaaaggtcaggccgggagcaggcagaacctcggactccagcccagcgtctggcccggtcctttgactgtagcagcagcagccccagtggggcaccccagcccctctgcattgaagacatcagccctgtggcaccccctccagcagccccacccagtcccttgccaggtcctggacccctgctccagtacctgagcctgcccttcttccgagagatgaatgtggatggggactggcccccgcttgaggagcccagccctgctgcacccccagattacatggatacccggcgctgtcccacctcatctttccttcgttctccagaaacccctcctgtatcccccagggaatcacttcctggggctgtggtaggggctggggccactgcagagcccccttacacagccctggctgactggacactgagggagcggctgctgccaggccttctccctgctgcccctcgaggcagcctcaccagccagagcagtgggcgaggcagcgcttcgttcctgcggcccccctccacagccccctctgcaggaggcagctacctcagccctgctccaggagacaccagcagctgggccagtggccctgagagatggccccgaagggagcatgtggtgacagtcagcaagaggaggaacacatctgtggacgagaactatgagtgggactcagaattccctggggacatggaattgctggagactttgcacctgggcttggccagctcccggctcagacctgaagctgagccagagctaggtgtgaagactccagaggagggctgcctcctgaacactgcccatgttactggccctgaggcccgctgtgctgcccttcgggaggaattcctggccttccgccgccgccgagatgctactagggctcggctaccagcctatcgacagccagtcccccaccccgaacaggccactctgctgtgaacatccctaatgtgaggctgtgaaaaggcatatggacctgcaaaggaggcccccaaccagacagacctagtttcaaacgagggcactgcccctgcctgcccctttggtgcccaggcacagaccctgatagtgggtttgggtcaccttggtatggaatgtatgtgctgaccccctaggtgagtctggggattggaacagggatcttaggtctgcctctctctctctctctctctctctgtgtgtgtgtgtgtgtgtgtgtgaagttttttacaggtgaataaacaaagtttgaaagatg

SEQ ID NO: 22477 - DNA, 4022 bp, Homo Sapiens
gcagcgtcaagtcagagtacacggacccctggggttattacattgactacacgggcatgcaggaagatccggggaacccggcagggggctgttcaaccagcagtggggtgcccactgggaacgggccagtccgccatgtccaagaagggtccagagccacaatgccccaagtgcccggtggttcagtcaaaccaaagatcatgtcaccagagaagtcacacagagtcatttctccatccagtgggtattccagccagtcgaatacacccacagcactcacccctgtgcctgtgtttttaaaatcagtgtcaccagcaaacgggaaggggaagcccaagcccaaggtaccagaaaggaagtcctctctgatatcttcagtatccatttcctcatcgtccacttctctttcttctagtacttctactgaaggaagtggcactatgaagaagctggatccagccgtgggctctcccccggctcctcctcctcctcctgttccctctcctccattcccttgtcctgcagacaggtctcctttccttcctcccccacctcctgtcacagattgctcccagggctctcctctgcctcactctcctgtgttcccccctccgccgccagaagctctcattcctttctgctccccacctgattggtgcctttctcctccccgccctgcactgagccccattcttccagattcacctgtgtccttgccattgcccccacctctcttaccttcctcggaacccccacctgccccacctcttgaccccaaattcatgaaagacaccaggccgcctttcacaaattctggccagccagaatcctcccggggatccttgaggccgccttctaccaaggaggagaccagcaggccccccatgcccctgataaccacggaagcattgcagatggtgcagttgaggcccgtgagaaagaactcaggcgctgaggcggcacagttgtctgaacgaacagctcaggaacaacgaactccagttgctccacagtaccacttaaagccatctgctttcctgaaatcccgaaatagcacaaatgaaatggagagtgaaagccagcctgcctctgtgacaagctcgcttccgacgcctgccaagagctcgagtcagggtgaccatggcagtgcggctgagcgtggtggccctgtgagccgcagccctggagctccaagcgctggggaggcagaggctcggcccagccccagcaccaccccactcccagactcttcacccagcaggaagccaccccccatttccaagaagcccaaactgttcctggtggtaccacctccgcagaaagattttgcagtggagcccgcagagaacgtgagcgaagccctccgagctgtgcccagccccacgacgggagaggagggctctgtgcacagcagggaggcaaaagagagttctgcagcccaagctggctctcatgccacgcaccctggcacctcggttcttgagggaggagctgcaggatccatgtctcccagcagagtggaagccaatgtccccatggttcagcctgatgtctcaccagcccccaagcaggaggagccagccgagaacagtgcggatactgggggcgatggggagagctgcctatctcaacaggacggagcagctggggtgccggagaccaacgcagccggttcatcctcagaggcctgtgacttcctcaaggaagacgggaatgatgaggtaatgacccccagtcgacccaggaccacagaagacctttttgcagctattcacagatccaaaaggaaagtcctcggccgtagagattcagatgatgaccactcccgaaaccattctccctccccgcccgtgacacccaccggcgctgccccaagcctggcctctccaaagcaagtggggtcgattcagagaagcatccgaaagagcagcaccagcagtgacaacttcaaagctctgctgctgaaaaagggcagtcgttcagacaccagcgcccgcatgtctgcagcagagatgctcaagaacacagaccctagattccagaggtcgaggtcagagccttccccagatgcccccgagagcccgtcaagctgctccccaagcaagaacagaagggcgcaggaggagtgggccaagaacgaaggcttgatgcctcggagtctgtccttttccggccccaggtacggccgcagccgaacgccgccttctgccgccagcagcaggtacagcatgcggaaccggatccagagcagccccatgaccgtcatctcggagggagaaggggaagccgtggagcctgtggacagcatagcccgcggggctctgggcgctgcggagggatgttccctggacggactggcgagggaggagatggacgagggcggcctgctctgtggggaggggcctgccgcctccctgcagccccaggcccccggccctgtggatgggacagccagtgcagagggcagagagccctccccacagtgtggcggttctctgagcgaggagagttagggccaagaacgtaactctcccaggtgacacggggggagacgagcaatgcagcactctaggaagcctgctaggcgcccttccctggctcacccggggagcccactctgcttctgtgctgtgggccctggggttgccagccctgcagtgtgagtgaacggttatttaggactcacctggcacttgccctgtggcttaagaacaagtagaagcttaaacttctgaaagtgcttcccggggaagattttttttttttttttttttttttgctaaatgctgggtgtgtatgtgtgcattttccacactttttaatttttaaaaaatacacatatacacaaacaacatgtacagaaatagaagaaagcaagccagacttaagcttggtagagtaacggagtcctctggtctaggcggtaattgctttcagagaattacgtttatagaaatcagcgagttttgtaagaaaggagaagatgttacttcaagaaagaggcagtagagttgctggttcttaatgcacagaacacacagatatatgcacacgtgtgctgctgaggtgaggcaggtctggtgagcacggagaggctgggaaggggctaagtgactaattggttcaggtacttttttctgggggaggtagactttgcttcttttttgtaaaaatgacaaacgtagaagtggcaatgctgtaacctggtgcctgctgctgtgcagccacatacacacaattgtagcctgatttttagaagtgtgggtaattttttaatgaatttcctccttgagtagcagctgaggtcattgacaactgaagtgatggtgtggacatagagagaggggaagggttggaaaggagtaagtgatacactgctggaatttgtttcctgcctatgaaataaaattatttttcagaattaaatttgaaaacttgcactacagaactatgggtggagcttttccttttacaacagtttttttttttttttttttaaccagagtttaaacttccattaggcaatttcctgtcacttgaaatgtcaacatttgctaacttttggatatccttttggttacaccaaagaaaaagttatggctattttttttttccttgaactgcctacagtatcatgtcctaattcagaaagatttatcaaaatctattatatattatcttactttgaagaaaatgctgaatagctcttgttagtcaaataaactgataaaaattggtagggcctggctatcaattagccctgggaaatgaatttttagattaaaaaggtttttttgcatcatttggtttgtgcatttttatatttgtttataaataattgagttgctaattacttctaatcttctccaatcagattttcaacaattttagacatgggacacacgtgtgtgaagtctttattttaatgtaataatctcattacccccacccttactcccttaacttccatgtacttagactcctttatttgttaaataaactagagtattgtcttcttcatt

SEQ ID NO: 22478 - DNA, 3550 bp, Homo Sapiens
gggccgcactggaccagggatgagagtgggtgcccgggactcgcctatactgcctgggggtgcagcccgcactcctcactatagtcagatcaactatgcgtgctttccagtggcctgggagaggactccatagggagggatgcttaccttgtgggctttggaatataagccctttcaccttctccgctggtcctcatcacgttggcaaggcaggtattgtgaccctgttttctcaggtgaggacatggaggctgggaggggtctagagactggcctggctagtaggaggctgagtcaggatttgaaccagcagatcatctgaccccggagccagtcgtgggcggcacagcgggagctgcaaccgaggctcttgactcctgcgtcgtcattccctgaggtccacaggacaaccagttggggacctggggccccatcctgatgccctggggagaggtgctaggccccttttgggtctatgggctacttttgggccagtggagctgggtaaagaccatctcaaaccctgtgccaggggaggtcggactccaagagcgccacctttgggcttccagctgtgtaggctggaccaagaaggctcagagaattagggggttcgtatttgatccttttccttccaagactgggattaccagataaaacacagggcatccagttacatttgaatttcaggtaacaattttttttaagtgtaagtatgtagccaatattgcatgagaaatactcatgctaaaaagttattcgtcgtttatctgaaatgcaagttcaaatttaaccgagtaccctgtatttttatttgctaaatctagaaaccctctccaagaggctccttggcccactcacagggagagcccgatctccctctggacaggggaggccccctttctcaggccagaaaagatcttgtagtaaactactcaagaggctgaggcaggaggatcgcttgagcccaggaattcaagacctgcctgggcaacagagcaagaccctgtctctagggaagatatcctaccgtagcctccctcggggactcccattcctcccacctcagggccagtcaagggaacaggcctctgctctgggcagaagtgccggcagccgctctctgaaaagctaggtgttgcctcagggtctcccggtgtcctgtggaaaatgcctggccacggtttccatggttcccaggctccaaccctgcagttctcagccctcattcaggaggggcctcggcagggtggggggtgccgtctttcccttgctggagccccaaggactctgccggctccctcgctttggcagcagcactgcccaccctgtctctggaggttcccccgcctcaatccacccagctaccccgaaaggcacaatcataggcctttctcgtcttttaagggtttttacttccatggggaactatgtgttggatgagaaaagtatccggggaaggggacagaggttcagaaagctctgcgagtcctggacgctggtctgccttcttggctcaccctggaaggtggacgctggccccacacatcccctcttaaagacgcaggccgatagccagcagatcctggggcttgctggccccaagtgagttgtcagggtttcagaggacaccagtcatggcaaccccagctccatggctgccacacaggcctgggcttcccaggactgcctccttcttgttcgcttatgtagatgaaaaatgaggtaacggcactcccctgccccaccctcctcccagaagtgcccagggtgtaaacgcaatagcttgtgtgaagtccactggaacccaggctcaccaagtcagtcttaaccaacacaggccccagcacccgcagagcagacactgcgatgacaacggacgacacagaagtgcccgctatgactctagcaccgggccacgccgctctggaaactcaaacgctgagcgctgagacctcttctagggcctcaaccccagccggccccattccagaagcagagaccaggggagccaagagaatttcccctgcaagagagaccaggagtttcacaaaaacatctcccaacttcatggtgctgatcgccacctccgtggagacatcagccgccagtggcagccccgagggagctggaatgaccacagttcagaccatcacaggcagtgatcccagggaagccatctttgacaccctttgcaccgatgacagctctgaagaggcaaagacactcacaatggacatattgacattggctcacacctccacagaagctaagggcctgtcctcagagagcagtgcctcttccgacagcccccatccagtcatcaccccgtcacgggcctcagagagcagcgcctcttccgacggcccccatccagtcatcaccccgtcacgggcctcagagagcagcgcctcttccgacggcctccatccagtcatcaccccgtcacgggcctcagagagcagcgcctcttccgacggcccccatccagtcatcaccccgtcacgggcctcagagagcagcgcctcttccgacggcccccatccagtcatcaccccgtcacgggcctcagagagcagcgcctcttccgacggcccccatccagtcatcaccccctcatggtccccgggatctgacgtcactctcctcgctgaagccctggtgactgtcacaaacatcgaggttattaattgcagcatcacagaaatagaaacaacgacttccagcatccctggggcctcagacacagatctcatccccacggaaggggtgaaggcctcgtccacctccgatccaccagctctgcctgactccactgaagcaaaaccacacatcactgaggtcacagcctctgccgagaccctgtccacagccggcaccacagagtcagctgcacctgatgccacggttgggaccccactccccactaacagcgccacagaaagagaagtgacagcacccggggccacgaccctcagtggagctctggtcacagttagcaggaatccccttgaagaaacctcagccctctctgttgagacaccaagttacgtcaaagtctcaggagcagctccggtctccatagaggctgggtcagcagtgggcaaaacaacttcctttgctgggagctctgcttcctcctacagcccctcggaagccgccctcaagaacttcaccccttcagagacaccgaccatggacatcgcaaccaaggggcccttccccaccagcagggaccctcttccttctgtccctccgactacaaccaacagcagccgagggacgaacagcaccttagccaagatcacaacctcagcgaagaccacgatgaagccccttctctattaagaatacaaaaattagctgggtgtggtggcacacacctgtagtcccagctacttgggaggctgaggcaggagaattacttgagcctgggaggcggaggttgcagtgagccaagatcacaccactgcactccagcctgggcaacagagcaagtgtctaaataaaaagaaagaaagaaagaaaggaaggaaggaaggaaggaagg

SEQ ID NO: 22479 - DNA, 4810 bp, Homo Sapiens
gaaattttaatttattattcccccctttttttcctgcatctataggataatattgtaaaatagcaattgaaaccaataatcattaaataaatatcaaggaaaatccaagcaaagctttctttttgttggactagtggtgtggtgtttggagacagtctctgaatgtgaacaggaaagcacccatcagcaaaacacgatcactctctagggagacagctgggggaatctgactctggcttctgcttttgttttaagggattaacttccctgtcaagtccaagaagacttgcgtatgagaagattacctgatggacttaattctaagattagcttttttcatcaagatggaaaaagatctttaggagcagaaaaggggagtgctaactgggggagcgagaagggagacgagcaaaagaaacaaaatcttgccacgtggctctgttttgtcagcaagaggatttaagactcacccagggcaaacactgggaccactgtaagagcgctggaacattctgcctcttgagtgaaggggccttctttctagcctctatggcactgaggggtgcgccggctggtggaggagtagtccgatggagccctgcgttccccggggacacagggccaagctttgaggtggaaagtttctggttctgaaacaacaaggagagagtctgtttttcttcctaaaatttggactcttgtctgcacaaactctggtctgttttgcacggtttgtgtgcctttttttccctttatgcaatctttttcagctttagcagcagaaatttgtctagttcaggaaacatgctagagggtggcttcagaaggaagatgatcctgtgtattctgtctctgcatccgaacttttgaagagaaaaattcgagctagagggattcttaaagccttaagttacttgaaatctatgtatttgcaaccctttgtctctggaatcatattacactaaactggaatctcaggctgaatgagaataaccaagtggagtaaaaagaagaaaaccgtttcttgatcaccacttaattaacgatgctctttctccaaaggatcagcacgttcttcctctgagaacttgaaaatacaaatggaccccatgtttttttaagcattaccttttcttagaagactgccatcatcttttatagaggaattttttcactatgcattcagtggatctttataaaatactgaccttctaattagattcaggtcagtcttaattaaagggggaaaaaagcaacgcaagccaaccacaaaaacacatataccaatgaaagaaattggtttaaatttcacagcattaacattactttttaagtaaaacagttcattgaagaaagtatgtatgcagcagtggaacatgggcctgtgctttgcagtgactccaacatcctgtgcctgtcctggaaggggcgtgtccccaagagtgagaaggagaagcctgtgtgcaggagacgctactatgaggaaggctggctggccacgggcaacgggcgaggagtggttggggtgactttcacctctagtcactgtcgcagggacaggagtactccacagaggataaatttcaacctccggggccacaatagcgaggttgtgctggtgaggtggaatgagccctaccagaaactggccacgtgcgatgcggacggaggcatattcgtgtggattcagtacgagggcaggtggtctgtggagctggtcaacgaccgcggggcgcaggtgagtgatttcacgtggagccatgatggaactcaagcacttatttcctatcgagatgggtttgtcctggttgggtctgtcagtggacaaagacactggtcatccgaaatcaacttggaaagtcaaattacgtgtggcatatggactcctgacgaccaacaggtgctgtttggcacggccgatgggcaggtgattgtcatggattgccacggcagaatgctggcccacgtcctcttgcacgagtcagacggtgtcctcggcatgtcctggaactacccgatcttcctggtggaggacagcagcgagagcgacacggactcagatgactacgcccctccccaagatggtccggcagcatatcccatcccagtgcagaacatcaagcctctgctcaccgtcagcttcacctcgggagacatcagcttaatgaacaactacgatgacttgtctcccacggtcatccgctcagggctgaaagaggtggtagcccagtggtgcacacagggggacttgctggcagtcgctgggatggaacggcagacccagcttggtgagcttcccaatggtccccttctgaagagtgccatggtcaagttctacaatgttcgtggggagcacatcttcacactggacactctcgtgcagcgccccatcatctccatctgctggggtcaccgggattcgaggctgttgatggcatcaggaccagccctgtacgtggtgcgtgtggagcaccgggtgtccagcctgcagctgctgtgccagcaggccatcgccagcaccttgcgtgaggacaaggacgtcagcaagctgactctgcccccccgcctctgctcctacctctccactgccttcatccccaccatcaagcccccaattccagatccgaacaacatgagagactttgtcagctacccatcagccggcaacgagcggctgcactgcaccatgaagcgcacagaggacgacccggaggtgggcggcccgtgctacacgctctacctggagtacctgggcgggcttgtgcccatcctcaaagggcggcgcatcagcaagctgcggccagagttcgtcatcatggacccgcggacagatagcaaaccagatgaaatctatgggaacagcttgatttctactgtgatcgacagctgcaactgctcagactccagtgacattgagctgagtgatgactgggctgccaagaaatctcccaaaatctccagagctagcaaatcacccaaactcccaaggatcagcattgaggcccgcaagtcacccaagctgccccgggctgctcaggagctctcccggtccccacggttgcccctgcgcaagccctctgtgggctcgcccagcctgactcggagagagtttccttttgaagacatcactcagcacaactatcttgctcaggtcacgtctaatatctggggaaccaaatttaagattgtgggcttggctgctttcctgccaaccaacctcggtgcagtaatctataaaaccagcctcctgcatctccagccgcggcagatgaccatttatctcccagaagttcggaaaatttccatggactatattaatttacctgtcttcaacccaaatgttttcagtgaagatgaagatgatttaccaggtgatgcagtttggacggattgatggcagtgcgtacattctagacttccagtatccgttctcagccgtgcaggcctttgcagttgccctggccaacgtgactcagcgcctcaaatgaagagactggtgtggggaggagagagatgcagagagcctttggaagaggtcttcggagatgccagaggagccctctaggggtccgatgcctgggaggaccagaagccaacagcaaaactggaaaagcccggcaggcccaggagagggcgctgacctgtggtcgtcatttatttggttgggttttattaccttttattgtctgttcttcttttcttctttcatttcagtggcatttggaagcaaagagtgctaggcacctgctgttctttcaggaaacagcttggctgtggtaatgctctactgggcccttcagaatgaagacagtctgccttagagcctgctattcttttagacatagggaggatgcattatcctgtattctcctccaacatcaccactagcgtaaaagcaaaaagcttttacaaaacacagccaaaaattctcaagatgcaggttcttggggaatgggatggggacagcatttgatttacactgattatgttactccccaaaaggtgacttaattaataaagggcatttgggcagacacactgtgttggaccaacaaagtaggctctttacaggggtgttctcaccaggtagaaatgcgatttgctcactgaggatgttggggaagggacgaagggtaaagaagaaactgcacgtatacacaggttcacatcactctgcagacagcaatgtgactcagcgtgtgacttgtagcagcagtacgagggctacactcctctgctgaggatgtctacattgaaagcctccactagtttcatcgtttgtcaaagttccgtaggatcagtgatggtcattcagcatgactggttctgggagaaggtgagagacaaaaatggaaagatcctggcctgtggtagtggtagcagttttctcaaataatgtggtgacagtcactagatcctcacatgctgagaaacagcctctactctctctgccccttttactttttaatctggaatgcattactgtaaacatgatctttcccatgagataccatgttctatgccttcccattctaaaagtgtggacaacgcttgatttgaaaccacttcttttctcctcttggctacattaaaattcagttgactacaaatgctttctatcaaattagaaatgtaaccaaaaaaatgttaagtgttcaccagggtattaaaatacagaggagtatggtcaaatctttgacaaaattttcatgatcttctctaacaaaaaaagttgtttattaactgtacagactgtttactaaggagctaaaccactgagaaaacgttattaaaattgtaatacctaggt

SEQ ID NO: 22480 - DNA, 4434 bp, Homo Sapiens
gcggccgcgtccaccaagcagaccatcactgagagcagcagcctcctcctgtcgcagctcaccagcctggacccccaggggcccccccggaggcctccccctcacatcctggatcaagtgaaaagcctcaaccagtccctccgcctcgggcacctcttgtgccgcagccgaaaccctgactttctcctccacatcatccagcggcaggcctcctcgcagtccatgccctggctggcggacctggtacagtccagcgagggctccctggacgtgctgcccgtgcagtgtctgtgcgagttcctgctgcacgatgctgtggacgatgctgcttccggggaggaggacgacgagggcgagagcaaggagcagaaggccaagaagcggcagaggcaacagaagcagcggcagctgctgggccgcctgcaggacctgctactgggcccgaaggctgatgagcagaccacgtgtgaggtgctggactacttcttgcggcgcctcggctcctcccaggtggcctcccgcgtgctggccatgaagggtttgtcgctggtgctttcggagggcagcctgcgggacggggaggagaaggagccccccatggaggaggatgtgggggacacagatgtgctgcagggctatcagtggctgctgcgggacctgcctcgcctgcctctgttcgacagcgtcaggagcaccacagccctggccctgcagcaggcaatccacatggagactgatccccagaccatcagcgcctacctgatctacttgtcccagcacacgcctgtggaggagcaggcccagcacagcgacctggccctggacgtggcccggctggtcgtggagcgctccaccatcatgtcccacctcttctcgaagctctccccgagtgccgcgtcggacgccgtgctgagcgctctgttgtccatcttctcacgctacgtgaggcgcatgcggcagagcaaggagggcgaggaggtctacagctggtcggagtctcaggaccaggtcttcctacgctggagcagcggggagacagccaccatgcacatcctcgtggtccatgccatggtgatcctgctgacgctgggcccgcctcgagccgacgacagcgagttccaggcgctgctggacatctggtttccggaggagaagccactgcccaccgccttcctggtggacacatcggaggaggcgctgctgcttcctgactggctgaagctgcgcatgatccgttctgaggtgctccgcctggtggacgccgccctgcaggacctggagccgcagcagctgctgctgttcgtgcagtcgtttggcatccccgtgtccagcatgagcaaactcctccagttcctggaccaggcagtggcccacgacccccagactctggagcagaacatcatggacaagaattacatggcccacctggtggaggtccagcatgagcgcggcgcctccggaggccagactttccactccttgctcacagcctccctgccgccccgccgagacagcacagaggcacccaaaccaaagagcagcccagagcagcccataggccagggccggattcgggtggggacccagctccgggtgctgggccctgaggacgacctggctggcatgttcctccagattttcccgctcagcccggaccctcggtggcagagctccagtccccgccccgtggccctcgccctgcagcaggccctgggccaggagctggcccgcgtcgtccagggcagccccgaggtgccgggcatcacggtgcgtgtcctgcaggccctcgccaccctgctcagctccccacacggcggtgccctggtgatgtccatgcaccgtagccacttcctggcctgcccgctgctgcgccagctctgccagtaccagcgctgtgtgccacaggacaccggcttctcctcgctcttcctgaaggtgctcctgcagatgctgcagtggctggacagccctggcgtggagggcgggcccctgcgggcacagctcaggatgcttgccagccaggcctcagccgggcgcaggctcagtgatgtgcgaggggggctcctgcgcctggccgaggccctggccttccgtcaggacctggaggtggtcagctccaccgtccgtgccgtcatcgccaccctgaggtctggggagcagtgcagcgtggagccggacctgatcagcaaagtcctccaggggctgatcgaggtgaggtccccccacctggaggagctgctgactgcattcttctctgccactgcggatgctgcctccccgtttccagcctgtaagcccgttgtggtggtgagctccctgctgctgcaggaggaggagcccctggctggggggaagccgggtgcggacggtggcagcctggaggccgtgcggctggggccctcgtcaggcctcctagtggactggctggaaatgctggaccccgaggtggtcagcagctgccccgacctgcagctcaggctgctcttctcccggaggaagggcaaaggtcaggcccaggtgccctcgttccgtccctacctcctgaccctcttcacgcatcagtccagctggcccacactgcaccagtgcatccgagtcctgctgggcaagagccgggaacagaggttcgacccctctgcctctctggacttcctctgggcctgcatccatgttcctcgcatctggcaggggcgggaccagcgcaccccgcagaagcggcgggaggagctggtgctgcgggtccagggcccggagctcatcagcctggtggagctgatcctggccgaggcggagacgcggagccaggacggggacacagccgcctgcagcctcatccaggcccggctgcccctgctgctcagctgctgctgtggggacgatgagagtgtcaggaaggtgacggagcacctgtcaggctgcatccagcagtggggagacagcgtgctgggcaggcgctgccgagaccttctcctgcagctctacctacagcggccggagctgcgggtgcccgtgcctgaggtcctactgcacagcgaaggggctgccagcagcagcgtctgcaagctggacggactcatccaccgcttcatcacgctccttgcggacaccagcgactcccgggcgttggagaaccgaggggcggatggcagcatggcctgccggaagctggcggtggcgcacccgctgctgctgctcaggcacctgcccatgatcgcggcgctcctgcacggccgcacccacctcaacttccaggagttccggcagcagaaccacctgagctgcttcctgcacgtgctgggcctgctggagctgctgcagccgcacgtgttccgcagcgagcaccagggggcgctgtgggactgccttctgtccttcatccgcctgctgctgaattacaggaagtcctcccgccatctggctgccttcatcaacaagtttgtgcagttcatccataagtacattacctacaatgccccagcagccatctccttcctgcagaagcacgccgacccgctccacgacctgtccttcgacaacagtgacctggtgatgctgaaatccctccttgcagggctcagcctgcccagcagggacgacaggaccgaccgaggcctggacgaagagggcgaggaggagagctcagccggctccttgcccctggtcagcgtctccctgttcacccctctgaccgcggccgagatggccccctacatgaaacggctttcccggggccaaacggtggaggatctgctggaggttctgagtgacatagacgagatgtcccggcggagacccgagatcctgagcttcttctcgaccaacctgcagcggctgatgagctcggccgaggagtgttgccgcaacctcgccttcagcctggccctgcgctccatgcagaacagccccagcattgcagccgctttcctgcccacgttcatgtactgcctgggcagccaggactttgaggtggtgcagacggccctccggaacctgcctgagtacgctctcctgtgccaagagcacgcggctgtgctgctccaccgggccttcctggtgggcatgtacggccagatggaccccagcgcgcagatctccgaggccctgaggatcctgcatatggaggccgtgatgtgagcctgtggcagccgacccccctccaagccccggcccgtcccgtccccggggatcctcgaggcaaagcccaggaagcgtgggcgttgctggtctgtccgaggaggtgagggcgccgagccctgaggccaggcaggcccaggagcaatactccgagccctggggtggctccgggccggccgctggcatcaggggccgtccagcaagccctcattcaccttctgggccacagccctgccgcggagcggcggatccccccgggcatggcctgggctggttttgaatgaaacgacctgaactgtc

SEQ ID NO: 22481 - DNA, 3239 bp, Homo Sapiens
gggcggccgcaccgggcagcaaccccactcccactcggaggccccctgccctctcccccacttccccccggcccatggtgcgaggctgggagccgccgcccgggctggactgcgctatctctgaagggcacaaatcagaaggcaccatgcctcctaataaagaggccagcggtctcagtagttcaccagcggggctcatctgcctccctccaatctctgaggagctacagcttgtgtggacgcaagcagcccagaccagtgagctagacagcaatgaacacctgctcaaaaccttcagctactttccctatcccagcctagcagacattgcccttctctgcctacgttatgggttgcagatggagaaagtcaagacttggtttatggcccagcgcctccgctgtggtattagctggtcatctgaagaaatagaagagactcgagcccgagtagtctaccgtcgggaccaactccatttcaaatcccttctctcttttactcatcatgcgggacggcccccagaggaggtgcctcctcctccagtgccagctccagagcaagttggtattggaataggtcctccaactcttagcaagcctacccagacgaaaggattgaaggtagagcctgaggagccctctcagatgccaccactgccacagagtcaccagaaattaaaggagtccctgatgacacctggcagtggagcattcccctaccaatcagatttttggcaacatcttcaaagcagtggcctctcaaaggagcaggcaggcaggggtcccaaccagtcacatggcataggtactgcttcctggaaccactccacaaccgtcccccagccacaagctcgggataaacccccaccaattgcattaattgccagtagttgtaaggaggagtcagcatctagtgttactccctcttcttcctctacctcttcttctttccaggtactggctaatggagctactgccgcctctaaacccctccagccactaggctgtgtcccacagtcagtgtcacccagtgaacaggcattacccccacatctggaaccagcctggccccaagggctacggcataactcagtaccaggtagagttggccccacagagtacctttccccagatatgcaacgccagcgaaagaccaagcgcaaaaccaaagagcagctggctatccttaaatccttttttttacagtgccagtgggcacggcgtgaggattaccaaaagttagaacagatcactggtttacctcggcctgagatcattcagtggtttggtgacacacgctatgccttgaagcatgggcaactaaagtggtttcgggacaacgcagtacctggtgcccctagtttccaagacccagcaattcctacaccaccaccatcaacccgctccttgaacgaaagggctgagacaccacctctgccgatccctccacccccaccggatatacaacccttggagaggtactgggcagcccaccaacagctacgggaaactgatatccctcaattgagtcaggcatcaaggcttagcacccagcaggtgctggattggtttgactctcgattacctcagccagctgaggtggtagtttgtctagatgaagaagaggaagaggaggaggaagaactgccagaagatgatgaggaagaggaggaggaggaggaagatgatgatgatgatgatgatgatgtgatcatacaagactgagtggggagctgggggaggggaggtctgttactgaaagatgaaccaacttagtaactgtttaaacaaagaaaccacatttttaaaattaccttgtggcagagaactaaaaagctttgtgttcttcagggtgggtggcagggggatatagtgagggtggaccagggagaatgaccatagggcactaagtaaggctgggattggatcagcagaaatccaaccctctaaccttagggtagggagtgctaaggatctggggaaaccatgggctgggaagctgctcttgctctcctcgtgtctgctgtttttttcccttggtgtactatacagaggccagatgttggcaccacctctccaggaggattggaaaggaggagtaaaggattctgatttgattgatgattccagtgcatccccaatcccaccatcttacctggaatataaggctgccttgtaccccttttctgagcacaagtctgtgcgtaatgcaactgactctcttacttttttcttagtaactgatcatttcctagacaaccaagattctcaataagtcccagtctcatcacaaatattaatatttccttttcctcataccaacttgactatgtttcacccgcttcatgactaaatcacaggtggcagaatttttcagttcttttttttttttttgaggtggagtcttgctctgtcgcccaggctgtagtgcaatggcgcaatctcagctcactgcaagctccgcctcccaggttcatgccattctcctgcctcagcctcccgagtagctgggactacaggcacctgccaccacacccggctacttttttatatttttagtagagacgggtttcatcatgttagccaggatggtcttgatctcctgacctcatgatccgcccaccttggcctcccaaagtgctgggattataggcatgagccaccgtgcccggctattttcagttcttatgctgtgaccactttgccttgtagctttttctatctttccaaaatcctcactctgttcattgtttgtctcagggaaaatcttcccccaccgagcttgtaaaaaactttaataattgggtggagaataatttagaatggatatttattggaggtggtaattagggaagatgtccttttaaacagtagaattgtgttacaaaggggtgaaagagagggaatagtttctccttgttgaagggcagtgaaggtaggtttcaggtttggttttacaaacctgttaactacctcctgtccagcttgacagagactaatttttcatctttttgctgtcaatttgtttccagaaaagagacttttccctctcttgataggatctgtcttagggacagagggaccatcgtctttaagtgaattaattattgatgttttagaatggttttcatcagttgggatcagctatatggcaaataggtatcatcaatgagttaaccatctaaaaataaaagagtggaagccctaaaatgctagaataataataaaaaggccaaaaat

SEQ ID NO: 22482 - DNA, 2129 bp, Homo Sapiens
tcctatccaccctccactcccctgtcccttggtgactcatccctgagcttcccaaggaagcccccaccctctgccctttcctcccgccttccatgagtggaaaatccacctccgccccctatagcaggccagcccccttcctccccagtctccgaccccatcccccagccgaccagtttcctctccaggaccagggagcaatcacagctgccccgaccttggcttcctctgctgggtgggattgggggctgggcccccaaatgggcccctggcttcccccttcctctgggcaggggacagagagacacaggctcggggagcaggactgacttcctcttgtcccggaatgagcatgcctgccctttgcaagcaggtttgggtctcacgcagaggaaaccaaaagcaataagagggagggaaggcagagcaaccaatcaagggcagggtgagactcaaaacgagcgggctccctggggagccagacagaggctgggggtgatggcggagctacagcagctgcaggagtttgagatccccactggccgggaggctctgaggggcaaccacagtgccctgctgcgggtcgctgactactgcgaggacaactatgtgcaggccacagacaagcggaaggcgctggaggagaccatggccttcactacccaggcactggccagcgtggcctaccaggtgggcaacctggccgggcacactctgcgcatgttggacctgcagggggccgccctgcggcaggtggaagcccgtgtaagcacgctgggccagatggtgaacatgcatatggagaaggtggcccgaagggagatcggcaccttagccactgtccagcggctgccccccggccagaaggtcatcgccccagagaacctaccccctctcacgccctactgcaggagacccctcaactttggctgcctggacgacattggccatgggatcaaggacctcagcacgcagctgtcaagaacaggcaccctgtctcgaaagagcatcaaggcccctgccacacccgcctccgccaccttggggagaccaccccggattcccgagccagtgcacctgccggtggtgcccgacggcagactctccgccgcctcctctgcgtcttccctggcctcggccggcagcgccgaaggtgtcggtggggcccccacgcccaaggggcaggcagcacctccagccccacctctccccagctccttggacccacctcctccaccagcagccgtcgaggtgttccagcggcctcccacgctggaggagttgtccccacccccaccggacgaagagctgcccctgccactggacctgcctcctcctccacccctggatggagatgaattggggctgcctccacccccaccaggatttgggcctgatgagcccagctgggtgcctgcctcatacttggagaaagtggtgacactgtacccatacaccagccagaaggacaatgagctctccttctctgagggcactgtcatctgtgtcactcgccgctactccgatggctggtgcgagggcgtcagctcagaggggactggattcttccctgggaactatgtggagcccagctgctgacagcccagggctctctgggcagctgatgtctgcactgagtgggtttcatgagccccaagccaaaaccagctccagtcacagctggactgggtctgcccacctcttgggctgtgagctgtgttctgtccttcctcccatcggagggagaaggggtcctggggagagagaatttatccagaggcctgctgcagatggggaagagctggaaaccaagaagtttgtcaacagaggacccctactccatgcaggacagggtctcctgctgcaagtcccaactttgaataaaacagatgatgtcctgtgactgccccacagagataaggggccaggagggattgaaaggcatcccagttctaaggctgctgctaattacagcccccaacctccaacccaccagctgacctagaagcagcatcttcccatttcctcagtacccacaaagtgcagcccacattggaccccagacacccctctgcagccattgactgcaacttgttcttttgcccattaaaaaaaaaaaaaaaaaaaaa

SEQ ID NO: 22483 - DNA, 4239 bp, Homo Sapiens
aattcggcacgagaacagctgtcacctagtgcggaacaagtctcccaaatttcccaaatctccctgggccggaggccactgtcttctcttcctcctccaccgagtcgtgctctcgccccaacccgcgcgccagacactgccctaaccatcatggaggtggccgaggtggaaagtcctctgaaccccagctgtaagataatgaccttcagaccctccatggaggagttccgggagttcaacaaataccttgcatacatggagtctaaaggagcccatcgtgcgggtcttgcaaaggtgattcctcctaaggagtggaagccaagacagtgctatgatgacattgataatttgctcattccagcaccaattcagcagatggtcacagggcagtcaggactgttcactcagtacaacatccagaaaaaagcgatgactgtgaaggagttcaggcagctggccaacagtggcaaatattgtactccaagatacttggattacgaagatttggagcgcaagtactggaagaacttaacttttgtggcacctatctatggtgcagatattaatgggagcatatatgatgagggtgtggatgaatggaacatagctcgcatcaatacagtcttggatgtggttgaagaagagtgtggcatttctattgagggtgtaaataccccatatctctattttggcatgtggaagaccacgtttgcatggcacaccgaagacatggacctctatagcattaattatctccactttggagagcccaagtcttggtatgctatacctccggagcatggaaaacgacttgaaagactagctcaaggttttttcccaagcagctcccaagggtgtgatgcatttcttcgccacaagatgacattgatttctccatcagtattgaagaaatatggtattccctttgacaagataacccaggaggctggagaattcatgatcactttcccatatggctaccatgctggttttaatcatggtttcaactgtgcagaatctacaaattttgctactgtcagatggattgactatggaaaagttgccaaattgtgcacttgcaggaaagacatggtgaagatttcaatggatatctttgtgaggaaatttcagccagacagatatcagctttggaaacaaggaaaggatatatacaccattgatcacacgaagcctactccagcatccacccctgaagtaaaagcatggctgcagaggaggaggaaagtaagaaaagcatcccgaagcttccagtgtgctaggtctacctctaaaaggcctaaggctgatgaggaagaggaagtgtcagatgaagtcgatggggcagaggtccctaaccccgactcagtcacagatgacctcaaggtcagtgaaaagtcagaagcagcagtgaagctgaggaacacagaagcatcttcagaagaagagtcatctgctagcaggatgcaggtggagcagaatttatcagatcatatcaaactctcaggaaacagctgcttaagtacatctgtaacagaagacataaaaactgaggatgacaaagcttatgcatatagaagtgtaccttctatatccagtgaggctgatgattccattccattgtctactggctatgagaagcccgagaaatcagacccatccgagctttcatggccaaagtcacctgagtcatgctcatcagtggcagagagtaatggtgtgttaacagagggagaagagagtgatgtggagagccatgggaatggccttgaacctggggaaatcccagcggtccccagtggagagagaaatagcttcaaagtccccagtatagcagagggagagaacaaaacctctaagagttggcgccatccacttagcaggcctccagcaagatctccgatgactcttgtgaagcagcaggcgccaagtgatgaagaattgcctgaggttctgtccattgaggaggaagtggaagaaacagagtcttgggcgaaacctctcatccacctttggcagacgaagtcccctaacttcgcagctgagcaagagtataatgcaacagtggccaggatgaagccacactgtgccatctgcactctgctcatgccgtaccacaagccagatagcagcaatgaagaaaatgatgctagatgggagacaaaattagatgaagtcgttacatcggagggaaagactaagcccctcataccagagatgtgttttatttatagtgaagaaaatatagaatattctccacccaatgccttccttgaagaggatggaacaagtctccttatttcctgtgcaaagtgctgcgtacgggttcatgcaagttgttatggtattccttctcatgagatctgtgatggatggctgtgtgcccggtgcaaaagaaatgcgtggacagcagaatgctgtctctgcaatttgagaggaggtgctcttaagcaaacgaagaacaataggtgggcccatgtcatgtgcgccgttgcggtcccagaagttcgattcactaatgtcccagaaaggacacaaatagatgtaggcagaatacctttacagaggttaaaattgaaatgcatcttctgcagacaccgggttaagagggtctctggagcctgcatccagtgttcctacggtcgctgcccggcctccttccatgtcacttgtgcccatgctgctggggtactgatggagcctgatgattggccttatgtggtgaacattacatgctttcgacataaggtcaaccccaacgtgaagtccaaggcttgcgagaaggtcatttccgtgggtcaaacggtcatcacgaagcatcggaacacccggtattacagttgcagagtgatggctgtgacatcgcagaccttctatgaggtcatgtttgatgatggctcctttagcagagacacatttcctgaggatatcgtgagccgagactgtctgaagctgggcccacctgctgagggagaagtcgtccaagtcaagtggcccgatggcaaactctatggagcaaaatattttggatcaaatattgcccacatgtaccaggttgagtttgaagatggatcccagatagcaatgaagagagaggacatctacactttagatgaagagttacccaagagagtgaaagctcgattttccacagcctctgacatgcgatttgaagacacgttttatggagcagacattatccaaggggagagaaagagacaaagagtgctgagctccaggtttaagaatgaatatgtggccgaccctgtataccgcacttttttgaagagctctttccagaagaagtgccagaagagacagtagtctgcatacatcgctgcaggccacagagcagcttgggttggaaaagagaagatgaagggacatccttggggctgtgccgtgagatttgctggcataggtgacagggtgtgtctctgacagtggtaaatcgggtttccagagtttggtcaccaaaaatacaaaatacacacaatgaattggacgcagcaatctgaaatcatctctagtcttgctttcacttgtgagcagttgtcttctatgatcccaaagaagttttctaagtgaaaggaaatactagtgaatcacccacaaggaaaagccactgccacagaggaggcgggtccccttgtgcggcttagggccctgtcaggaaacacacggggacctctctctctagctccagcaggtggcacctcggtacccagcgggtagggcgataatttatatattttccacagtcagggaaggactctcacttatttgtttcaaattgcagtttttataaaacatttttaaaacacaaatggcatgtatgctaatgagatttacccgtgtgctatctgtatttcccttgtacagaacttttacatttttgaatattcctattacttttgattgtgtctgatgggaactgagttgttggcctttgtgaaatgaaatttttggctcttgagaaagaattcttatgaattgttatgcgaattttatatatttaaagagggagatctggggctgttatttttaaacactttttttcataatacatattccgagtagatatttataaaatatatgtttctttcattatgtgtttgtaaaattagagtttaaataaatatgctttgatgcatagttttgaactaatgtaacatgatttttcttttttaaaacagcctgaaaatgtactagtgtttaaaaataaagatttccattttctcc

SEQ ID NO: 22484 - DNA, 3869 bp, Homo Sapiens
gagccggtggcgcaggtgtcggggtcctcgagcgcccagcctgggagcatgattgtggacaagctgctggacgacagccgcggcggagaggggctgcgggacgcggcgggcggctgcggcctcatgaccagcccgctcaacctgagctacttctacggcgcgtcgccgcccgccgccgccccgggcgcctgcgacgccagctgctcggtcttgggcccctcggcgcccggctcgcccggctccgactcctccgacttctcctctgcctcgtcggtgtcctcctgcggcgccgtggagtcccggtcgagaggcggcgcccgcgccgagcgccagccagttgagccccatatgggggttggcaggcagcagagaggcccctttcaaggtgttcgggtaaagaactcagtgaaggaactcctgttgcacatccgaagtcataaacagaaggcttctggccaagctgtggatgattttaagacacaaggtgtgaacatagaacagttcagagaattgaagaacacagtatcatacagtgggaaaaggaaagggcccgattcgttgtctgatggacctgcttgcaaaaggccagctctgttgcattcccaatttttgacaccacctcaaacaccaacgcccggggagagcatggaagatgttcatctcaatgaacccaaacaggagagcagtgctgatctgcttcagaacattatcaacattaagaatgaatgcagccccgtttccctgaacacagttcaagttagctggctgaaccccgtggtggtccctcagagctcccccgcagagcagtgtcaggacttccatggagggcaggtcttttctccacctcagaaatgccaaccattccaagtcaggggctcccaacaaatgatagaccaggcttccctgtaccagtattctccacagaaccagcatgtagagcagcagccacactacacccacaaaccaactctggaatacagtccttttcccatacctccccagtcccccgcttatgaaccaaacctctttgatggtccagaatcacagttttgcccaaaccaaagcttagtttcccttcttggtgatcaaagggaatctgagaatattgctaatcccatgcagacttcctccagtgttcagcagcaaaatgatgctcacttgcacagcttcagcatgatgcccagcagcgcctgtgaggccatggtggggcacgagatggcctctgactcttcaaacacttcactgccattctcaaacatgggaaatccaatgaacaccacacagttagggaaatcactttttcagtggcaggtggagcaggaagaaagcaaattggcaaatatttcccaagaccagtttctttcaaaggatgcagatggtgacacgttccttcatattgctgttgcccaagggagaagggcactttcctatgttcttgcaagaaagatgaatgcacttcacatgctggatattaaagagcacaatggacagagtgcctttcaggtggcagtggctgccaatcagcatctcattgtgcaggatctggtgaacatcggggcacaggtgaacaccacagactgctggggaagaacacctctgcatgtgtgtgctgagaagggccactcccaggtgcttcaggcgattcagaagggagcagtgggaagtaatcagtttgtggatcttgaggcaactaactatgatggcctgactccccttcactgtgcagtcatagcccacaatgctgtggtccatgaactccagagaaatcaacagcctcattcacctgaagttcaggagcttttactgaagaataagagtctggttgataccattaagtgcctaattcaaatgggagcagcggtggaagcgaaggatcgcaaaagtggccgcacagccctgcatttggcagctgaagaagcaaatctggaactcattcgcctctttttggagctgcccagttgcctgtcttttgtgaatgcaaaggcttacaatggcaacactgccctccatgttgctgccagcttgcagtatcggttgacacaattagatgctgtccgcctgttgatgaggaagggagcagacccaagtactcggaacttggagaacgaacagccagtgcatttggttcccgatggccctgtgggagaacagatccgacgtatcctgaagggaaagtccattcagcagagagctccaccgtattagctccattagcttggagcctggctagcaacactcactgtcagttaggcagtcctgatgtatctgtacatagaccatttgccttatattggcaaatgtaagttgtttctatgaaacaaacatatttagttcactattatatagtgggttatattaaaagaaaagaagaaaaatatctaatttctcttggcagatttgcatatttcatacccaggtatctgggatctagacatctgaatttgatctcaatggtaacattgccttcaattaacagtagcttttgagtaggaaaggactttgatttgtggcacaaaacattattaatatagctattgacagtttcaaagcaggtaaattgtaaatgtttctttaagaaaaagcatgtgaaaggaaaaaggtaaatacagcattgaggcttcatttggccttagtccctgggagttactggcgttggacaggcttcagtcattggactagatgaaaggtgtccatggttagaatttgatctttgcaaactgtatataattgttatttttgtccttaaaaatattgtacatacttggttgttaacatggtcatatttgaaatgtataagtccataaaatagaaaagaacaagtgaattgttgctatttaaaaaaattttacaattcttactaaggagtttttattgtgtaatcactaagtctttgtagataaagcagatggggagttacggagttgttcctttactggctgaaagatatattcgaattgtaaagatgctttttctcatgcattgaaattatacattatttgtagggaattgcatgcttttttttttttttctcccgagacagggtcttgctctggcgcccaggctggagtacagtggcatgatcttggctcacttcagccttgacttgggctcaagtgatcctcctacctgagccttctgagtaactgggactacaggtgtgcactcctcgcctggctaattttttattttttgtacaggcaggatcttgccaccttgcccaggctggtcttgaactcctgagctcatgccatctgcctgccttagtctcccaaaatgctgggattacaggagtgagccaccatgcccggctggcagttgcatggaagagaacacctctttatggcttaccctctagaatttctaatttatgtgttctgttgaaatttttgtttttttacctttattgaaacaacaaaaagtcagtattgaaacatatcttcctgttttctgttgtcaaatgatgataatgtgccatgatgttttatatatatcattcagaaaaagttttattttttaataacattctattaacattattttgcttgccgctggcatgcctgaggaatgtatttggctttgattacacactaagtttttgtaataaatttgactcattaaaaaccttttttttttaaaaaaaaaaaaaagaaaatctcattagtgaacttatctttgcagctgagtacttaaattctttttaaaaagataccctttggattgatcacattgtttgacccagtatgtcttgtagacacgttagttataatcaccttgtatctctaaatatggtgtgatatgaaccagtccattcacattggaaaaactgatggttttaaataaactaattcactaataaaaaaaaaaaaaaa

SEQ ID NO: 22485 - DNA, 914 bp, Homo Sapiens
ggcggcgagcggaatgcagcggcccgaggcctggccacgtccgcacccgggggagggggccgcggcggcccaggccgggggcccggcgccgcctgctcgagccggggagccctcggggctgcggttgcaggaaccttccctctacaccatcaaggctgttttcatcctagataatgacgggcgccggctgctggccaagtattatgatgacacattcccctccatgaaggagcagatggttttcgagaaaaatgtcttcaacaagaccagccggactgagagtgagattgcattttttgggggtatgaccatcgtctacaagaacagcattgacctcttcctatacgtggtgggctcatcctacgagaatgagctgatgctcatgtctgttctcacctgcctgtttgagtctctgaaccacatgttaaggaagaacgtggagaagcgctggttgctggagaacatggacggagccttcttggtgctggacgagattgtggatggcggtgtgattctggagagtgacccccagcaagtgatccagaaggtgaattttagggcagatgatggcggcttgactgaacagagtgtggcccaggttcttcagtctgccaaggaacaaattaaatggtcgttattgaaatgaaggctgtggattcaaggctccctgccccccagaccatttccccaatcctggcaaaagcccaaagatcccagggtcaggagagacccctctgtatccccaggtccctcccagaactgactcctaaggtctccagccagggcttctgagatgcaaaggtttggcctcaggagagtcaccttttctcacggccctggccttaactcatatcttaggcattcctggccccagggccctaataaacctgcttttgtcttctgcaaaaaaaaaa

SEQ ID NO: 22486 - DNA, 1921 bp, Homo Sapiens
gcagtcagttggtctgggcactgcagcaggctcggctctgtcccagcacttgtctgggagaaaagtggtgttactcacccagggagagtctctctttctaccttccttctttctcgatctccttgtgtgcttttgtgtttctttatttcttttccttttttttcttttttttttttttgttacttaattatattcctaatcctggatgaagttgctggattctgcagcacaagtcttcatgaacaagcagcaccgctcagagatttcacggcattcaaaggtcacagaactgccactatggttaaatgtcttgtttaatggttgagaggtgtggcgaaatcttgtttgagaaccccgatcagaatgccaaatgtgtttgcatgctgggagatatacgactaaggggtcagacgggggttcgtgctgaacgccgtggctcctacccattcattgacttccgcctacttaacagtacaacatactcaggggagattggcaccaagaaaaaggtgaaaagactattaagctttcaaagatacttccatgcatcaaggctgcttcgtggaattataccacaagcccctctgcacctgctggatgaagactaccttggacaagcaaggcatatgctctccaaagtgggaatgtgggattttgacattttcttgtttgatcgcttgacaaatggaaacagcctggtaacactgttgtgccacctcttcaatacccatggactcattcaccatttcaagttagatatggtgaccttacaccgatttttagtcatggttcaagaagattaccacagccaaaacccgtatcacaatgctgttcacgcagccgacgtcacccaggccatgcactgctacctgaaagagccaaagcttgccagcttcctcacgcctctggacatcatgcttggactgctggctgcagcagcacacgatgtggaccacccaggggtgaaccagccatttttgataaaaactaaccaccatcttgcaaacctatatcagaatatgtctgtgctggagaatcatcactggcgatctacaattggcatgcttcgagaatcaaggcttcttgctcatttgccaaaggaaatgacacaggatattgaacagcagctgggctccttgatcttggcaacagacatcaacaggcagaatgaatttttgaccagattgaaagctcacctccacaataaagacttaagactggaggatgcacaggacaggcactttatgcttcagatcgccttgaagtgtgctgacatttgcaatccttgtagaatctgggagatgagcaagcagtggagtgaaagggtctgtgaagaattctacaggcaaggtgaacttgaacagaaatttgaactggaaatcagtcctctttgtaatcaacagaaagattccatccctagtatacaaattggtttcatgagctacatcgtggagccgctcttccgggaatgggcccatttcacgggtaacagcaccctgtcggagaacatgctgggccacctcgcacacaacaaggcccagtggaagagcctgttgcccaggcagcacagaagcaggggcagcagtggcagcgggcctgaccacgaccacgcaggccaagggactgagagcgaggagcaggaaggcgacagcccctaggggccggcccaacttagacgcggctctcctccggcagggcccccagagggcagaagcagcgtggaggggccctcacgcagcagcccagccactttctgagtgttgtcctggggctctttggaacgccatcttcctcccacttacctgcctcccctccttttcgcaaatgtacagaagccatttgtcacctcagcattcgctgccgaaatgagcaactccattcagtaacgtgggagctgatcccacgggcaggctctccctgc

SEQ ID NO: 22487 - DNA, 3058 bp, Homo Sapiens
cgcgcgcggcagccccgaggcagcagagcgcggagccgggagcgcggggagcgcgggccggcggcggcgagggaggacgggggcgcagacggccggcgcgcggcgcggctaccatgggcgtgcggtgagcagccgctcgggacgacttcctcggctgcgcggcgctcgcgcggagctccccggccggcggtgcgtccccacggtcaccatgaaagacgacttcgcagaggaggaggaggtgcaatccttcggttacaagcggtttggtattcaggaaggaacacaatgtaccaaatgtaaaaataactgggcactgaagttttctatcatattattatacattttgtgtgccttgctaacaatcacagtagccattttgggatataaagttgtagagaaaatggacaatgtcacaggtggcatggaaacatctcgccaaacctatgatgacaagctcacagcagtggaaagtgacctgaaaaaattaggtgaccaaactgggaagaaagctatcagcaccaactcagaactctccaccttcagatcagacattctagatctccgtcagcaacttcgtgagattacagaaaaaaccagcaagaacaaggatacgctggagaagttacaggcgagcggggatgctctggtggacaggcagagtcaattgaaagaaactttggagaataactctttcctcatcaccactgtaaacaaaaccctccaggcgtataatggctatgtcacgaatctgcagcaagataccagcgtgctccagggcaatctgcagaaccaaatgtattctcataatgtggtcatcatgaacctcaacaacctgaacctgacccaggtgcagcagaggaacctcatcacgaatctgcagcggtctgtggatgacacaagccaggctatccagcgaatcaagaacgactttcaaaatctgcagcaggtttttcttcaagccaagaaggacacggattggctgaaggagaaagtgcagagcttgcagacactggctgccaacaactctgcgttggccaaagccaacaacgacaccctggaggatatgaacagccagctcaactcattcacaggtcagatggagaacatcaccactatctctcaagccaacgagcagaacctgaaagacctgcaggacttacacaaagatgcagagaatagaacagccatcaagttcaaccaactggaggaacgcttccagctctttgagacggatattgtgaacatcattagcaatatcagttacacagcccaccacctgcggacgctgaccagcaatctaaatgaagtcaggaccacttgcacagatacccttaccaaacacacagatgatctgacctccttgaataataccctggccaacatccgtttggattctgtttctctcaggatgcaacaagatttgatgaggtcgaggttagacactgaagtagccaacttatcagtgattatggaagaaatgaagctagtagactccaagcatggtcagctcatcaagaattttacaatactacaaggtccaccgggccccaggggtccaagaggtgacagaggatcccagggaccccctggcccaactggcaacaagggacagaaaggagagaagggggagcctggaccacctggccctgcgggtgagagaggcccaattggaccagctggtccccccggagagcgtggcggcaaaggatctaaaggctcccagggccccaaaggctcccgtggttcccctgggaagcccggccctcagggccccagtggggacccaggccccccgggcccaccaggcaaagagggactccccggccctcagggccctcctggcttccagggacttcagggcaccgttggggagcctggggtgcctggacctcggggactgccaggcttgcctggggtaccaggcatgccaggccccaagggcccccccggccctcctggcccatcaggagcggtggtgcccctggccctgcagaatgagccaaccccggcaccggaggacaatagctgcccgcctcactggaagaacttcacagacaaatgctactatttttcagttgagaaagaaatttttgaggatgcaaagcttttctgtgaagacaagtcttcacatcttgttttcataaacactagagaggaacagcaatggataaaaaaacagatggtagggagagagagccactggatcggcctcacagactcagagcgtgaaaatgaatggaagtggctggatgggacatctccagactacaaaaattggaaagctggacagccggataactggggtcatggccatgggccaggagaagactgtgctgggttgatttatgctgggcagtggaacgatttccaatgtgaagacgtcaataacttcatttgcgaaaaagacagggagacagtactgtcatctgcattataacggactgtgatgggatcacatgagcaaattttcagctctcaaaggcaaaggacactcctttctaattgcatcaccttctcatcagattgaaaaaaaaaaagcactgaaaaccaattactgaaaaaaaattgacagctagtgttttttaccatccgtcattacccaaagacttgggaactaaaatgttccccagggtgatatgctgattttcattgtgcacatggactgaatcacatagattctcctccgtcagtaaccgtgcgattatacaaattatgtcttccaaagtatggaacactccaatcagaaaaaggttatcattggtcgttgagttatgggaagaacttaagcatatactgtgtaaacagtgccatacatttctaaaatcccaagtgtaggaaaaatatgcagacatacagatatataggccaactattagtaataatatgaaatatacttaaagagcttttaaaactttgtatttttgtacaaaatatttgtcttttacaatttttttcctttttttttttttgtcattttaccgacataatacatggagccaaagaaaacaataatggtactaataaaaactcctagggtttcctgtcagatttaaaaaaa

SEQ ID NO: 22488 - DNA, 3375 bp, Homo Sapiens
gccgctccgggtacctgagggacgcgcggccgcccgcggcaggcggtgcagcccccccccaccccttggagccaggcgccggggtctgaggatagcatttctcaagacctgacttatggagcacttgtaacctgagatatttcagttgaaggaagaaatagctcttctcctaagatggaatctgtggtttgggaatgtggttgatcaacttgatatgttggccaaatgtgccccatgtaataaaatgaaaagaagagacaagatgatgtcattttcccatattgtgaaaccaaaaacaaacgccttttgtgagaccaagctaacaaacctctgacggtgcgaagagtatttaactgtttgaagaatttaacagtaagatacagaagaagtaccttcgagctgagacctgcaggtgtataaatatctaaaatacatattgaataggcctgatcatctgaatctccttcagacccaggaaggatggctatgacttggattgtcttctctctttggcccttgactgtgttcatggggcatataggtgggcacagtttgttttcttgtgaacctattaccttgaggatgtgccaagatttgccttataatactaccttcatgcctaatcttctgaatcattatgaccaacagacagcagctttggcaatggagccattccaccctatggtgaatctggattgttctcgggatttccggccttttctttgtgcactctacgctcctatttgtatggaatatggacgtgtcacacttccctgtcgtaggctgtgtcagcgggcttacagtgagtgttcgaagctcatggagatgtttggtgttccttggcctgaagatatggaatgcagtaggttcccagattgtgatgagccatatcctcgacttgtggatctgaatttagctggagaaccaactgaaggagccccagtggcagtgcagagagactatggtttttggtgtccccgagagttaaaaattgatcctgatctgggttattcttttctgcatgtgcgtgattgttcacctccttgtccaaatatgtacttcagaagagaagaactgtcatttgctcgctatttcataggattgatttcaatcatttgcctctcggccacattgtttacttttttaacttttttgattgatgtcacaagattccgttatcctgaaaggcctattatattttatgcagtctgctacatgatggtatccttaattttcttcattggatttttgcttgaagatcgagtagcctgcaatgcatccatccctgcacaatataaggcttccacagtgacacaaggatctcataataaagcctgtaccatgctttttatgatactctatttttttactatggctggcagtgtatggtgggtaattcttaccatcacatggtttttagcagctgtgccaaagtggggtagtgaagctattgagaagaaagcattgctgtttcacgccagtgcatggggcatccccggaactctaaccatcatccttttagcgatgaataaaattgaaggtgacaatattagtggcgtgtgttttgttggcctctacgatgttgatgcattgagatattttgttcttgctcccctctgcctgtatgtggtagttggggtttctctcctcttagctggcattatatccctaaacagagttcgaattgagattccattagaaaaggagaaccaagataaattagtgaagtttatgatccggatcggtgttttcagcattctttatctcgtaccactcttggttgtaattggatgctacttttatgagcaagcttaccggggcatctgggaaacaacgtggatacaagaacgctgcagagaatatcacattccatgtccatatcaggttactcaaatgagtcgtccagacttgattctctttctgatgaaatacctgatggctctcatagttggcattccctctgtattttgggttggaagcaaaaagacatgctttgaatgggccagtttttttcatggtcgtaggaaaaaagagatagtgaatgagagccgacaggtactccaggaacctgattttgctcagtctctcctgagggatccaaatactcctatcataagaaagtcaaggggaacttccactcaaggaacatccacccatgcttcttcaactcagctggctatggtggatgatcaaagaagcaaagcaggaagcatccacagcaaagtgagcagctaccacggcagcctccacagatcacgtgatggcaggtacacgccctgcagttacagaggaatggaggagagactacctcatggcagcatgtcacgactaacagatcactccaggcatagtagttctcatcggctcaatgaacagtcacgacatagcagcatcagagatctcagtaataatcccatgactcatatcacacatggcaccagcatgaatcgggttattgaagaagatggaaccagtgcttaatttgtcttgtctaaggtggaaatcttgtgctgtttaaaaagcagattttattctttgccttttgcatgactgatagctgtactcacagttaacatgctttcagtcaagtacagattgtgtccactggaaaggtaaatgattgcttttttatattgcatcaaacttggaacatcaaggcatccaaaacactaagaattctatcatcacaaaaataattcgtctttctaggttatgaagagataattatttgtctggtaagcatttttataaacccactcattttatatttagaaaaatcctaaatgtgtggtgactgctttgtagtgaactttcatatactataaactagttgtgagataacattctggtagctcagttaataaaacaatttcagaattaaagaaattttctatgcaaggtttacttctcagatgaacagtaggactttgtagttttatttccactaagtgaaaaaagaactgtgtttttaaactgtaggagaatttaataaatcagcaagggtattttagctaatagaataaaagtgcaacagaagaatttgattagtctatgaaaggttctcttaaaattctatcgaaataatcttcatgcagagatattcagggtttggattagcagtggaataaagagatgggcattgtttcccctataattgtgctgtttttataacttttgtaaatattactttttctggctgtgtttttataacttatccatatgcatgatggaaaaattttaatttgtagccatcttttcccatgtaatagtattgattcatagagaacttaatgttcaaaatttgctttgtggaggcatgtaataagataaacatcatacattataaggtaaccacaattacaaaatggcaaaaca

SEQ ID NO: 22489 - DNA, 45000 bp, Homo Sapiens
ttacaggtacgcaacaccacgaccagctaatttttgtatttttagtagaagtggggtttcacaatgttggtcaggctgatttcgaactcctgaccttgtgatccacccacctcggcctcccaaagtgctgggattacaggtgtgatccatcacccaggctggagtgcagtggcgcaatctcagctcattgcaacctctacctcccaggttcaatccaccacacctggccagttcctgaaaagtttaaatgttaccatatgactcaacaattccattcccagtggaatgttcacaacaccattattcattatagccaaaaggtgggaaatcccaaactgcctatcaaccaatgagcagataaacaaaatgtgatatatgtgatatatgcattcagtggaatattattcggccatgaaaagcagtgaagtactgatacatgctacaatatccatgaaccttggaaacctaatattcagtgacagaagccagattatatgaaatgtccagactagcaaaatccataaaacaaagtagattaatggttaccaggggtttatggggagggtgaaagggggagtgactgctactgggtttaagatttattttgtgggtgatgaaaatgttctaaaattgtggtgatggatgcacaattctgtatatatactaaaacccactgaaatgtacacattaccacatatcaggtggattacaacagtaagaatttattctcacagttctggaggccagaagtctgaagtcagggtgttggctgggccacgctccttctgaaaggtctaggggagaattcttcctcatctttctcttggcttctggtgttgccagcaatccttgaattatggccacataacttcaatctctgtttctgtcttcatctggcattctcctctgtcttctcccttctcttctcagtacacataacattcgatttagggtccacccaaatccaggatgctctcattttgcaatccttaacttaatcacattagaaaagaccctttccccaaaaaaggtcacatccccagtttccaggggtggacatacattttagggggccacctttcaacccactacaaccaccatgaaattaatgggtctttgtccatttttgtttttacacaattttttttttaactgaaggaccataagacaatgcttatgtcgtcttgccagtttgtaaaaaaaaaaaaaaaaagggtaacttcttgcccatttttctttttttttttttttttgagacagagtctcactctgttactcgggttggagtgcagtggcgcaatctcggctcactgcaatctccacctcctcggttcaagtgattctcgtacctcagcctcctgagtatctgggactacaggcacgcaccaccactcccagctgatttttctatttttttttttttttttttgagacggagtcttgctccgtcacccaggctggagtgcagtggcatgatctcggcttattgcaacctccacctcccacgttcaagcggttgtcctgcctcagcctcccaagtagctgggactacaggcgtccgccaccatgcccggctaatttttgtatttttagtacagacggggtttcactatgttggccaggctggtctcaaactcctgacctcagatgatccacctgccttggcctctcaaagtgctgggattacaggcgttagccactgcgcccagcctgatttttgtatttttagtagagatggggtttccccatgttggccaggctggtctcaaacttctgacctcaattgattctcctaccttggcctcccaaagtgctgggattacaggtgtgagtcaccgtgcctggcctttttgcccatttttctattgtgctaatggaaggattctcaggttcctaataccttttgctcaggacaggactagaaatacaacacaacaatccataagttttttttttcttttttctgagatggagtttcacccttgttgcccaggctggaatgcaatgggtgatcttggctcactgtaacctccacctcctgggttctagtgattctcctgcctcagccttctgagtagctgggattacaggtgcatgccaccaagcccagctaatttttgtatttttagtagagatggggtttcaccgtgttggccaggctggtctcaaactcctgacctcaggtgatctgctcgccttggcctcctaaagtgttgggattacaggtgtgagccactgcacccggccaatccataagtttcttaattgaaaaagaaagcccacactcactctaggctaatgtaatcaatgatttataaaaatggccatagttgggccgggtgcagtggctcacgcctgtaatcccaacactttgggaggccgaggcgggcagatcacctgaggtcaggagtttgagaccagcctgactaacatggatcatggatcacgcctgtaatcccagcactttgggaggccaaggtaggagaatcaattgaggtcaggagtttgagaccagcctggccaacatggtgaaaccccgtctctactaaaaatacaaaattagctgggcacggtggcacatgcctgtaattccagctacttgggaggctgatgcagaatcgcttgaacccgggaggcagaggttttggtgagcggagatcacgccattgcactccagcctgggcaacaagagtgaaactccgcctcaaaaaaaaagaaaaaaagaaagccatagtttttatgagcttgttgatctatatctaggactacaaggaagatatgcatgctacagacatttgtacctagcagtaggtgctactgtaacatgtggcattagctttggactagaagtctggaaaagcagtggggaaactggtagtgaacactggaacaatggtgaggaaaactacgggaggtggacaaatggtgaacaactctatgtcacggtgaaggatttgtaaaattgttgcccttcagtaagatgggcagagaaaaaggcaactactgaactctgggacttgaaaaagatcatatcagtataatgttgagattaacctgtgtttcttttgcttgaatatgttgagacacttatagaaaagagtgtggttaaaaacaaacaaacaaacaaactggccagcagaatttagagcacactttgggttgaagctggggaaagtattattagacccaatagttggtaacaagttctcaaagtaagtcataacctgggccaaagatcaaattcagagtggcgctaataaaatatggccttaagaataatgctgaagtcaaggtgatctcaatgatttaaatgttaacaagtggctgggcgcggtggctcacgcctgtaatcccagcactttgggaggccgaggcaggcggatcacaaggtcaggagatccagaacatcctggctaacatggtgaaaccccgtctccactgaaaaatacaaaaaattagccaggcgtggtggcgggcgcctgtagtcccagctactcaggaggctgaggcaggagaatggcgtgaactcgggaggtggaggttgcacttcagcctgggcgacagagcgagactccgtctaaaaaaaaaaaaaagactagtgggagtggcttcttgggcatggagagcacctgaatcagattcttgagaagcccataaagcttttaagggacttgtagtgaacaaagcaccaccagctgccaaaatgtggacagaacagtttagagtgaaaaaaggtctgtgggctcacaatttgctaatgacaggaaggaggttgagaaagtttctcaaagggcacattcttcaacatggccaagaaggtgctggaaaaggagggacacccaagagggcagaggcaagagctgtgctgagatacagcctggggagatactcccaggaagcagaactcgggcctggttaagacttcttattcttgtagggcctgaaaacatcttccagtaggatttcagaattgctttggaccagtgattactgtgtctcctcctcttctcattttcacatgcaagtatttattgtggttatctggtcccggctcaccatcatatattgcgtgcacgggagagaaaattaatctttttagtttgtaagtctctggatcaagaggagctgcaccggacaagccaatctaaaacagaccgtgagatcctagattttgtgcctgatgctgggattgtaagaggcttttggggatcttgggatgaacactggaaactaaccatagtttgggttgaaaatatcactacagttcggagattttaaggcatctgtggcttgtctaagtgcaaagattcagtaggcttacttctagcgacctcagacttgacgccacccgagacaccctcacccatgaccacatcttggacattttttttttttttgagagagagtctcgctctgtcgccctggctggagtgcagcgggggcgatctcgactcactgcaacctccgcctcccgggttcaggcaattcttctgtctcagcctcccaagtagttggggctacagtcgcacgccaccacgcccaacaaatttttgtacttttagtagaaacggggtttcaccatattggtcaggctgctctcgaactgctgacttcatgtgagccacggcccccggttcattcacttcttgaaggatcatttaccaggcatctagtagccatcatcaggtcctacgtctctccagctaccgcggaaaaagatccagaaccagccctaccccgtctagaggaaaggatgaacattaggcaagtacttggaatcgtgcgaagtgcactccatcagatcaccttggtgagtgaactgccaaacccgaaacaccgaaggccaccagccacaacccggagggcggtcacagcacctttcacgcatgctcaaggcaggctcgtccttgagcatgcgcggtacgtggggtatacgtcatctctcggcgtctgcgcctggcgtcaccgaccggtgcggacaggaagaggctctgggctggcacatgtgtatggcggtgaggcgggcgggtacatggcgggctctgtgggactggcgttgtgcgggcagacgttggtggtgcggggcggcagccgattcctggccacctccatagcaagcaggtgagggggccttggtcttggaacagggagaccaggctgcgggcgcgcgtcgggtcctggcgaccccgcttctcccgcaccgcctggtcgcacccactctggggtgaccccggggaactccgctccagcccacgagtcctccgccgcagtctcggcctggccgcgtctctgcgcctggagggtccgctttcgccgtccgctctcggcgtccgctccccggctccggcgcgctccttgcactagatggctggtctgcggtgttcttgcccggttagcgccgccgggtcgcttccggtctccgcggcgccggcggggaccgggtaggtagagcacgtggggcgacgctgaccagtcagcaaggcccggccgaacacgctctgcagaactgggaagaagcgggtctcgggtctccctggtgagaagggaggggcttactcactgcgagctcactgacctccaagcgcgctccctctttttgcagggttgtctgttccctcttcccggcctgcatccactcacctggccttaattgctccttagggctccaagtcatctccgacacttacccaacccaagggtgcacgtggagctcgcagtgcgcacctccctagtggcccttcgcacggctcgggttttgctttccgtaattttattctccttccttagtgtatcgccagtgctaggacgacgcaggggatttttaacttagtaaatgtttgttgatggaacagtcctaactcaggactctcggagcaattagtagtgctgtcagtttcagcccctcgtttcctttcccaggttatttgtgatttcatatttgaaacggacgacgtgtctgtcagatatactgtatattttttgttcgtttggttttagaaagccaattcgatgttaagttaggtctcacaaaaattgtactcagaaacccgtcacatatcccagatgattttgttttagagactcacggtctaatatctgccagagtgagctgtggatatattagacatgatttgcttaccttcagtctttgcattttgaggaaattctagtggctggtggagtttctgacttggaagacaagtccacggttccatatggaaagttttttggtgcactcgctttaaaggctataaatatgtacaagatacgtgccagggggtgaggatgggataaaccgaagtttaggttcagtatggaaaatgggtgattcttatgttggtaagtgcctggggtcatgggaacactttcaggtaggtgagatatgtttctaaatagtaatggctctttgaaatttgtatacagaatcccactgaacgctcaacagtatcagaacataatttcttttttttctttttttttttttttgaggagtctcgctttgtcgcccaggctggagtgcagtggcgcgatcttggctcactgcaagctccgcctcccgggttcacgccattctcctgcctcagcctcccgagtagttgggactgcaggcgcctgccaccatgcctggctaattttttatatttttagtggagatgggggtttcactgtgttagccaggctggtctcgatctcctgacctcgtgatccgcccatctcggcctcccaaagtgctgggattacaggcgtgaaccaccgcgcccggcccgtaatttcttataaccatgtcgcatagattttgtggtgcctaaaagaatagcatattaattcctgttgagtatttatccctcatttgttttactgaacttttttttcccacagaactatgcagtatgacgtactccaataagagattaagcaaataaagtttgttaactgttccctgaaatattgtatctagacagttttcttgtcaagtatacaacttttaatttaatgagtgtgcaaatattttttgttccacagagaaaaaaaatcaactttttttttttttttttaacaaagtgctcttttaaaaatcattgttaggctgggcgcagtggctctgcctataatctcagcactttgggaggctgaggcgggcagatcatctgaggtcaggagcttgagaccagcctggccaacatggcgaaaccccgtctctaccaaaactacaaaaattagccaggcgtggtggcagatacctgtaattccagctaccgggaaggctgaggcgggagaattgcttgaatccaggagggggaggttgcagtgacctgagatcatgcccttgcactccagcctgagtgatagagcgagactccaactcaaaaaaaaaaaaaaaaaaaaaaattagggccaggcgcagtggctcacatgggccaggcgcagtggctcacacctgtgagcactttgggaggctgaggttggtggatcacctgaggttggggatttgagatcaccctgatcaacatggagaaaccccgtttctacaaaaagtaaaaattagctgggagtgctggtgcatgcctgtaatctcagctactggggaggctgaggcaggagaatcgtttgaacctgggaggcggaggttgcggtgagccaagatcgtgccattgtactggagcctggacaacgagagcgaaactccgtctcaaaaaaaaaaaatttgttatttctctctaatgataactccttttaaaattattgttatttctctttagtgatgatgacagcctcttcatctatgactgcagtgctgcagaaaagaagtcacaagaaaataaagggtgagatgtggggaagctttttcagggcctgctttaatggttcgataatgggaccagagggtctaagaagcaattgttgtcctacttgctgaattcttagcttctgtcacacagtggtgcagataagtagcacctcaggagagacatgtaaaagtaacttttaggttaggcattaagagtacattgttggctgagcacggtggcttatgcctgtaatcccagcactttgggaggccaaggtgggtggatcacctgaggtcagaatttccagaccatcctggccaacatggcgaaaccctgtctctactaaaaataaaaaagttagctgggcgtggtggcaggcacctgtaatcccgtctacttgggaggctgaggcacaagaatcacttgaacctgggaggcggaggttgcagagagctgagattgcggcattgcactccagcctggggaatagagcaagactctgtctcccaaaaaaaaaaagagtacagtgttagtgccgggtgcggtggctcatgcctataatctcagcactttgggaagccagggtgctgactgaggtcagaagttcaaagccagccttgccaatgtgatgaaactccatctctactaaaaatagccaggcatgctggtgggcgcctgtagtcccagctacttgggaggctgaggtgggagaatcacttgaacctaggaggcggaggttgcagtcggccgaggttgcgccaccgcactctccaacctgggtgacacagcaagactccgtctcaaaaaaaaaaaaaaaaaaagcacagtgttaggacttttctaaatacttttagtttctgtcagtaatcacatcttactggctccttgaagtaatggttgaaggcgggtgtaggaagttaacttcagctaattgagatataaaagtagagcatgtgagtgtttcgtatggtggctttctttagttatcattggtattgtggctcagtttgttttatcgttattattattttttgagacagggtctctctgttaccccggttggagtgcagttgcacaaacataactccctgcagcctcgacctcctgggttcaggtgatctcccgcctcatccccctaagtacctgggactacaggcacatgccaacatacctaatttttttttgagatggagtcttgccctgttgccaggctggagtgcagtggcgctatcttggctcactgcaacctccacctccctggtttaagtggttctcctgactcagcctcctgagtagctgggactacaggcacgcaccaccatgcccggctaattttttttttgtatttttagtagagacgaggttttaccatgttggccaggatggtctcgatctcctgacctcgtgatccacctgccttggcctcccaaagtgctgggattacaggtgtgaggcaccgcgccagggctgcctaatttttgtagttttttgtagagacgtggtttcgccatgttacccaggctggtcttgaactcctgagctcaagcgatcctctcgccttgtcctcccaaagtattgggggaaattcagccagatattgggcaaaattcacccccgatatttcacgtaggttcttttcaattttccctaagcgtcggccggtttgagaaataaagggacagagtacaaaagagagaaattttaaagctgggcgtccgggggagacatcacatgtcggtaggttccgtgatgcctcctgagccgtaaaaccagcaagtttttattagggattttcagaaggggagggagtgtacgaataggtgtgggtcacagagatcacatgcttcacaaggtaatagaatatcacgaggcaaatggaggcagggcgagatcgcaggaccacaggaccggggcaaaattaaaattgctaataagtttcgggcaccactgtcattgataacatcttatcaggagacagggtttgagagtaaccggtctgaccaaaatttattaggcgggaatctcctcatcctagtaagcctgggagcgctatgggagactggggcttatttcatccctacagtctcgaccagaagatggccacacccaagggggccatttcagaggcccaccctcaggggcgcattctctttctcagggatgttccttgctgagaaaaagaattcagctatatatctcccatttgcttttgaaggaagagaaatatggctctgttccgcctggctcaccagcggtcagagtttaaggttatctctcttgttccctgaacattgctgttatcctgttctttttcaaggtgcccagatttcatattgttcaaacacacatgctctacaatttgtgcagtcaacgcaattatcacagggtcccgaggtgacatacatcctcctcggctgacaggattaagagattaaagtaaagacaggcataggaaatcacaagggtattgactggggaagtgataagtgtctatgaaatcttcacaatttatgtttagggattgcagtaaagacaggcataagaaattataaaagtattaatttggggaactaataaatgtccatgaaatcttcacaatccacattcttctgccatggcttcagctggtccctccgtttggggtccctgacttctcgcaacaccaaagtgctgagattataggtctgagctaccatacctggcctgttattagtattgttaatgtgagtttatccctgcctctagccttgggttagtccttgcccatgaggaagagggccatgtgtcattgagggttcttccagcttagctctctgggttctggcatgtatgctgggagattttctgtttagttaggcttcatgctgataaaattagagctgttttgaacttccccatgtccctttaatatgtctgtattttggctacgtgatccccttaacagtttctacctcctcccatgttagaaattaccacgctggccaacaaggaatgcagccttatttccttaggtgaagcttaaccgtcttcctcctctcttcctcagggaggacgcgcccttggaccaggggagcggtgcgattctggcgtccaccttctccaagtctggcagctattttgctttaaccgatgacagtaagcgtctgattcttttccgtacaaaaccatggcaatgtctgagtgtcaggtatgagatgctaacgctggattcttaagatgtcgaatgcacaccttatccttgcatgcctgtagcaatagtgaccataacatggtgataagggtgataagtggttgacacggagccgcagttcagtgccagacaccactttcagtgccacatgtgtgttggctgatctgatcctcacggcagttctgggagggtgcaggggtgctgttctgtcccacgctgggtggtgaacagttagatagcagactccgatcagtgggctcggaagacagagccgggccctgctgctggtccctccacctacagtgttggtgcccctgttttccagggcagtcctctgtccttgtgattagcaggaacaaggctgtgagcctgccctggagagtgatagggatttggggtctgttgaggggtctgtaccatagtattaagctaggtgggtttagtgcacatatgtctgagtatctgaagagtggatggggagtggatccgtggggatggggaggccagtaactctggcaagaacgggagatatcgctatgccttgccctcttacttagcaaagtccggaaaggttcttctgccttccctattcctccttttttatttttttgagacggagttttgcttttgttgcccaggctggagtgcaatggcgcgatctttgctcatcgcaacctcgacctcccggcttcaagtgattctcctgcctcagcttctccagtagctgggattacaggcacttgccaccatgcccggctaattttttgtatttttagtagagatgggatttcaccatgttagccaggccagctcttgaactcctgacctcaggtgatccgctggcctcggcctcccaaactgctgggattacaagtgtgagccactacacccggcctgtctttaagatttttatttcatcttttttttttttttttttggagaagggtctcattctgtcacccaggctggagtgcggtggtgtgatcttggctcactacagcctccgcctcccagtttcaagcaattctcccatctcagcctctcgagtagctgggactataggtgcacaccaccatgcctgactaatttttgtattttttgctggagacagagtttcaccacattggccaggctggtctccaactcctgatctcaggtgatccacccgcctcagcctcccaaagtgctgggattacaggcatgacccaccgctcccagcctcatcttattttcaaagagaagagtaaaaacccaaattcagctgggtgcagtggctcccacctgtaatcctagcactttgggaggccgaggcaggcggatcggatcacctgagattaggagttcgagactagcctggcccacatggcaaaaccccgtctctactaaaaatacaaaattagctgggcatggtggtgcgtgcctgtagttccagctactcgggaggctgaggcaggagaatctcccgaacctgggaggcggaggttgcagtgagccgagatcatgccgttgcactccagcctgggtgagaagagcaaaaccccgtctcaaaaaaaaaaagccaaattctaggtggcatcaaaagcaatgaatgcctgctctgtcctctcttccagtcaggttaaaaagaaagccctgaaacgctgcatcatttctactctatgtgtttttgtgtatacgggttttactatatatgtttttatgtatatgtgatttacaatatgtttttgtgtctttgtgtatcaggtaggtaatagatgcacatggtttaaaaacttaaaacacaacaaaattaaaccaaagagtatgcgtcagtctcccttcttacccaccttctggctcctttcccataggcagtgatggtttcccagtaggaaaatgacttttaaatgcatgtccctacatgtctgagttataactgataataaatggctgcttccacctgactgctgtggatcgcgtcatctttatcttgaaaggcctgtgaacggcatcctcttgctaagatagccacatgagtaagtcatttaggacctagaatagagaagatgggaagtgttttcaggattcagggtgaatgcctcaaggtggccttgaggtgtcctgctctgagcccctccacagggatctctgcaggtggcaggggctttctagtaggttggccttgactttgggtttcttggacaacctgtgggaaggagggatggacaggttttcacctctcagtgttgaaagaagatagtagttgtcctagtctgcttgggctgcccaacaagataccacagactaggggccttaaataacaattttctcacagttgtaggggctggaaaaccaagatcaaggggctggcaggacagggctggttcctctgaggcctctctccttggcttgctgatggcgtcttctccctatgtcctcacagagtcgtccttttgtgtctatgtcctcatttcctgttcctgaaaggacactggtcagatggggtcagggctatcccaatgacctctgtttcacctctgtaaaggtcctatccaaatacagttacattctgaggtcctaggtaggtcagggcttcaacataggagttgtggtttggaggattcagttaagcacataacagttcattttgcctttcggacactggctgctgtagagagctttcataattcacatgagattctcaaagggggcttggactcccaaaagttaaaaatgaaatgatctaagggaatctgatggtaatttttttttttaatttgagacggagtttcactcttgtttcccaggctggagtgcaatggcgtgatctcagctcactgcaacctctgcctcccaggttcaagcaattctcctgcctcaacctcccaagtagctgggattacaagcatgtgccaccacgtctggctaattttttgtatttttagtagagaaggggtttcaccatgttggccaggctggtttcgaactctgacctcaaggtgatgtacctgtctcagtcccccaaagtgctaggattacaggagtgagccactgcgcctggcctggtaattcttttcctaaagtaaaggccctggctgagctttggcataggcatagtgcacaagagccgcttgggtgtcttgtgaaagcacagactttgtgattcatttcatctgggctaggccatatgctctgtgatttctttctttctttgttttgagacagagtctcgctctgtcacccaggctggagtgcagtggcccaatcccggctcactgcaacctccacctcccgggttcaagcgattcttctgcctccgcctcccgagcagctgagattacaggcacttaccaccatgcccagttaatttttgtctttttagtagagatggggttttgccattttggccaggccggtcttgaactcatgacctcaggtgatccgctgaccttggcctcccaaaatgttgggattacaggcgtgagccactgagcccagctacagcagttttcttgactatccctctactggtggtcagcatttttttttttttttgagatggagtttcgctgttgttgcccaggctggagggcaatggcacgatctaggctcactgcaacctccgcctcctgggttcaagtgattctcctgcctcagcctcccgagtagctgggattacaggcatgcaccaccacgaccggctaattttttctatttttttagtagagatggggtttcacaatgttggccaggctggtcttgaactcctgacctcaggtgatccacccacatcggcttcccagggtgccgggattacaggtgtgagccactggcgcctggccagaagagcaactctttatatacttaagaatcatttgtgttttgtaaactttttttttttccatatcctatgtttttccattggggtgttgtttatttgtaggagctctttatatttggacactttagttttacaaaataagcccatctcccaaagtgtggctctcaacatggcctttctcacacggcctttctgtggcacaggtgtgtaaggtgagctgcaccggtaaccactgagactggattagcattttccaatacccttgccttagctgacaaaacttcaaagccctggggtcaagaacaagtgcagagctgagatccacgtgccgatgtgtacacggatctcagacgtgatccagttacttagacaacagtggagtgtgtgggttcccgttcagctatggtgagtggggttgtagaagttgggagtgaattctcacttgtctgcttcccctggagtacagttcggtgtcctctcatgctaccttttgccttttttatcctttggttttggtccgtacagaaaattggaaaccactgagaagtacaaaatgagagcaagaacaaaaaccaccctgaatttcaccacccagagccagagtatgggatgagcactggggccaggccctcctcctcctctctgcagatggattacaggatttgcatgtgttacactgtagtggtggcatgtgctagcctatagcctgttcccccccgccagggcagtgttgacaacactgtgtcattccctgtagctgagttgttacattgtttgcactgttccactgctcaaatgctagtgtttccttgtacctcttcctgcctttaaacttcgggaagtttgagccagagcaactgggacagcagaggtgtggacagtgtgggtttactggcaccaatgtgtgacaacagacacggcgaagcttcccaagccttggtgtccagcggtttccttggggttgatcacatgctgtgggggtggctgacttttagttcccagcccctccagaggtggagtggacaccttgtggccccaggcccctgccctaaatcacgtacttaggctgcctgtggggcccaaggcccctactcttggagatgaggccaaaggcaaggttaattcttcactatgcagagggtgtaccctgtgccaaggcttttgatgtctggtaccagacaccatttgaggagtagccactgcctgcagagggtaggggaggctgggtctggccgtgtgtgccgtaggcctggctggtggtgggggtgagcgggcagggagctcactcgtgtcttgaagacgctgactctttcaagtctggacagtgctgcggctgtgaagttctgaggttgccagaaagatggagacgtgggtggaatgtcaccttacttcaatgtgagcttgctgtccagaggtagtgtctcactttgaacttgggagagaggggatgtccagtctgcctgcccgctgtgtcctggttcctaacagtggagcttcttcaccctgatggaagcgcggaggcccagggctcctccaggggttctgactcctccagagggacggggcctctgctcctggcatcgtgcatggcccagaggagggaggaatctagaattctctccactcaatgtggttgcctgtggcagttggcttcttggaggaggtcatttgaggttgagagctccatgagttgggactcgtggtggatgcagataccgctgcaggctgggcgggtggggggcctcttcatccttggttgtaggtgctttgccaagagggagatgtcttgctgtgttgactcgtcttttgaaggttgtgtgctggtgtgattctctttatggaagcacctggtaaaactctgggaggctggcatggtggctcatgcctgtaatcccagcattttgaggggccaaggtgagaggatcccttgaggccagcagttcgaggccagtctggcctcaacatagtgagatctcgtatctacaaagaaaaaaaaaagcacaagtccaagagtgggcagtgcatctagtttaagtacccctaatctgaaattcacaatcctccaaaatccgaaattttgtgagcatagggaagatgctcaaaggaaatgctcactggaatgtttcggattttggatttttaggttagggatgctgagccagtaagtatttgcaaatattccaaaacctgaacaaatctgaagtgcaaagcacttttcgtcccgagcatttgggatgagggatgggcagcctgcagcatgtgagcaaagagcagtgtttggctcttggcagtgcccctttacctgtgcgttcacttttttttttttttttttttggtggagcggagtgtctctttgtcacccaggctggagtgcagtggcacggtcttggctcactgcaacctccacctcctgggttcaagcgattctcctgcctcagcctcctgagtagctgggattataggaatgagccaccacgcctgactaatttttatatttttagtagagatggggttttgccatgttggccaggctggtcttgaactcctgacctcaggtgatctgcccaccttggcttcccaaagctctaggattagaggcgtgagccactgcgcccggcctgctcttggttttgaaagtgatgtcagcagtataacttcgtgtaggaaatgtttgccttaggtggtgtggaagatggaccatgtgatttgatgcagtccaggcagcagattacaaaatcccgcctcgatggtgtggcttggggtttctcctgaccttggtgtagggcacgccttgctgcctcccctttctctagttgaactgcaggacagtgggtacagttgtgaagttactgccactttcaacatctcttggcaaattcctcaataatctttttaaaattcctttagaattgtgggtttgtgaacttttcagcatcgggtggagtgaaattgttaccctttctctcagtgagaaattggaggggattattgtggcaggaggagtaggtttgggggatgcgagtggggcagggagaggggcatagggtgagttttatcaggagctgctttcaaggagaggactagggtgagtggaaccatgctgagctggcaggcagcaccctgtggctggtccgcaaacatgggggctgctccccacacctggaggctttttatgcctcttagatctcagactcttagatctgatgcacccgctccccagaaaaccgcccacgcttagcacatccacctccattcagttttagaggttccatgtactcctagcctctctgcatttcactgaggccctgcaccgctgcaggatgcccctgagctgggcgagaccctaggctctgtcccatggttgctttgttactgtgctgctgctgggaagcttcctgttgaagggttttgaggcgtagccaagatggaagttgtgggcagcaacgattctttcccaggtagcagtttagaaccgcaagggacggagggcctgccacctgggcagtcaggagactcttggcccgagggactgaggccaggttttccaagccgaagatgaggacacagggtgacgagtgatacattgattttgacatgtgtgtttatgagggagaaatcctcccagtggagtctgtgtttccgaaaacaactgtgagagccacggcagcacgtgggaaaggcagagccagagaaccatctgattcgctctgcccagggggtggagagagagcacctggctgctggagtgtgggtgtggatggtgcctggtgtcctcagtgccctgttggggctgcccaggcggctctctggaggggggcttggggcagtgccaactcagtctgggagttcagggctcagccactcgactcctggcagagaacggagggtgtggagatgggtggttacttgctaggttctgctggtctctgggccctgaacccagtgactgtggagggagtgctgagacccgagacccgagaccctgcacaggctgggggttggagggcgggcggggttgtgcctcagctagggtgacaggccggcttgccattggtccagtgacctgccccattctgtgacctcccttggatcctagcacccaagcctgcgagtaaggctcagctgcgtcctagaatcggtgccaggataagcccagctggagaggctgggagcctccggctggggcaggacaaagggacgcggagcagtgccctctgctgagctgggcaggaggcacggtgtcgggggccatctgtgccacacgccttccagccaggctggggggatgagcgccctgtgagtccaagtccatcccccctccctgtggcatcctcttgggctgctcctctgtgccaccatggtcgtgtttgtggcagctgcttaatgagcccatcggacattgggggctgtgtcgctggtgcagtgcagggctgtttgtttaaattgcagtgcaccctgagaattctgattaatcttgccccagagcgtaattatctttctttgtccttgttttctctgtgtttaccccgttatacttcccttctgcctcccttctgcagctctgctgcacagctgtgagggaggaggagggatgctgcttccagcctggggtgtggcccaaaggtcctgcctgcccttttctgtcttttagtccctctgcccctgagagaaacataggggcctcattgaggacagcgttcctgaagcttccatctcaatttccagccgcagtgggccgggcgccctgtacttgtctgcctggtgttggctgcgtattgggcagtgtgtgctgccacagccctgggggtggggaagcagggctggctgctgttctgtagtgaggccctgtggctaactgcgtgtgtgggaagctgtgctacaactcatatctatgtaaaatagaacatatgggtccctgccttgtggagaggacataaatacgggacgattccagtagaaatgatgtggaaatgagagccccaggaagtagtgtagccctgagccctggcgaaggagagggagcgaactgtgactttggttcttgctgaagcagtgtgcaaacgtgctgcatccggaactctggtgcatccatgactctgggtcggggttggattcatggatgtgctgatgtggatgtggactggggggagcgcaggcctctcacacgctggataaccgagcttcctcccgaggagggtagggtgctgcctcactgctgccctgggctgggtcctgccctgagggtggccaggcccctccatccctctgcagggcatggggcacggctctctgtctgaggctcctggttcgacgcagcagaacgagcagcaggggtcagtgtgggtcaggggagcggcaaggctggggggccctggagactggtgcctgcctttgtccttgacagtggcccccagcacactcagcgtttatggagagggccgttgtctccctcaatgcatgatgaagactctggggttaaggaaccattcccccatttcttgatgacagttttcaaacacacaggaaagttgaggattttgtcacgcatttatccaccacctagatcccaccatcaggagcaattttctattcttttctttttttttttttttttttttttgagacggagtctcgctctgtcgccccaggctggagtgcggtggcgggatctcggctcactgcaagctccgcctcccgggttcacgccattctcccgcctcagcctcccgagtagctgggactacaggcgcccgccaccacgcctggctaattttttgtatttttagtagagacggggttttcaccgtgttagccagaatggtctcaatctcctgaccttgtgatccacccacctcggcctcccaaagtgctgggattacaggtgtgagccactgcgcccggctaggagcaattttcttaaagaaaaacgttgtgaaagtaaatttgtcgaaggcattggctttgttccagttgttagcattgcttaatttttttggcaccaccttcagcagctggaaaacagagcatatggccaggtaccggtgcctgccaccgcccacgtggcctgccaggctgtcgaggaccctgcgctgctcctggaagctaatgggggtgtctttctggccttctaggaccgtggcaaggaggtgtacagccctgactttcatagcctcggaggagaaggtcttggtggccgacaagtctggagacgtctactccttttcggtgctggagccacacgggtgtggccgtctagagctggggcacctgtctatgctgttagatgtggtaggtgggggacgtggtaggtgggggacatggcaggtgtgggacacggtacatgggggacgtggcacgtggggcatacgctgagtcaatgtctaccctgtcaaggctcaggcacctgtccatgctgttagacgcagtacgtgggggacatggtatgtggggtacaggctgaatcaacgtctgcccggtctgtgccccagcgtttggtggggagaatggggctcccccgtagcagggacagccctctgcagatttgggagcaggggagtggtgggaacaggatttaggaaggtggagcagacagcagggagaatgaagaaggcaagtgagacaggaggtggtcagtaggtggccccaggttggaagtgaaggtgtgggaggagcaggtgcagccacgagcctctggctccgcctccttggccgggagctgtgccaggtgctgtaggagcatcacctcagcactgctcccagcagcccctgtcaccccactctgtgtgccccgtgtgtcacagacacacacctggagccccagagggcgcaggcccacagcccgggtggtggagctgggattggacgcacacagggacagtcaggaacaatggcgagtgtggggtatcaaagggaacctcactgggacttggtgacagatgggtgtggggacatgtgtgacaggaaggcaaggaaggcaacccagtgttgggcaggagggtgcagcaggcctgtggcgggtggaaatgggcgtggggcctggatttgccaaggtgcgggagacaggcaggcaggggtggcactgccccaccccagaagcctgctctagcactgaggagtgagggctagaggtggccagggaccctctggggagggagaatgagggccaccaattagacgtagggacgggaggaggggaggagccacgctggtctgtcctcgaaggcctcatcctcttggcggccaggctgcagcttccctgccttcttccatgagggacttgattcgggaagactcaggtgagcggctttttcttttctggcccctggtgatgcaggctgtgagtcctgatgaccgcttcatcctcactgccgaccgggacgagaagatccgagtcagctgggccgcggcgccccatagcatcgagtccttctgcttggggcacacagagtgagtgccccttcctgcccctccagcagaaagaaggtctgtttgaaaacagcgtcagcttgcggctcagcaggtgccgttgtagctggcgaggccccacgcgggtgacagcagcccccgtgcttggtgtttggtcactgcaggcgccgtggtgctgcctgcagaagccctgaaagggtggggttcactctgcgctgttacccggagtctgtgccagtaacttggcattgggcctgaccgaacaggaagggcttgtttccgggaaacccctgtctcagtgtggagacccctgcaccatgcccgggagttgttcgctggtgggtggtgggggtgttgggggcgaggatgaactttagtgatttcagctgtccaagaattaagcggcctctgcagccaggtggcggcgtctctcgtggcagcacactctgccaggacccatgtggaggtgtttctgaatgcccgctcctgtctcacacaaaaagctcattagaatttacacaaaggaaaaacgcttagtgtaattggctgaaatgttttaaaatatattatttgaggcagtggaagaaattggagggaggaaattcagtgccgaggttgcctgtgttttcctggttttgatccaaacatttcctgtttaagaaggccagtcactggtgtgtgcctcaggatagcttcttctgacttgcatttagttcgctagtgatccagctctggagttctctggcctgcagccccccggcccctccccttcaccatctctcgctggggtctctgcagctcccttgcctcgccaggcacgtgagggaggtttctgctgacgggaacacgcttctcacccttctagggaaatgcttcatcacttagaagtattgagtaaaaacatagtattaaaattaacttcaactgctccctccctccctcccttccttcccccctccccaccccacccttcccctcccttcctttcttttctctttcttagctgtgtcgcccaggctggagtgcagtggcgtgatcttggctcactgcaacctctgccttccaggttcaagcgattctcctgcctcagcctcccaagtagctgggactacaggcccctgccaccacgcccggctaatttttttttgtatttttagtagagacgagggttcactatgttggccaggctggtcttgatctcctgacctcatgattcgcccgcctcggcctcccacagtgctgggattacaggcgtgagccaccgtgcccggcctgcccgtttacttttcaacatagtggctggcaaattgaaaacaaagccccgtggcccctgtgtgtggctggaggtgtgtttctgctggatgtgctgttctgtgccctttgctgacattgcagtatcagttggttcactggccgtctcccgctgcgtctgagtggttctgtgggtctgttgggcctgttggtgtgtgcagccctcagcgtggtgcctggcatgagtaggtgctcagtagataactgcagtgattggacgaattatgttttgagattttgtttcagacccctggaaactggtttcccggcctttcaaaccgttgagaactgtgaggccactcgtgccctctgcacggggcgtcctgtgccctatctgtcctgggctgtgggctgctgttggtgctgtggtgccgtgcagggcggtggctgcgggaccgggcccggctcacgcgatggctagcccaaggtagcagaggccatgactggtggagatggagtgaggctcacgggccaccccattccagggtccccgggaaccccgtgcatgagggattgcttgaggccactgtgttagagtgggaagaaaaggggccttgtcacccttgtaggtgcccgagccaagatgggtttccaggcgagctgggctgcttgggttattcttcatggctgttctgatgggagggtccctgtgactttgagtcctgtgcttgcaggccaacccctcacaggaggactgggccgggctcagcagagacagctgtctggccaggtcactcagagttgttgctgaggggccgtcaggaccctgataggaacctgtgggcttggctgccctcctccctccaccctcctccctgtgtgctgtgtctttgagtctcccccgtgtctttgagtctcccccaaggctcctttcatcacagtgcaggtgccttgggccagggtgggtgctggggggcctgtagaggtgccgctgagcagagctgctgcagagggggctgcagaggggcacagaggcgcttgggtctctggcaggcatggctgaggagcggcctgggttagaggttgctgtgctgttggggacccaggaatgacctcactcacctccccgactgcgtccaggggcctccacctggttaaccctaaccaggttagggttaacagctacttcccatgttggctgtttttattggatcagggggtttagggcagaggcttctcttccttagatgaacaggcggcctccccaggcctcccggtccctgcgggcgctgggctcgctgactctgccgctctctctcgccctcacaggtttgtgagccgtatctccgtggtgccaactcagcccgggctgcttctgtcctcctctggggtaagtgttctgcccagcgtcactcacctctggattcttgagcctgcagggagggtggggtgggcgcctcctggacctggcccctgtggatcgctggcccctggctggctgtggctgtccactagatcttagagctgcctgcggctcgctccccgcctgcggccgctcactcaggactgcgtgtggggtgtgcgtaggtgcgtgtgtgttcgcctgtgggatgaactagcacgggtgtgtggaaggctcccttctgagggcggctgctgcatctacgatggtatcggggatcaggatctcaggtagaaacagtagacgggggcttctctgactcttggaggggtctcagtccatcccattacgggctgcattttttttccttttctttcctttttttctttctttctttttttttaagatggggtgttgctacatttttcaggctggtttcaaactcctgggctcaagcgatctgcctccttggcctcccaagtagctgggaccacaggctcgagcgcccgcacccgggttaccacagtgcatttttgcttgttgggtacagcttctgtgtcccagcaattgggtcctggaagccttacagtttagtgatgagagacgtgttttctctaaggaatgtgttagaaggattgttagtgattttgccaaagtgagggccttggattcctcacagggtctgattctgtcctcttgcggaattgttgcccgcacaccaccaccttcctcttcgctgtccttccctgtgttgtctgtgttggtcctttgtgtggtgtggcaggatggctgatggaccttctggccgcttctatgtttcttctctgattgggcttcattcacagcctcctgttcctgctcttcaaattaacacacagccacgcgacctgagagaagaagaaaagtgtggccataatctccagagggtcagggtcagggtcaggcttcgtcagcggtttgttgtgcaccttccagtctttttcataatatgaggaaaatcttccacgggcagagaagcctccccaggccccatctgtccctcatggcttactgctttgtttgagtggaacacgtcatctggtagctgccaaaaggcgcgaggagggtcagtgttttctgactttgcttttctggaaatacctttaatctcctttgaggcctggttgttagtttggcgtagaagtcctggttgaaacggtttccctcggagcttgggaggccttgcacagtgtgctctccagctggttgctcctgtgggttttcccgcgcgcttcctgtagaaacctgcagctgtctgccgtgggtccgtggggtgacagctgggctctccttctgcctggaggactttctctgctccagtgtgcgatgtgaaagccactgaggtgacttggtgggccccagaggggagttggccacacagccagtgattttcagtgtcctccgacctggggcattttcttacatgattaccttctgttctctacccctgcctcttgctcactttttctaaagcttgtgttagttgaaccactttaatgctctgattcttattttttttgagacagagtcttgctctgtctcccagtctggagtgcagtggcgtgatctcggttcactgcagcctctgcctcccgggctcaagcaatcctcccacctcaggcctcccgagtagctagtattacaggcacacaccaccatgccccgctaattttttatacttttgtagtgatggggttttgccagcttggccaggctggtctcaaacttttgacctcaagcgatccacccacttccgcccactgggattataggcgagagccaccatgctgggccataattctctgtttttttttctttcctgttcaatctcgtatttctactcctttaggaatagtcttacttcttgggagattgcctcaactttactttccagccttctgtggagacttgagttttattaggattattttgaatctttagttctttcttgccctcggcacgttcttttttgcagccacccattctcggatagtgcacgtgtctcttatctcactgagatgagcgtggacttttctttcttcaatttcttcctggccttgtgtttgattgccttctctggagtgtgttgtctgcctttctcattggaggttttcctcggatgtctggcgatgccatctgcctgtgtgtgatgggagtcagcaccagccggcctcagaggctgggtgtgtgcacccagggtggggcccgaggggcttcagagcaggtgtctgtgggcagcagccccttgcctgtggactccgtagaacgtgtgggtcagtcggtctcttctgggtggtcagtgtcccggccttcactcttgcccaggtctgtcccctggggctctgggaggtgagtgcgaaggggctaggtgactctcttctcagtgagtatttggcatccccgagacaggggcccctcggctccgtttccccagagccttctgctggcctggagtttggggctgaggatgcatcagggaggtcccgtttctctttgtaaagacatttgacagctcccctcaccaccttggtcttcaggctgcctggcccggtttggtctttggcaggtcctggcacctctcgggcttctctgtggctggtgcatttgttccctggcctccagcccccaggtttccttgctgtctctccgcggctgccttctcttcttgcctgttgtctttgtcttagtgggttcatggttattaaacatctttttcttgtcttcgtagagaggtttgggggtgagtgaaatgcctgtagatgtgtgtgttggtctccatgtttatctgccacatttgtagaaaggtgtgtgtgtgtgcgtgtgtatgtgcatgcgtgtgtgtgtgcattcatacatccactcttacctcggcacccagaggatatgcatctactgttagctgtttggggtatttacttttcatctttttcatttagtcatttaaaaatacttacaaatagtgcacagacactctctcattagatttaatgagtattgatttatttctctccactgaattagtgctgtaatgaattttttttaagccaggtatggtggctcatgcctgtagtcccagctactcggaggctgaggcgggaggattgcctgggcctgggagtcagaggctgcagtgagccaggagcaagcctgtgaatagccactgcagtgcagtgggcagtgtggaatagaccccatttcaattaaacaacaaaaaaataacaacagataaaaccaagaaaaaaaagagaaacgcttttttccattgatgatggttttagagcgtggagcctcttggttcctgtgtcggcttcctgaagggttgtaccagttgtcgtgggacggttgctgatggccatgtccttcctgtcattcttagtgaagtggagcagtggccacgagctcatgagcccacacgtgtctccccgtgggaatgcatgattgctgaagtgtctgcgcagacctgtgtgcatgcccgtgtctatgcccggcccgggcacagcagatgtggtctggcctcctggcggatgacaacctggccatctagcggccttggcttattttgctaggatctgcctcattggctttgtcatctgcctgggcatattggcactcgagaaacagggaatcggtcaccttccgttccccaccgttgtccttgatgatttgcatgagcgatttacacagtcagagcagagagcctttaattcctgagggtgggtggcatggctgtcacggagtggaaccccgaccacacgcagctgtcctctctgtcaccctacctgacggaagccccacaaccatgtgctaacctgtgtgtttggtttgtgcaggacggcaccctgaggctctgggagtacaggagcggccgccagctgcactgctgtcacctggccagtctgcaggagctggtggacccccaggccccccaggtagctgcttctgttcactcctgggcgactgagtgcttgtagacaccggcagtcgcctgacttgagtggaaaagtcacttcgccgttggaaacgtttgctctcaatgccagacttcctcctgtgtgagggaaatctcgtatttcaaattctgaaggtggctcgtcatgtcagtgggaaataatttgtctccctgttgcatgcaaacagttaatgtacaggaaggcctctaatcctgctctgaagtggaaggaatggaggtgcttgagcatgcacctttgtgggtctgccagccaggtggggcaggggtggggccaggcccactccagcattctccggccagcttggagcaatctcatgacaccctgaaagcccaggccttggcaaagtttcccgccaaacggtctgttccatttcctagagaactgtgtggtgtggcctctgccccctgccaggcagctgtgtaagagaggaccaggccttttccttcatgcttcacgtggactcaggttcctggaagtttccttcatttaaaaaaaattttttttttttttttgagatggagtcccactcttgcccaggctggagtgcagtggtgctatctcgactcacagcaacctccgcctcaggctcctgagtagctgggattaaaggcgtgagccactgtgcacggcctcttcttcatttttaatatttcctctgccaggaactgtgggagctcacagggcagttgtatgtgtagctctcatctcttcctttcccctgtgtcctccgctccctcttctcctcactgtctgacctatcttgttggctttggaggctgtcgcaggccctgcagggagtgccagaaccactggggggcttttgtcatctgcttgggaaacagggaatcagctaccctcctttccccactgattccagaatgttccagtgctgtttcctcttccttgatatgtgggggcgtgagcgtccttcggtcttgctcttgttggatcagagcgcccggcgtcgggcccctgcaggtggcgtgaagttaatgggcttcttctccttttagaagtttgccgcgtccaggattgcattctggtgccaggagaactgcgtggcgctcctgtgcgacgggtaagctgcggcggcacctctatggcctccggttctgcagacctgcagggggaagagttagcgggttggccactggcccacgtcctcaatgaagaggtcctgaacggtggtggtattggtctagcacctccctctgagaatgtcacttttgatgactgctgctgcatgagggtgagggctcctctcagccagcgctcttcaacctgacgttgaactcccctggcgtaaagagcaccagcagcctctgcctggccttctgagatgacagactttcccctgggccagtcgtggtggcatcacctcactcccggctcggggctggtcggatgggaaccccctggggttggcggtgctgacaaggtgggtttaggggtggagtgcagttctgctgcttcttcccgagtgacttgtgtgtgtcaggaaaggtattctatttggtgctttcggcacttttcatcttgtccttatgacagcctggggaggtctcttagctcgttctggaagtacgcaggtgtgagaggagagctgcgcctgagcccagggcctgcgtcctcctgccctgcctgcctgtaccgtgctggttagctattgctgcaccacgagccactccagagcttaggacttaaaaaagtgtacgtcaccccatggtttccccggcgccggcatttgggagtggcgcagctggggctttcagcgtaggctctcctgaggtggcaccggcgagggctgcaccgtctggggtgctggctgcagagcggagcccgtgggcctgcagtcctagtaatcatgctctctttcttcgtggcaagcactcctgtggtctacatcttccagctggacgcccgcagacagcagttggtgtacaggcagcagctggcgttccagcaccaagtgtgggacgtggctttcgaggagacccaggggctgtgggtgctccaggactgccaggaagcccccctggtgctctacaggcctgtgggcgaccagtggcaggtgagactcggcaccttccagatgtcctatgccctgcctttccataagcctgggggtgtggggcggcagctatgttttttgggtccatgggtaagcctctttcaactcagccacttctggggcccagggtctgtgtcctgaatggcagtggctggggcttccaccgtgggtgaagggagccgggtgccaggccggcgtggctggcttgtcccatgtggtgatgtctgcaacagttctttttttgggtgagtgtgtggccccccacaccacacttagcgatgaagttggcactcagtgtggcaagggtgtgtgggactaacacttggaggctggattagcacagcctcgggcctggggcactggctgagtcctcaggagcatgtggagccccgggtagaggagggggcaagggcggcaggctgagctgctttcctctggggagacagtggggtctctgggcgagggcggcgggccgagctgcttccttgctgggggacggggcgaaccctgtaccttgtctgcatcgctcctggtaacggagcaatgcccctgcccgccctgcgtctcacagggttgctgtggagttgagtggagtaggtacccatttgccaaagctcagttgagcactttggaagcactttttttttttttttgagacggagttttgctcgtgttgcccaggctggagtacaatggcgctatctcggctcaccgcgacctccgcctcccgggttcaagtgattctcctgcctcagcctcccgagtagctgggattacaggcatgcgccaccacacccggctaattttgtatttttagtagagacggggtttctccatgttggtcaggctggtcttgaactcccaccctcaggtgatccgcccgccttggcctcccaaagtgctgggattacaggtatgagccactgcgcctgacctggaagcacttttaagccatccagttctttttacctgagaagtggcaggccacatgatgtccccagtgggtgcctgtcgcacctgctggcccctgaggttgatgaactgcatgtgaagagcttgccctggcatcatgggccagctgcgggggctgcctccccaggtctccacagaaggtgaatgggggtccccaggcaccaggaggggacctcccctgcaagcctctctggccagcatgtgttgcgtcctggtgctgggtttccaggcctgcctctttctgatgaagatttcctgtttgtcgcctgcagtctgttcctgagagcaccgtgttaaagaaagtctctggtgttcttcgtgggaactgggccatgctggaaggtgagagcacgggtgcaggctgcccttgggggtcacacccagcgcggtccccagagaaagcagaagcacacactgtgacctgcccggggtacctggtgtgcagataaagagggagagtaagcgtgtgtccccatccagaaggcggggcagggcaggaggtgggtgacgcacagcagaagaaggagccccccatgggagtcaggctaacgagagccacttaggaaccgggggctcagggtctgagcacctgccttcagagttgggcgttgaaggtccccagggcagggctggcagctggtggctcccagagggagctggtgctgtgctgcctcatgcctggtccatggtgttgagggaattgatcccactgcagtgggcgtcagtaagtgcagggcctcactgggaggtttagtgggggtctagccagaggccccgggggtcttcaggaggctgagcaggggcaggatggtcactgtcctgacaggaacactcagctgaggggagggaatctagccagcaactcccgtggctgcggctgcaggaaggagagcagccaggctgagggaggagctggacgaacattttctaccctgccttctggggacacgacacactgtagttctgggtgcgtcgttgtgccagcaccttgcagtcttggaggtgatggtgtctgcaggatggattagcccagcatggaatccaggtgcctcattcacgacaagaagttgctgctctgaagtcttgcaaagctaaaccccactgcagtgagcactgaggttccttggagctctggagggattcacactgaggtcggaggagtttccgctgattggggcccagccgccttctgccaggctccccgagtggcggcacgctggctctgcctctgaggcttctctccctcctgctttgcttaggatgttgagggttgagacgggcagggttgggccccccagcgtggttgggatctgctttaggaacacttcagagtgggcctgtcactggctgtgtcagggactgcaggcggcagtgctcatggccgggcatctgcagtgctcatggcccccgtgctctaggccacggacagcatagacctgttgagtgtcaccttgcacaacagtctcaggccaaagcctgggctcgctctcctgagatgttccatagatagagcagcctgttcccggcgcagacttgggggcctgcgttgggagagggaccggggagggctgctgctagagtgtcccacaagcagcagagtcgctggaggggcggggaggctgcgccacctgctggatgggcaggcttcaggcagtcgctggtgcgcgggttaccggctgggcctgtggtttcctggccaggctgaggctgtctccgtgtgcctgtggtcagtcattgcccccaatccttggcacttagataaagtagatgaaatccgtgtccattccctgtggcggcagaacatgctatcccacactcgatgccttaaggcaccccacccttactgtctcactgttgctgtgggtcaggggtccggactcagctgagctgtgtctctgcaggtggccatctcagcttcaccaggcagggcccgacttcactcagtctgggttgtcggcaggacagggggcctctctggctgttggccagaggctgctgctcctggtcccctgccacctgggcccctccacagggcggctcatggtgcagtagtggctttctccgggcgtgcaagcagagagtgctggcggggtggaggcccagccttggtgccctggtttccattacattctttcatctttgccccgttctgttagtagccagtcctcaggtccagccagggtgtgggtcccaggaggtgggcaccgtggggagccgtcccagaaggcgccccccacggtccaccgaggactctgggagtcacgaggtaactccctgctgcagggggcccgctgtggtggccgagtcccatgttcctgccccacctggcacctgtccttgttcccccatcacaggctctgccggcgcagacgccagcttcagcagtctctacaaggccacgttcgacaacgtgacctcctacctgaagaagaaagaggagagactgcagcagcagctagagaagaagcagcggcgccggagtcccccgcctgggcccgacgggcatgccaagaagatgagaccgggggaggcgacgctaagttgctgatcgtggcggtcagtggtgtctctcacctcaaattaggaaaagctttttaacttgttcccctgcatcctggcatgtcccttcaagaaggaaaaggtgacatcagttgtgaccagctcagaggatggggctgtcccctgggctctagaaagaacattctgtgtcaccagcacaggctcttgctgggtgcctgtgccccctttctggttgaagggaagccagaccagtggagtggaagctcttgaagcactttcttttcatgtcggaggctgcgtgtgagccggtggtggcggcagctgtctgtgtttctcctgttctcataccgcccttcgtgtccgctgcatcttcctctaggagcatctgtgggctgacgtttctggcatggtggatgttttcatgttgttccgccgtctcagcatccaggtgacgtgctgtcccgcagtagctgctcgccacacaggctgttgaaactcagcacgaatgcttgagcctgccccagccccagccgtagcccttgtgctcaggagctgctcctggagagtggctcccttgtgggaagtgagaaacacgtttcggagtcgcagggagctctgtctggcatcggtggcacagatggtgaacttgtttcaggaagtgtgagcacgggcctggctggcacccggtttacagggaggtgattgaggacgtcgttatgatttgatttgaccttggcacacactgcagagccacagggatgttgctgaatttcaatcaccgatcagcaaggatgaaccttctcaacttcctaggaatgtttagcagcaaccgaatataccaggcaaaactccttggtgcctgcgctgtgtgtgtgtgaggtgcgcggtgtgattgtgcgctgtgtgtgtgtgaggtgcacgctgcgtgatcgtgtgctgtgtgaggtgcgcgccgcgtgatcgtgcgctgtgtgtgtgtgtgaggtgcgtggtgtgatcgtgcgctgtgtgtgtggtgcacgccgcgtgatcgtgcgctgtgtgtgtgaggtgcgcggtgtgatcgtgcgctgtgtgtgaggtgcacgctgcgtgatcgtgtgctgtgagtgaggtgcgcgccgcgtgatcgtgtgctgtgtgaggtgcgcgccgcgtgatcgtgtgctgtgtgaggtgtgcgccgcgtgatcgtgcgctgtgtgtgtgaggtgcgcggtgtgatcgtgtgctgtgagtgaggtgcgcgccgcgtgatcgtgtgctgtgtgaggtgcgcgccgcgtgatcgtgtgctgtgtgaggtgcgcgccgcgtgatcgtgtgctgtgtgaggtgcgcgccgtgtgatcgtgcgctgtgtgagtgaggtgtgcgccgcgtgatcgtgcgctgtgtgagtgaggtgcgcgccgcgtgatcgtgcgctgtgtgtgtgaggtgcgcggtgtgatcgtgcgctgtgtgtgaggtgcacgctgcgtgatcgtgtgctgtgaggtgcgcgccgcgtgatcgtgtgctgtgtgaggtgcgcgccgcgtgatcgtgtgctgtgtgaggtgcgcgccgtgtgatcgtgcgctgtgtgagtgaggtgtgcgccgcgtgatcgtgcgctgtgtgaggtgcgcgccgcgtgattgtgcgctgtgtgagtgaggtgcgcgccgcgtgatcgtgtgctgtgtgagtgaggtgcaggccacgtgatcgtgcgctgtgtgtgtgtgaggtgcgcactgcgtgaccgtgcgctgcatgtgagtgaggtgtgcgccgcgtgatttgggaagaggcttctgcaatgggcaggcttctgggtacatcacttaattcgttcaggccggctcctacctgctgtccagtgatgaagtctccacacaggaacaggttcatgctggcgatgactatgatgtggggtatcgctgggtactcagaatccttttgtgtatcaaaagctggaatgcttcaaatttttcataagtgccttgttttccttttaacattgatctggaaacagtgctgtctgcaaagctgaggcccactcctctctgctggggatcaggggtttcagaaggcaggggccatgctgggccactgtcctgtacaagcagcctggcctccttcacgctgccagggcatctggcgcagggcatgctttctcattcatagtctgctttgaaagtcttggttttaggagaggttcaggttggtcttgctggcatcttcacctaaaatagggtctggcagacaggcccatgcgctgcatcctgcccacggcctgatagatggcctgtgaatggcttttttacattttaaaagtggttgaaaacaaattaaaaatatatttcatgacatgaaaatcatgaaattcacatttcattatctgagaataaacttttatggatgcagccatgcctgtctgtccatgtcttatctgtgtctgctttgtgctacggctgcagagtggagtggctgggactgagacggaacgccctcctcacggggccgcgtctctccaccaggaccgcggggctactctgaggctctgcttcttccccagcggggttggcttcctgctattcctcagcatcctgccttggtcctgagttggtccctctgccaagagccgtttctgtgtctcagtggatggcgcagctgccttcttgctggtaccttgactgatagactggttcctgttcacctgcccgaagtcatcccagaaatacctcttacagttgcatgggttgaacccagctccgcgtgtatttagagttttgtctcttgccccttcacccagaacagcagcacccaccaccttcccgtcccctgtgactgcctcgcaactgggtctgttctgtgagatgtcgccaccctgtttgccatctgggaggatctcactccttcaatttaatctgctctcttccgttatttttttagtttctatgtattttacttttaggacattccttggactttgttctacctctttaattgatgaagaaaatttggtcattgtatctggtttttttttttgagacagagtctcgctctgttgcccaggctggagtgcggtggcacaatctcggctcactgcaacctccacctcactgcaacctccgcctcccgggttcaagcgattctcctacctcagcctcccgagtagctggattacaggctcctgccaccacgcctggctaatttttgtatttttagtagagatggggttttgccatgtttgccaggctggtctccaactcctgacctcaggtgatcctctcgcctcgcactcccaaagtgctgggattataggtgtcagccactgcacccaatctattgtatttaattctaagcactttcttccagacggtctcactctgtcacccaggctgaagtgcagtggtgtgatctcagctcacagcagcctcaacctcccaggctcaagcagtcctcccaccttggcctcccagagtgctgggattacaggcacgagccattatgcccagcccgtctttcttcattttgattacagtgtgcgtactgtacatccgagaagtgcatgtgaaatgctggaactgggatttcagcaactgaatgcacgtgtgtgactacccacgagaagcaggacacttagcacctgctgagaagcccccacgcccatgttcccttctaggcactgcacaggcatgctggccggcctgacctcagtttccctcttgctgtggccgcttctgctccactctctgtgaggctcatccaccttgttgcctgtggttgtggattgttcattctcagtgctctgtatgccaagtactccattgtgtgaaaatcccacagcacgttcattctattatcaatgggcatttgggtagtttccacagtttggctgttaggaatagtgcagtgatgaacatgctggcacctgtcttctgttttttttttatttttagagacagggtcttgctctgttacccaggctggagtgcagtggtgtgaccttggctcgctgggcctcctgggctcaagcgatcctcccacctcagtctcctgagtagctgggactgcaggtgtgtgcctgcgtgctggctaatttttgtagtttttgtagagatggtgtcttgctctgctgcccaggctggtctcgaacttctggcctcaagcagtcctcctgccttagtttcccaaagcactgggattacaggtgtgagccactgcccccggccagcacccgtcttctggaacatttgtaagcatttctgttgggtgtgtacttgcgcgtggaattgctggctctcagttatgcacatttcttagaagatcctgccagtccttcatcccagaccccgaccccagcgtggaaaacgcagtgcatcctcaacgcctagtgtttgcggctgtggcggctcatgatcgacttggaaggcccacagtgtgtggtgtggagttttgcagggagccagtgacactgcccaccttcgatccagacctaaccttgatcctgttctctgaggccaccttaccaaaaccttgacttacccgtcttagatcacttaccctgggggaaatgtgccgcaagctcacgagggcactcagccagcctacaaaggttaccatggcagagaactgaggcctcctgccagcagccagcagcagctgaccagccgcgagggcccctccgggaaggagagctttctgtgtttcttcctgtaccccatatatgttgacgtgatacgttttactttctgatttcccttgtgagatctttggtctgtgggttatttggaagtatggtttaatttccaaacatttagggttttcctccagattttgttgttgtttctggtttctggttttaattccactgtggtctcagaatatactttgctgacttccctctctttagatttgttgagccctgttttgtgcttcatagtgggagggtgattgtatgtgcacgtgcagatatgtgtggcccccacacggtatctccagctatccgtgtcttgcctctccgtgcccagtgcacccttctcagccctgccgtgtgaccctgggctgggccctccctgtaccctcctttgcaggttggcacagtgtttggctctgtcactggaaggagctggagggactccacaggagggaggggcctgccctcctggttccagtgtgcttgcttttcctggcttccgtggtgtgtgcctgccagcctcatggtgggggcgggggctctcagtgacagtctgcaggagtttagcaacacccaggttcattcaccacggtgggaaggattcctgctaagcttccttgcctctgtccagctcccagggcgtctgcctccctcctgccccagggagagcttctgggtgagtctcgctggcactcctgccccgggcttcctgctctcaggccttggcctgctgcaccttggccaactgcaccacccggcacatcatagccccactcaggtcagagctgcgtctcagccgacgtggggttccgaggttctcaccaagatccagactcaacgcttgtgggtttgttgtctcagtcctggcggtggaggttctcccgaggcctcagcgcctccgttctcggaagtctctttacatgttagtggaaccctctgttcctgttgaatcattcttcgtgttaaatgtttctatctcttgactgatacatgatagtcatcatgtatgtattctgcggctgcttttgtttttttctctttatccctggttttctgtaatttgataagctttagggtatgtgtgtgtgttttgggggtttgtcaagatttgtaggctttgtcatttttatgcaatttggaaatattctagctattcggtctcttcccctgcctcctgcagtcccaggtactcgaatgggctgcttgctgtggactcatgggtccgtgagtctgctcatcttcttcagtttgcgtttcatttttggtagattctgtttccacgtcttcaagcccactgatcttttaagctgctgttaagctatggccattttctgtatgagccattgtgttttttcatctctataaatttggttttggtatttaaaaaaatgtcttccagctaggctggcggctcacacctgtgatcccaacactttgggaagttgaggcagggggattgcttgagcccaggagtttgagactagcctgggcaatacagtgagacctcatctttaaaaataattaaaaaggtcaggtgcggtggctcacgcctgtaatcccagcattttgggaggacagtggatcacaaggttaggagtttgagaccagcttggccaatatggtgaaaccctgtctctactaaaaatataaaaaattagctgggcacatgcctgttgtcccagttatttgagaggctaaagcaggagaatcgcttgaacctgggaggcggaggttgcagtgagccgagatcgcgccactgtactccagcctgggcgacagagcaagaatctgtcttaaaaaaaaaaaaaattagccaggtgtggtggcacatgcctgtagtcccagctgctcgggaggctgaggcgggaggatcacttgagcctgggagtttgaggctgcagcaagccgtgattgcactactgcattccagcctgggtgacagagtgacggtctcaaaaaaaaaaaaaaaaaaaaaaaaaagcacaccagtgtcttccatttctcttttaatcataatcatgctttaaaaaataccctcgagcatatggagcaaatttaagataattgttccttttctgctaattcattattactgtcatatctaggtctgtttctgtcgactgtggaccacttatgtgcgatccgtggaccacttgcgtgcgatctgtcggccgacgatgagcttgttcggatgtagctccatcgtaagtcgaggagcatctgtgatttgtcctctgcttatgggatatgtttttccgctactgagtctgtgtagtaaatttttgactaggaacatggtgagatttacattattaagtgtgaagttttgttaaggttcctttaaagaatattacgctttctggccggctgttaagccccatgtagattaatttggtctttttcaggtttgttttaagctcactagagtgaggctgaagtagcctttccttggatgatttagtccttcccaggtgtgaccctcctgctgtccctgcagaatcctgggtattcagaagtgtctgcacactggctggagggacgagggtgatttctgtgcaaggcgggaattgtttgtcttaccctccggaggattgttttttcctcaaaagctactctttggcgtcctggggttttacagaatgtgtaggttggtgttcatccgaagaccccaacgggacgctggtgtgtatttcctttcatctgtgcagctcccctcccctttgcgggtattctgtccccagttctagctgccttggccttacctataccagggaggccaagtggcccgctcgccccactccccttccagacagggtgcagacagggccctcccatctcctggacggcggcggcccctgtgcagaacttcatgggcacctggctgtctgggggcctcttccccagggagtctcctggtggtggccgtgttgcctcaggctcactgtgcactaggcaggtcacgtcaatgccacctgaggggcaggggttaccaccctgtggttcaggtgagaagcccgaggcccaggtgaggagtgtctggcagtccgtgcagtgtctggacagtatgccagcccctgcccggaggcccagcttctccagcccagcccacacccaccaggaaatgccccgattttactcccctggggcaaaggcccttggctggctgagcatcccctctcccagcactcggaggcacctgcagttgctcagctgttcattgagtgctgggagtggaaactcatacgctgagcggcagtgacgctgcggagctgacaaaccccacagcccgcccggtcacctgcttcaccgagggccacagcccccccggggtcaggtggccacaggggtcctggccatgtgggacatctgttctgtggccctgctcaggatggcacctggcggggactggccctggggtcgaggcatgggctcagccactgccctgcagggacacagccaggacctcttcccggcagagggactcccccactaatccccagaatactgaggggcacgctgggtgccaggctggcagggaccctggggattctgcagcgagctgaatggggtgggagttccttcttaaaatgtggagtctggaggccactcttggcgaagcgctggtgcccggggattctgcagtgagctgggcatggattcgtgaagctgctcatggtgaagcgctggggtgatggtggatgggccacagcgccactgtcacaaggaaggtgggtgacagcgagtgttccctgttcccttaccagcgagtgcctccctgggaacttgcccccaggctgtgctcttgggccatctccttcatcctcaccttcacagccacccctccttctcccaactgaggcacctgcagaggagaggggccccagacggggacagcagggcagaatcccagctcccagatccgggagaggggggattgggtgtggcggcagtttcgggggtagggggccaggtgggtgtgggacccaggggcgtggtttcaatcctccccccaggaccttgggaatggcctccaggagcctggcatggggaggccagggtcaccagctgaaccatctggaccagaattgcacagcagcgccctctcctctacagcaagacgtcacccaggggtccccacagaggaggcagggaagcttgagggtcccagaggagcgtggagcatgcaccatgctacgctataccacactacacacacgtgcaccatacacgtacatatgcatgtgccacacatcacacacgtgcacattccacaccatgcacacacacccaccacaccacacatgtacttacgcatgtaccacaccacatcacacgtgcgcactccgcaccatacatgtacatacacaggtacatcatgcactcacataccacacatccacatacacacatgtgccacaccacactaaactcacaccatacatgcacatatccacatacacacaggcacacaccacacagaacatgcacacaccatagaggcacccacacacaaccaatcacgtatgcacacactcgcaccatatatatgcacatacatagattcatacatcacacatcacagtacaccaccccacacaggcacttatgcaccatatgtgcacatacactcacaccacacatgcacaccaaacatcacatacacactcgcacaatatgtgcattgcgcacatacacaccacacattacactacacacaccacaccacatacgcacacatgtccactcatgcgcagacaccatacagatacaggtgcacacatataccacacacacattataccacgtactatgccacacacacaaaccatacatgcatacgcacaaataccataccatcccactcacactatacatgtacacatgcacacagacacaccataccacaaacacacgcacaccaccacatacagatacataccatcccacttacaccatacatgtacatacataccccacacatgcacacattcacacagcatcacagacaccacatacagctgtgcacacactgtaccactcacatcatacatgcacacacactacactatatagacaccatacacacacaccacatagatacgcatacacaaatacatcatactatttacacacatcatacatgcatagacaccatacacagacacaccacgcacactcatacacatacacacacacggtctggagatggagtcactgcagccagcaggggtggcgtgcagacaggagggcctaactcaggcaggcacagcaggtacacaggggcggccccctgggggcttgaggcggcccgggaaccctcctcctgcccagcccctcccatctgcccccctgggggcttgaggcggcccgggaaccctcctcctgcccagcccctcccatccacccccctgggggcttgtggccccagcctccttcccgtggcttcgaagcccctcgtcctcccaggccagccccatcctcacccacaggcgctcccagcactctgtgaggctctactcacggatggcaggcacttccccttactggtctcaaaggagaccctggagcagatggtcccgagaccccttcctgccagacacccctgggctggggccactccaggtcggggcatgcaagtgctgcccaccaaaaaaccaccgtggatgcagcggggcctctgcacatcacccctcggtgcactggaggcctcagcggtgctcctggctgagcatggggacttcactaccagtctgccctgggtcacgtatggaagcctcagccggaggcgtgggagctgaaggcccgacgcttcctgttctgctcagctcctccttggaggaagtggggtttgcaccacga

SEQ ID NO: 22490 - DNA, 1097 bp, Homo Sapiens
gaaccggccagctcctgctctgtcccctcaggtgtcctgcaggcacagcatctcggggggcccaggccgatggcaggtcttaacgtgtccctctccttcttctttgccaccttcgccctctgtgaggcggccaggcgggcctccaaggccctgctcccagtgggcgcctatgaagtcttcgcccgggaggcgatgaggacgctggtcgagctcgggccctgggctggggactttgggcctgacctgctgctcaccctgctcttcctgctcttcctggcgcacggggtcaccttggacggggcctcggccaaccccactgtgtccctgcaggagttcctcatggccgagcagtctctgcctggcacgctgttgaagctggcggcacaggggctgggcatgcaggccgcctgcaccctgatgcgcctctgctgggcctgggagctcagtgacctgcacctgctgcagagcctcatggcccagagctgcagctcggccctgcgcacatccgtgccccacggggcgcttgtggaggccgcctgcgccttttgtttccatctgaccctcctgcacctgcggcacagtcctcccgcctacagcgggcccgctgtggctctgttggtcaccgtcacggcctacacggccgggcccttcacgtctgccttcttcaaccctgccctggccgcctctgtgacctttgcctgctcgggacacaccttactggagtacgtgcaggtgtactggctgggccctctgacagggatggtcctggctgtgctgctgcaccagggccgccttccccaccttttccagaggaacctgttctacggccagaagaacaagtaccgagcaccccgagggaagccggccccggcctcaggggacacccagacccctgcaaaggggtccagtgtccgggagcctgggcgcagtggtgttgaggggccacattccagctgagtggccttgctctgtgtgagccccgtgcgagggccctgcttgtagctggaccctggaaccttctgtagctaagagggaatcctggccccctccccagaagccatttgtcaataaaccatttctaagaaaaaaaaaaaaaa

SEQ ID NO: 22491 - DNA, 2000 bp, Homo Sapiens
cctgtgaacactatagcgctgagagagacagtctgaaagcagaggaagacatcgatcagtaacaccaagagacaccaaagttgaaagttttgttttctttccctctgttttatttttcccccgtgtgtccctactatggtcagaaagcctgttgtgtccaccatctccaaaggaggttacctgcagggaaatgttaacgggaggctgccttccctgggcaacaaggagccacctgggcaggagaaagtgcagctgaagaggaaagtcactttactgaggggagtctccattatcattggcaccatcattggagcaggaatcttcatctctcctaagggcgtgctccagaacacgggcagcgtgggcatgtctctgaccatctggacggtgtgtggggtcctgtcactatttggagctttgtcttatgctgaattgggaacaactataaagaaatctggaggtcattacacatatattttggaagtctttggtccattaccagcttttgtacgagtctgggtggaactcctcataatacgccctgcagctactgctgtgatatccctggcatttggacgctacattctggaaccattttttattcaatgtgaaatccctgaacttgcgatcaagctcattacagctgtgggcataactgtagtgatggtcctaaatagcatgagtgtcagctggagcgcccggatccagattttcttaaccttttgcaagctcacagcaattctgataattatagtccctggagttatgcagctaattaaaggtcaaacgcagaactttaaagacgccttttcaggaagagattcaagtattacgcggttgccactggctttttattatggaatgtatgcatatgctggctggttttacctcaactttgttactgaagaagtagaaaaccctgaaaaaaccattccccttgcaatatgtatatccatggccattgtcaccattggctatgtgctgacaaatgtggcctactttacgaccattaatgctgaggagctgctgctttcaaatgcagtggcagtgaccttttctgagcggctactgggaaatttctcattagcagttccgatctttgttgccctctcctgctttggctccatgaacggtggtgtgtttgctgtctccaggttattctatgttgcgtctcgagagggtcaccttccagaaatcctctccatgattcatgtccgcaagcacactcctctaccagctgttattgttttgcaccctttgacaatgataatgctcttctctggagacctcgacagtcttttgaatttcctcagttttgccaggtggctttttattgggctggcagttgctgggctgatttatcttcgatacaaatgcccagatatgcatcgtcctttcaaggtgccactgttcatcccagctttgttttccttcacatgcctcttcatggttgccctttccctctattcggacccatttagtacagggattggcttcgtcatcactctgactggagtccctgcgtattatctctttattatatgggacaagaaacccaggtggtttagaataatgtcagggttcctagcactgatgcctgcacaagcatgtgatatgtgaaataaaatggattcttctatagctaaatgagttccctctggggagagttctggtactgcaatcacaatgccagatggtgtttatgggctatttgtgtaagtaagtggtaagatgctatgaagtaagtgtgtttgttttcatcttatggaaactcttgatgcatgtgcttttgtatggaataaattttggtgcaatatgatgtcattcaactttgcattgaattgaattttggttgtatttatatgtattatacctgtcacgcttctagttgcttcaaccattttataaccatttttgtacatattttacttgaaaatattttaaatggaaatttaaataaacatttgatagtttacataataaaaaaaaaaaaaaaaaaa

SEQ ID NO: 22492 - DNA, 4559 bp, Homo Sapiens
gcggccgccccattcccagaccggccgccagcccatctggttagctcccgccgctccgcgccgcccgggagtcgggagccgcggggaaccgggcacctgcacccgcctctgggagtgagtggttccagctggtgcctggcctgtgtctcttggatgccctgtggcttcagtccgtctcctgttgcccaccacctcgtccctgggccgcctgataccccagcccaacagctaaggtgtggatggacagtagggggctggcttctctcactggtcaggggtcttctcccctgtctgcctcccggagctaggactgcagaggggcctatcatggtgcttgcaggccccctggctgtctcgctgttgctgcccagcctcacactgctggtgtcccacctctccagctcccaggatgtctccagtgagcccagcagtgagcagcagctgtgcgcccttagcaagcaccccaccgtggcctttgaagacctgcagccgtgggtctctaacttcacctaccctggagcccgggatttctcccagctggctttggacccctccgggaaccagctcatcgtgggagccaggaactacctcttcagactcagccttgccaatgtctctcttcttcaggccacagagtgggcctccagtgaggacacgcgccgctcctgccaaagcaaagggaagactgaggaggagtgtcagaactacgtgcgagtcctgatcgtcgccggccggaaggtgttcatgtgtggaaccaatgccttttcccccatgtgcaccagcagacaggtggggaacctcagccggactactgagaagatcaatggtgtggcccgctgcccctatgacccacgccacaactccacagctgtcatctcctcccagggggagctctatgcagccacggtcatcgacttctcaggtcgggaccctgccatctaccgcagcctgggcagtgggccaccgcttcgcactgcccaatataactccaagtggcttaatgagccaaacttcgtggcagcctatgatattgggctgtttgcatacttcttcctgcgggagaacgcagtggagcacgactgtggacgcaccgtgtactctcgcgtggcccgcgtgtgcaagaatgacgtggggggccgattcctgctggaggacacatggaccacattcatgaaggcccggctcaactgctcccgcccgggcgaggtccccttctactataacgagctgcagagtgccttccacttgccagagcaggacctcatctatggagttttcacaaccaacgtaaacagcatcgcggcttctgctgtctgcgccttcaacctcagtgctatctcccaggctttcaatggcccatttcgctaccaggagaaccccagggctgcctggctccccatagccaaccccatccccaatttccagtgtggcaccctgcctgagaccggtcccaacgagaacctgacggagcgcagcctgcaggacgcgcagcgcctcttcctgatgagcgaggccgtgcagccggtgacacccgagccctgtgtcacccaggacagcgtgcgcttctcacacctcgtggtggacctggtgcaggctaaagacacgctctaccatgtactctacattggcaccgagtcgggcaccatcctgaaggcgctgtccacggcgagccgcagcctccacggctgctacctggaggagctgcacgtgctgccccccgggcgccgcgagcccctgcgcagcctgcgcatcctgcacagcgcccgcgcgctcttcgtggggctgagagacggcgtcctgcgggtcccactggagaggtgcgccgcctaccgcagccagggggcatgcctgggggcccgggacccgtactgtggctgggacgggaagcagcaacgttgcagcacactcgaggacagctccaacatgagcctctggacccagaacatcaccgcctgtcctgtgcggaatgtgacacgggatgggggcttcggcccatggtcaccatggcaaccatgtgagcacttggatggggacaactcaggctcttgcctgtgtcgagctcgatcctgtgattcccctcgaccccgctgtgggggccttgactgcctggggccagccatccacatcgccaactgctccaggaatggggcgtggaccccgtggtcatcgtgggcgctgtgcagcacgtcctgtggcatcggcttccaggtccgccagcgaagttgcagcaaccctgctccccgccacgggggccgcatctgcgtgggcaagagccgggaggaacggttctgtaatgagaacacgccttgcccggtgcccatcttctgggcttcctggggctcctggagcaagtgcagcagcaactgtggagggggcatgcagtcgcggcgtcgggcctgcgagaacggcaactcctgcctgggctgcggcgtggagttcaagacgtgcaaccccgagggctgccccgaagtgcggcgcaacaccccctggacgccgtggctgcccgtgaacgtgacgcagggcggggcacggcaggagcagcggttccgcttcacctgccgcgcgccccttgcagacccgcacggcctgcagttcggcaggagaaggaccgagacgaggacctgtcccgcggacggctccggctcctgcgacaccgacgccctggtggaggacctcctgcgcagcgggagcacctccccgcacacggtgagcgggggctgggccgcctggggcccgtggtcgtcctgctcccgggactgcgagctgggcttccgcgtccgcaagagaacgtgcactaacccggagccccgcaacgggggcctgccctgcgtgggcgatgctgccgagtaccaggactgcaacccccaggcttgcccagttcggggtgcttggtcctgctggacctcatggtctccatgctcagcttcctgtggtgggggtcactatcaacgcacccgttcctgcaccagccccgcaccctccccaggtgaggacatctgtctcgggctgcacacggaggaggcactatgtgccacacaggcctgcccagaaggctggtcgccctggtctgagtggagtaagtgcactgacgacggagcccagagccgaagccggcactgtgaggagctcctcccagggtccagcgcctgtgctggaaacagcagccagagccgcccctgcccctacagcgagattcccgtcatcctgccagcctccagcatggaggaggccaccggctgtgcagggttcaatctcatccacttggtggccacgggcatctcctgcttcttgggctctgggctcctgaccctagcagtgtacctgtcttgccagcactgccagcgtcagtcccaggagtccacactggtccatcctgccacccccaaccatttgcactacaagggcggaggcaccccgaagaatgaaaagtacacacccatggaattcaagaccctgaacaagaataacttgatccctgatgacagagccaacttctacccattgcagcagaccaatgtgtacacgactacttactacccaagccccctgaacaaacacagcttccggcccgaggcctcacctggacaacggtgcttccccaacagctgataccgccgtcctggggacttgggcttcttgccttcataaggcacagagcagatggagatgggacagtggagccagtttggttttctccctctgcactaggccaagaacttgctgccttgcctgtggggggtcccatccggcttcagagagctctggctggcattgaccatgggggaaagggctggtttcaggctgacatatggccgcaggtccagttcagcccaggtctctcatggttatcttccaacccactgtcacgctgacactatgctgccatgcctgggctgtggacctactgggcatttgaggaactggagaatggagatggcaagagggcaggcttttaagtttgggttggagacaacttcctgtggcccccacaagctgagtctggccttctccagctggccccaaaaaaggcctttgctacatcctgattatctctgaaagtaatcaatcaagtggctccagtagctctggattttctgccagggctgggccattgtggtgctgccccagtatgacatgggaccaaggccagcgcaggttatccacctctgcctggaagtctatactctacccagggcatccctctggtcagaggcagtgagtactgggaactggaggctgacctgtgcttagaagtcctttaatctgggctggtacaggcctcagccttgccctcaatgcacgaaaggtggcccaggagagaggatcaatgccacaggaggcagaagtctggcctctgtgcctctatggagactatcttccagttgctgctcaacagagttgttggctgagacctgcttgggagtctctgctggcccttcatctgttcaggaacacacacacacacacactcacacacgcacacacaatcacaatttgctacagcaacaaaaaagacattgggctgtggcattattaattaaagatgatatccagtctcc

SEQ ID NO: 22493 - DNA, 4265 bp, Homo Sapiens
attccctcccgtgaccagtgacttccggcacgaaggggcggggctgggctcgtggctgagccagcagctgcagcagctacgggagtggccgggtggccggcgggtgccagccgccatggaggccgtgccccgcatgcccatgatctggctggacctgaaggaggccggtgactttcacttccagccagctgtgaagaagtttgtcctgaagaattatggagagaacccagaagcctacaatgaagaactgaagaagctggagttgctcagacagaatgctgtccgtgtcccacgagactttgagggctgtagtgtcctccgcaagtacctcggccagcttcattacctgcagagtcgggtccccatgggctcgggccaggaggccgctgtccctgtcacctggacagagatcttctcaggcaagtctgtggcccatgaggacatcaagtacgagcaggcctgtattctctacaaccttggagcgctgcactccatgctgggggccatggacaagcgggtgtctgaggagggcatgaaggtctcctgtacccatttccagtgcgcagccggcgccttcgcctacctacgggagcacttccctcaagcctacagcgtcgacatgagccgccagatccttacgctcaacgtcaacctcatgctgggccaggctcaggagtgcctcctggagaagtcgatgttggacaacaggaagagctttctggtggcccgcatcagtgcacaggtggtagattactacaaggaggcatgccgggccttggagaaccccgacactgcctcactgctgggccggatccagaaggactggaagaaacttgtgcagatgaagatctactacttcgcagccgtggctcatctgcacatgggaaagcaggccgaggagcagcagaagttcggggagcgggttgcatacttccagagcgccctggacaagctcaatgaagccatcaagttggccaagggccagcctgacactgtgcaagacgcgcttcgcttcactatggatgtcattgggggaaagtacaattctgccaagaaggacaacgacttcatttaccatgaggctgtcccagcattggacacccttcagcctgtaaaaggagcccccttggtgaagcccttgccagtgaaccccacagacccagctgttacaggccctgacatctttgccaaactggtacccatggctgcccacgaggcctcgtcactgtacagtgaggagaaggccaagctgctccgggagatgatggccaagattgaggacaagaatgaggtcctggaccagttcatggattcaatgcagttggatcccgagacggtggacaaccttgatgcctacagccacatcccaccccagctcatggagaagtgcgcggctctcagcgtccggcccgacactgtcaggaaccttgtacagtccatgcaagtgctgtcaggtgtgttcacggatgtggaggcttccctgaaggacatcagagatctgttggaggaggatgagctgctagagcagaagtttcaggaggcggtgggccaggcaggggccatctccatcacctccaaggctgagctggcagaggtgaggcgagaatgggccaagtacatggaagtccatgagaaggcctccttcaccaacagtgagctgcaccgtgccatgaacctgcacgtcggcaacctgcgcctgctcagcgggccgcttgaccaggtccgggctgccctgcccacaccggccctctccccagaggacaaggccgtgctgcaaaacctaaagcgcatcctggctaaggtgcaggagatgcgggaccagcgcgtgtccctggagcagcagctgcgtgagcttatccagaaagatgacatcactgcctcgctggtcaccacagaccactcagagatgaagaagttgttcgaggagcagctgaaaaagtatgaccagctgaaggtgtacctggagcagaacctggccgcccaggaccgtgtcctctgtgcactgacagaggccaacgtgcagtacgcagccgtgcggcgggtactcagcgacttggaccaaaagtggaactccacgctgcagaccctggtggcctcgtatgaagcctatgaggacctgatgaagaagtcgcaggagggcagggacttctacgcagatctggagagcaaggtggctgctctgctggagcgcacgcagtccacctgccaggcccgcgaggctgcccgccagcagctcctggacagggagctgaagaagaagccgccgccacggcccacagccccaaagccgctgctgccccgcagggaggagagtgaggcagtggaagcaggagacccccctgaggagctgcgcagcctcccccctgacatggtggctggcccacgactgcctgacaccttcctgggaagtgccaccccgctccactttcctcccagccccttccccagctccacaggcccaggaccccactatctctcaggccccttgccccctggtacctactcgggccccacccagctgatacagcccagggccccagggccccatgcaatgcccgtagcacctgggcctgccctctacccagcccctgcctacacaccggagctgggccttgtgccccgatcctccccacagcatggcgtggtgagcagtccctatgtgggggtagggccggccccaccagttgcaggtctcccctcggccccacctcctcaattctcaggccccgagttggccatggcggttcggccagccaccaccacagtagatagcatccaggcgcccatccccagccacacagccccacggccaaaccccacccctgctcctcccccgccctgcttccctgtgcccccaccgcagccactgcccacgccttacacctaccctgcaggggctaagcaacccatcccagcacagcaccacttctcttctgggatccccacaggttttccagccccaaggattgggccccagccccagccccatcctcagccccatccttcacaagcgtttgggcctcagcccccacagcagccccttccactccagcatccacatctcttcccaccccaggccccaggactcctacccccacaatccccctacccctatgcccctcagcctggggtcctggggcagccgccaccccccctacacacccagctctacccaggtcccgctcaagaccctctgccagcccactcaggggctctgcctttccccagccctgggccccctcagcctccccatcccccactggcatatggtcctgccccttctaccagacccatgggcccccaggcagcccctcttaccattcgagggccctcgtctgctggccagtccacccctagtccccacctggtgccttcacctgccccatctccagggcctggtccggtaccccctcgccccccagcagcagaaccacccccttgcctgcgccgaggcgccgcagctgcagacctgctctcctccagcccggagagccagcatggcggcactcagtctcctgggggtgggcagcccctgctgcagcccaccaaggtggatgcagctgagggtcgtcggccgcaggccctgcggctgattgagcgggacccctatgagcatcctgagaggctgcggcagttgcagcaggagctggaggcctttcggggtcagctgggggatgtgggagctctggacactgtctggcgagagctgcaagatgcgcaggaacatgatgcccgaggccgttccatcgccattgcccgctgctactcactgaagaaccggcaccaggatgtcatgccctatgacagtaaccgtgtggtgctgcgctcaggcaaggatgactacatcaatgccagctgcgtggaggggctctccccatactgccccccgctagtggcaacccaggccccactgcctggcacagctgctgacttctggctcatggtccatgagcagaaagtgtcagtcattgtcatgctggtttctgaggctgagatggagaagcaaaaagtggcacgctacttccccaccgagaggggccagcccatggtgcacggtgccctgagcctggcattgagcagcgtccgcagcaccgaaacccatgtggagcgcgtgctgagcctgcagttccgagaccagagcctcaagcgctctcttgtgcacctgcacttccccacttggcctgagttaggcctgcccgacagccccagcaacttgctgcgcttcatccaggaggtgcacgcacattacctgcatcagcggccgc

SEQ ID NO: 22494 - DNA, 2818 bp, Homo Sapiens
gactgagcgaagtgctctggatgttaagctgaagcatgcacgtaatcaggtggatgtagagatcaaacggagacagagagctgaggctgactgcgaaaagctggaacgacagattcagctgattcgagagatgctcatgtgtgacacatctggcagcattcaactaagcgaggagcaaaaatcagctctggcttttctcaacagaggccaaccatccagcagcaatgctgggaacaaaagactatcaaccattgatgaatctggttccattttatcagatatcagctttgacaagactgatgaatcactggattgggactcttctttggtgaagactttcaaactgaagaagagagaaaagaggcgctctactagccgacagtttgttgatggtccccctggacctgtaaagaaaactcgttccattggctctgcagtagaccaggggaatgaatccatagttgcaaaaactacagtgactgttcccaatgatggcgggcccatcgaagctgtgtccactattgagactgtgccatattggaccaggagccgaaggaaaacaggtactttacaaccttggaacagtgactccaccctgaacagcaggcagctggagccaagaactgagacagacagtgtgggcacgccacagagtaatggagggatgcgcctgcatgactttgtttctaagacggttattaaacctgaatcctgtgttccatgtggaaagcggataaaatttggcaaattatctctgaagtgtcgagactgtcgtgtggtctctcatccagaatgtcgggaccgctgtccccttccctgcattcctaccctgataggaacacctgtcaagattggagagggaatgctggcagactttgtgtcccagacttctccaatgatcccctccattgttgtgcattgtgtaaatgagattgagcaaagaggtctgactgagacaggcctgtataggatctctggctgtgaccgcacagtaaaagagctgaaagagaaattcctcagagtgaaaactgtacccctcctcagcaaagtggatgatatccatgctatctgtagccttctaaaagactttcttcgaaacctcaaagaacctcttctgacctttcgccttaacagagcctttatggaagcagcagaaatcacagatgaagacaacagcatagctgccatgtaccaagctgttggtgaactgccccaggccaacagggacacattagctttcctcatgattcacttgcagagagtggctcagagtccacatactaaaatggatgttgccaatctggctaaagtctttggccctacaatagtggcccatgctgtgcccaatccagacccagtgacaatgttacaggacatcaagcgtcaacccaaggtggttgagcgcctgctttccttgcctctggagtattggagtcagttcatgatggtggagcaagagaacattgaccccctacatgtcattgaaaactcaaatgccttttcaacaccacagacaccagatattaaagtgagtttactgggacctgtgaccactcctgaacatcagcttctcaagactccttcatctagttccctgtcacagagagtccgttccaccctcaccaagaacactcctagatttgggagcaaaagcaagtctgccactaacctaggacgacaaggcaacttttttgcttctccaatgctcaagtgaagtcacatctgcctgttacttcccagcattgactgactataagaaaggacacatctgtactctgctctgcagcctcctgtactcattactacttttagcattctccaggcttttactcaagtttaattgtgcatgagggttttattaaaactatatatatctccccttccttctcctcaagtcacataatatcagcactttgtgctggtcattgttgggagcttttagatgagacatctttccaggggtagaagggttagtatggaattggttgtgattctttttggggaagggggttattgttcctttggcttaaagccaaatgctgctcatagaatgatctttctctagtttcatttagaactgatttccgtgagacaatgacagaaaccctacctatctgataagattagcttgtctcagggtgggaagtgggagggcagggcaaagaaaggattagaccagaggatttaggatgcctccttctaagaaccagaagttctcattccccattatgaactgagctataatatggagctttcataaaaatgggatgcattgaggacagaactagtgatgggagtatgcgtagctttgatttggatgattaggtctttaatagtgttgagtggcacaaccttgtaaatgtgaaagtacaactcgtatttatctctgatgtgccgctggctgaactttgggttcatttggggtcaaagccagtttttcttttaaaattgaattcattctgatgcttggcccccatacccccaaccttgtccagtggagcccaacttctaaaggtcaatatatcatcctttggcatcccaactaacaataaagagtaggctataagggaagattgtcaatattttgtggtaagaaaagctacagtcattttttctttgcactttggatgctgaaatttttcccatggaacatagccacatctagatagatgtgagctttttcttctgttaaaattattcttaatgtctgtaaaaacgattttcttctgtagaatgtttgacttcgtattgacccttatctgtaaaacacctatttgggataatatttggaaaaaaagtaaatagctttttcaaaatg

SEQ ID NO: 22495 - DNA, 6250 bp, Homo Sapiens
gttgcagtgagccgagatcgcgccactgcactccagcctgggcgacggagcgagactttgtctcaagattactctaaacagaaacaagagtgaaataaatttgtggagttaataataaaaatgttattctctgtggtatgttttcttttcttttgtttttttgggacggggtcttgctctgttgcccaggctggagtgcagtggcgccatcttggctcactgcggcctctgcctcccgggttcgagcgattctcctgcctcgggcccctgagtggctgggattacaggcacgtgccaccacgcctagctaatttttatatttttagtagagacggggtttcgccatgttggtcatgttggtctcgaactcctgacctcatgatctgccccctgccggcctcccacagtgctgggattgcaggcgtgagccaccgcgcccggcctgtattttttcatttcatagaatttccagataaaagtcagagtcaactagttttataatactgaaaagttttgcaaatacaagcatgtcacttaatgatggggatgtgttctgagaaatgtgtcattaggtgattccgtcattgtgcaaatgtcatagagtatacttacataaacctaggtggtatgtagcctatatgatatatgtggcttatatgatataccctattgctcctaggctgcaaacctgtatagcatgttactatcctgaagtcaatgggcaattgtaacacaatggcaagtatttgtgtattgaaacataagggtatagtaaaaatatggtactattaatacaactgtatgggactaccattgtatatgcggtccatcattggccaaactttctttatggtggcacaagactacataataaatggtaaagtaaccagacttggagatggggaggagggagaagaatgccaaatgtatgtttcctcccacagactagcaggcatctagtatcaggcaacatacttatacaatcatttcctactcctgtctcacacttgccagaatctggatttaattttttttttttattgttagaccagtaatgcagttttcatattttgtataacaaaaaagttgtaggacttttccttcttactgtgaaaatatgactcattaaatacataacttttagtattggccatttgtattcttatactcttagtcacaaagataactacgttttacaaagtcgaaaggttaataatagcagctagcatgaattcagagcttgctatgtattgagcactgggtttaaacacatatgctctattttattaagtccttatagtaggaaagtgaagaatacactagtcactgaagttccttcagtgctcaagactcaagtgcactatagcaagacaaacaccaggaaacatgtaactctgcttcgaatactttagcaagtgaatggcccagtttgggaaagcaagacaaacactggatccataatggctttttacacctgattggaatgcagaaaaaatggaaccactaactactaatattatctttgccagcaggtgagcagtacatacctgacttcagaggattttattgaaaccaatagatgatggttaataaaaacaaatatcctcagctttccttcttttacttgtcatctgacaaccactatttagctaaaactaaaatggattagagatacaagatgatgaataacaattattaacttttgtgagcatataatgtgagtcagctactacactaagaactttacatagattcccttaattttctcaataatcctatgagaactgtccttgtatgagcaaccccattttatagctgaagatacttgaggcttcaagaggttatataaacatgttcatggtcaacagttattaagcagtgagtgacattctcacgagattaatgagatcatctgtgtgagatacaaatacatctattgtgtatgtttgtgtttttaatggagaccaatggtatgacagaatgaagtccttttatcagtcagtcaagatctgatgtggctattcaaatataggcaaaactgatgttttccttttttagttaagttaaatgtactatttaaataactgtgaatatttagaatattcacagaattgtgcaaccatcaccacaatctttagaatattttcatcatctcaaaaagatactttgtagcctttagcacccttcccactgtacccccccccatacccctggccataggcaactactaaattactttctgtccctgcaggttgtcctattctggatactttgtatatgtggaatcataaaataggtgatcttttatgactggcatctttcaagcatgtttttgatattttcatccatgttgtaggatattaaattaactttttgcataggaataactagctagaaaagcatgggctgaatatgtctgcagaatgtagcatttagaaaagaaagacttccaggagacaaatgaggtagtaactaaaatgtaaataactaaaaattagctttgagtctttaataaactacctttcatgttttgctttcactaggaatgaacttttaattttttggagctataaatacatgtagtttctaaagacatctttgtttttaaagaaaagacatctgcaggctttttcttagtgttcctattaagtatgtatgagtgtgtgcatttgtgtgtgtgtgtgtgcatgtttagtgactttacatgtgtatacatacaaatgtacacagtcatatatgactagtggtacatggaatctcaatttaattgtaaaagtgaaggagttctaaaactagttttagtatagtaagtgggatatagtaagaatgtcctacaatttaaaagcttatttggttatcttcaatggattttgaatgtattcaatactagatttgcgagtgactatgcctttttagtaaacaaaagaaaggctataatgtagaaagtatatggaataagcataacatctgtcctaatctaattttcaggcacatctccagacttcaatttggctgaaataattcatgccacggacctgtgcacatgcctggaattgagagacacagttaaaagactccaagttgctttctgccttttgaaaactcctgaaaaccatccctctggactctggaattctacacagctcaaccaagactttgcttgaatgtttacattttctgctcgctgtcctacatatcacaatatagtgttcacgttttgttaaaactttggggtgtcaggagttgagcttgctcagcaagccagcatggctaggatgagctttgttatagcagcttgccaattggtgctgggcctactaatgacttcattaaccgagtcttccatacagaatagtgagtgtccacaactttgcgtatgtgaaattcgtccctggtttaccccacagtcaacttacagagaagccaccactgttgattgcaatgacctccgcttaacaaggattcccagtaacctctctagtgacacacaagtgcttctcttacagagcaataacatcgcgaagactgtggatgagctgcagcagcttttcaacttgactgaactagatttctcccaaaacaactttactaacattaaggaggtcgggctggcaaacctaacccagctcacaacgctgcatttggaggaaaatcagattaccgagatgactgattactgtctacaagacctcagcaaccttcaagaactctacatcaaccacaaccaaattagcactatttctgctcatgcttttgcaggcttaaaaaatctattaaggctccacctgaactccaacaaattgaaagttattgatagtcgctggtttgattctacacccaacctggaaattctcatgatcggagaaaaccctgtgattggaattctggatatgaacttcaaacccctcgcaaatttgagaagcttagttttggcaggaatgtatctcactgatattcctggaaatgctttggtgggtctggatagccttgagagcctgtctttttatgataacaaactggttaaagtccctcaacttgccctgcaaaaagttccaaatttgaaattcttagacctcaacaaaaaccccattcacaaaatccaagaaggggacttcaaaaatatgcttcggttaaaagaactgggaatcaacaatatgggcgagctcgtttctgtcgaccgctatgccctggataacttgcctgaactcacaaagctggaagccaccaataaccctaaactctcttacatccaccgcttggctttccgaagtgtccctgctctggaaagcttgatgctgaacaacaatgccttgaatgccatttaccaaaagacagtcgaatccctccccaatctgcgtgagatcagtatccatagcaatcccctcaggtgtgactgtgtgatccactggattaactccaacaaaaccaacatccgcttcatggagcccctgtccatgttctgtgccatgccgcccgaatataaagggcaccaggtgaaggaagttttaatccaggattcgagtgaacagtgcctcccaatgatatctcacgacagcttcccaaatcgtttaaacgtggatatcggcacgacggttttcctagactgtcgagccatggctgagccagaacctgaaatttactgggtcactcccattggaaataagataactgtggaaaccctttcagataaatacaagctaagtagcgaaggtaccttggaaatatctaacatacaaattgaagactcaggaagatacacatgtgttgcccagaatgtccaaggggcagacactcgggtggcaacaattaaggttaacgggacccttctggatggtacccaggtgctaaaaatatacgtcaagcagacagaatcccattccatcttagtgtcctggaaagttaattccaatgtcatgacgtcaaacttaaaatggtcgtctgccaccatgaagattgataaccctcacataacatatactgccagggtcccagtcgatgtccatgaatacaacctaacgcatctgcagccttccacagattatgaagtgtgtctcacagtgtccaatattcatcagcagactcaaaagtcatgcgtaaatgtcacaaccaaaaatgccgccttcgcagtggacatctctgatcaagaaaccagtacagcccttgctgcagtaatggggtctatgtttgccgtcattagccttgcgtccattgctgtgtactttgccaaaagatttaagagaaaaaactaccaccactcattaaaaaagtatatgcaaaaaacctcttcaatcccactaaatgagctgtacccaccactcattaacctctgggaaggtgacagcgagaaagacaaagatggttctgcagacaccaagccaacccaggtcgacacatccagaagctattacatgtggtaactcagaggatattttgcttctggtagtaaggagcacaaagacgtttttgctttattctgcaaaagtgaacaagttgaagacttttgtatttttgactttgctagtttgtggcagagtggagaggacgggtggatatttcaaatttttttagtatagcgtatcgcaagggtttgacacggctgccagcgactctaggcttccagtctgtgtttggtttttattcttatcattattatgattgttattatattattattttattttagttgttgtgctaaactcaataatgctgttctaactacagtgctcaataaaatgattaatgacaggatggggttcccctgtgcttttaccagtagcatgaccccttctgaagccatccgtagaaagtactttgtcctccaaaaagctaacatacggttttgaagcagcattgaaacttttgtagcaatctggtctatagacttttaactcaagaagctaaggctagacttgttaccttcgttgaatgatgttagttgactgtactgtaatgttgtatcaactgaattgaatgtttgcctttaaacaatgaattttctttttctttccttttttttttttgttgtaatagttaaagaggcttagaacaagctaacaggcaatagaaatatgtatatcagattttttaatgtaacaaactacatgttaattgttatcttattctttttatctttagtagacacttttaaaagaaaagacaattttgttgtgtttaactcaccaacacgtggtgtataatgaagacagaactataataaattagttttgttctgattttttagaacacttgc

SEQ ID NO: 22496 - DNA, 4174 bp, Homo Sapiens
tttggcagcaaggtgtccattttttaaaacactgctttcttcctcaccagagtatggggcagagataataatggacatcaatacagctggtattgatatgcccatgttttctgctttgttacactacctttatacaggagagtttggaatggaggactcaaggtttcaaaatgtcgatatccttgttcagcttagtgaagaatttggaacaccaaattcccttgatgtagatatgcgtggactctttgattacatgtgttattatgatgtcgtccttagtttttcttcagactctgaactggttgaagcttttggtggaaatcagaactgtttagatgaagagctcaaagcccacaaggctgttatttctgcacggtccccattttttcgaaatttattacaaaggaggatacgaactggtgaagaaatcacagaccgaactttgaggactcccacaagaattatattagatgagtccattataccaaaaaaatatgcaacagtgatattacactgtatgtataccgacgtggtggacctctctgttttgcactgtagcccctctgtggggagtctcagtgaagttcaggctctcgtcgcagggaagccaaacatgaccagggcagaagaagccatggaactttaccacatagcactgttcttggaatttaacatgcttgcacaaggctgtgaggatatcattgctgagagcatctcattagataccttaattgccatcctcaagtggagttctcatccatatggctctaaatgggtgcaccgacaagctttacatttcctctgtgaggaattttcccaggtcatgacttcggatgttttttatgaactcagcaaagaccatctgcttactgctatccagtctgactacctacaggcaagtgaacaagatatccttaaatatctgattaaatggggagagcatcagttgatgaaaagaatagcagatagagagccaaacttactgagtggcactgcccatagtgtgaacaaaagaggtgtaaaaagacgggacctggacatggaagagctcagagagatcctttcttctctcttaccttttgtgcgaattgaacacatcttacctataaacagtgaagtcttaagtgatgcaatgaaaagaggcttgattagtactcctccatcagatatgcttcctacaacagaaggtgggaagtcaaatgcctggttacggcaaaaaaatgctggcatctatgttcgtcctcgactcttctctccctatgtggaagaagcaaagtcagtgctagatgagatgatggtggaacaaacggatcttgtgcgcttgcgaatggttagaatgtccaatgtgccagacacgctctacatggtcaataatgccgtgccacagtgttgtcacatgatcagccaccagcagatcagcagcaaccagtcaagccctccttcagttgtagccaacgaaattccagttcctcgtctcctcattatgaaagacatggtcagacgactgcaggaactgcggcacacggagcaggtgcagagggcctatgccctgaactgcggggaaggcgccactgtcagctatgaaattcagattcgagtgctaagagagtttggtcttgcagatgctgctgcagagctgttgcagaatcctcacaaattctttcctgatgaacgttttggggatgaaagtccactcttgacaatgagacagcctgggagatgtcgcgtaaacagtacacctcctgcagaaaccatgtttacagatctggactcttttgtggccttccatccacccttgccccctccaccacctccctaccaccccccagctaccccaatccataaccaactcaaagcaggctggaagcaaagacctcccagtcagcacccttcacgttcattttcttatccctgtaatcattcgctgttccactccagaacagctcctaaagctggccctcccccagtctacttgccgagtgtgaaagctgcaccgcctgattgtaccagcactgcaggactgggcagacagacggtggctgctgctgccgccaccaccacctcaacagcaacagcagcagcagcagcagcatctgagaagcaagtgcgaacacaacctgtgctgaatgatctgatgccagacatcgcggtgggtgtgtccacactgtcactcaaggacaggaggcttccagagcttgctgtagacacagaattaagccagtcagtttctgaagcaggaccagggcctccccagcatctgtcgtgtattccacagagacatacacacacttctcggaaaaaacacacactagagcaaaaaacagacaccagagaaaatccacaggaatatccggatttctatgacttctcaaatgctgcttgcagaccttctactcctgctctcagcagacgcaccccttccccttcgcaaggtggatattttggtcccgatctgtacagccacaataaggcatcaccaagtggcttaaagtcagcctacctacctggtcagacgtctcctaaaaaacaggaagaagctaggagagaatatccactttcccctgacgggcatctacacagacaaaagaatgagccgatacacctggatgtcgttgagcaacctccccagcggtcagactttcctttggcagccccagaaaatgctagtaccggtccagcccatgtcaggggacgaactgcagtagaaactgacttgacttttgggctgactcctaacagaccttcactttctgcatgtagctctgaagctcccgaagagagatccggtagaagactggcagacagtgagtccctgggccatggagctcagagaaatacagatttggaaagggaagattcaataagcagaggaaggaggtcaccaagcaagccggacttcctctacaaaaagtctgccctctgagagcaacctccaagtcgtctgtgcctgagatgtgaaacatcccattttatgatgtaacccaacaacttacagaccagttcatcaatgccagctgataactcggtttcacatgattttgttctagtttttgtgtatatatgtgtttattagacatggcatgctaagaaggttttgtttttttttttttaatgttgcatctgtctaatttgtctttgaacaattatgtcgggaggcatttttaagaacaagcaggctggcactttttatttctctttacaaatgatggaatttttttgcacttgtacatttattttctctgtattgattttatatcagtatgttaaactttattgccacatttaaaggactgtattttcatacttttttgcattttatctttcatctaccaatccatgtgcattggattgcacactaagatgtattttcttacgaaatagttctgtgtttattttttaattatagaaattccaaagaacagcacatcagaatgctcctctcttttcagtaattgttttagttcagagatcttcccgctcagcctccataaatctaatgtcattttttttttaataagtcctaggagctgggcttcattcctccagcgggagtccagtcagggtcctgaagtttgctggttcaggaaagaacaggaaagagaaaagccttctgtgcccaggctaaagctgttacatttccacagtgtggatgcagtcagaatccctgcacattctggtcataaggattagagtcaccagatgaggctctaaacagatcgcatcccttggaattagaaagcagtggagaccgggcgcagtgactcacacctgtgatcggcacttcggaaggccgaggcgggcggatcactgaagctcaggagttcaagaccagcctgggcaacatggcgaaactccatttctataaaaaatacaaaaaaaaaaaaatctagccaggcgtggtggtgcgcgcctgtagtcccagctacttggggggctgaggtggcaggatcgcttgagcctgggaggttgagactgcagtgagccaagattgcaccactgtgctcccacctgggcaacagtgagaccctgtctcaaaaaaaaaaaaaaaggcagtggaaatagagaagtaacttaaaggtcacactgacagaatttctggttctgagcatcaactctccagctgtgatggcggaactgactgcttgctgcctttaattgtcttgctctctatggg

SEQ ID NO: 22497 - DNA, 3817 bp, Homo Sapiens
cgcggagctacagtgtgctttgagtagaagctgcactggggccgggactcggaggcgcgctgcgtgagccggccgcagagccatggcgggcggggaagaccgcggggacggagagccggtatcagtggtgaccgtgagggtgcagtacctggaagacaccgaccccttcgcatgtgccaactttccggagccgcgccgggcccccacctgcagcctggacggggcgctgcccttgggcgcgcagatacccgcggtgcaccgcctgctgggagcgccgctcaagttggaggattgtgctctgcaagtgtctccctccggatactacctggacaccgagctgtccctggaagagcagcgggagatgctggagggcttctatgaagagatcagcaaagggcggaagcccacgctgatccttcggacccagctctctgtgagggtcaacgctatcttggaaaagctgtatagctccagtggtcctgagctccgccgctccctcttctcactgaagcagatcttccaggaggacaaagacctggtgcctgaatttgtgcattcagaggggctgagctgcctgatccgtgtgggtgctgctgccgaccacaactaccagagctacatccttagagcgctcggccagctgatgctctttgtggatggaatgctgggggtggtggcccacagtgacactattcagtggctgtacacattgtgtgccagcctgtcccgcttggtggtgaagacagccctgaagctgctgttggtgtttgtagaatactccgaaaacaacgcaccgctgttcatccgtgcagtgaactctgtggccagcaccaccggtgctcctccctgggccaatctggtgtccatcctggaggagaagaatggcgctgaccctgagttgttggtgtacatggtcaccctcatcaacaagacgctggcggcgctcccggaccaggactccttctacgatgtgacggatgcactggagcagcagggcatggaagcgctggtccagcgccacctgggcactgcgggcactgacgtcgacctgcgcacgcagcttgtgctctacgagaacgccctgaaattggaggatggagacatcgaagaagccccaggcgctggtgggcggcgggaacgacgaaagccttcttctgaggagggcaagaggagccgccgttctctggaaggcgggggctgccccgcgcgtgccccggaacctggccccacaggccccgcctcaccggtaggccccacctcttccaccggccccgccctgctgacaggccccgcctccagccctgtgggccctccctccggtctccaagcttcagtgaacctttttcctaccatctctgtggcaccctcagctgacacctccagcgagaggagcatctacaaagcccggttcctggagaatgtggcggcagcagaaacagagaagcaggttgcgctggcccagggccgggcagagacacttgccggggccatgcccaatgaggcgggtggacacccagatgcccggcaactctgggactccccagagacagcccctgcagccagaacaccccagagccctgccccctgtgtcctgctccgggcccagcgaagccttgcaccagagcccaaggagccactgataccagcaagccccaaggctgagcccatctgggagctccctacccgtgcacccaggctctctattggggacctggacttttcagatctaggggaggatgaagaccaggacatgctgaatgtagagtctgtggaggctgggaaagacatcccagctccctcacccccactgcccctgctctcgggagtacccccccctcccccacttccacctcccccacccatcaaaggccccttcccaccacctccacctctacctctggctgcccctcttccccattcagtgcctgacagctcagccctccccactaagaggaagacagtaaaacttttctggcgtgagctgaagctggctgggggccatggagtctctgcaagccgctttgggccctgcgccaccctctgggcttcactggaccctgtctcagtggacacggcccgactggaacacctctttgagtctcgtgccaaagaggtgctgccctccaagaaagctggagagggccgccggacaatgaccacagtgctggaccccaagcgcagcaacgccatcaacatcggcctaaccacactgccacctgtgcatgtcattaaggctgctctgctcaactttgatgagtttgctgtcagcaaggatggcattgagaagctactgaccatgatgcccacggaggaagagcggcagaagattgaggaagcccagctggccaaccctgacatacccctgggcccagccgagaacttcctgatgactcttgcctccattggcggcctcgctgctcgtctacaactctgggccttcaagctggactatgacagcatggagcgggaaattgctgagccactgtttgacctgaaagtgggtatggaacagctggtacagaatgccaccttccgctgcatcctggctaccctcctagcggtgggcaacttcctcaatggctcccagagcagcggctttgagctgagctacctggagaaggtgtcagaggtgaaggacacggtgcgtcgacagtcactgctacaccatctctgctccctagtgctccagacccggcctgagtcctctgacctctattcagaaatccctgccctgacccgctgtgccaaggtggactttgaacagctgactgagaacctggggcagctggagcgccggagccgggcagccgaggagagcctgcggagcttggccaagcatgagctggccccagccctgcgtgcccgcctcacccacttcctggaccagtgtgcccgccgtgttgccatgctaaggatagtgcaccgccgtgtctgcaataggttccatgccttcctgctctacctgggctacaccccgcaggcggcccgtgaagtgcgcatcatgcagttctgccacacgctgcgggaatttgcgcttgagtatcggacttgccgggaacgagtgctacagcagcagcagaagcaggccacataccgtgagcgcaacaagacccggggacgcatgatcaccgagacagagaagttctcaggtgtggctggggaagcccccagcaacccctctgtcccagtagcagtgagcagcgggccaggccggggagatgctgacagtcatgctagtatgaagagtctgctgaccagcaggcctgaggacaccacacacaatcgccgcagcagaggcatggtccagagcagctccccaatcatgcccacagtggggccctccactgcatccccagaagaacccccaggctccagtttacccagtgatacatcagatgagatcatggaccttctggtgcagtcagtgaccaagagcagtcctcgtgccttagctgctagggaacgcaagcgttcccgcggcaaccgcaagtctttgagaaggacgttgaagagtgggctcggagatgacctggtgcaggcactgggactaagcaagggtcctggcctggaggtgtgaaggtgctgtatcccggaaatctatctggaccctggactgcagtgcaggagatgacagagtgaggagggcccagagcagaattctggccccagaactctgtgcccaggagccatgccttgagcagtattagccgtgtgtgtatgcatgtgagtgtgtgtgtatgtgtgtgtgtgcatgcatatgcatgtgcatgtgtgtgagctccttgaacgcacggagcaaaataaaattttcttagct

SEQ ID NO: 22498 - DNA, 2725 bp, Homo Sapiens
aggaagcagaaaaggttggataaaagataaggacagacccacgaagtcaagcatgcggagtgcagccaagcccggaacccagccatcagagcagggggccacggcccagaccgggtgcggcctctgcctgcagcctcgtccggcatgaagagttctaagtcttcaacttccttggcttttgagtcccgactcagcaggctcaagagggccagcagtgaggacacgctcaacaagccaggaagtaccgctgcatcgggggtggttcgcctgaagaagaccgccactgccggagccatctcggagctcacggagagccgcctgaggagcggcacaggggcctttacaacaactaaacggacaggcattccagccccacgggaattttcagtaactgtctcaagagagaggtctgtgccacgcggtccctccaaccccaggaaatcagtgtccagtccaacttcttccaacactcccactcctacgaaacacctgaggaccccttccacaaagcccaagcaagagaatgaaggtggagaaaaggtgcgcttgagtcccaagtttcgggaacttttggcagaagccaaaagcaaagatagtgaaattaacaggcttcgaagtgaactaaagaaatacaaagagaaaaggactctgaacgctgaggggactgatgctttgggcccaaatgtcgatggaacatcagtctccccaggtgacacggaacctatgataagagctcttgaggagaagaacaagaactttcagaaagagctttccgatctagaggaagaaaaccgggtcctgaaggagaaactgatctatcttgagcactccccaaattcagaaggggcagcaagtcacactggcgacagcaggtgcccaacatccataactcaagagtcaagcttcggaagcccaactggaaatcagttgtccagtgacattgatgagtataaaaaaaacatacatggaaatgcattacggacatcaggctcctcaagtagcgatgttaccaaagcttctttgtcgccagatgcttccgactttgagcacattacagcagagacaccctcaaggcccctgtcctccaccagtaacccctttaagagttcaaagtgttctactgctgggagttccccaaacagcgtaagtgaattgtccctggcttccctcacagagaagatacaaaagatggaagaaaaccaccatagcactgcagaagaactacaggctactctacaagaattatcagaccagcaacaaatggtacaggaattgacagctgaaaatgagaagctggtggatgaaaagacgattttagagacatcctttcatcagcatcgagagagggcagagcagctaagtcaagaaaatgagaagctgatgaatcttttacaagagcgagtaaagaatgaagagcccaccactcaggaaggaaaaattattgaactggagcagaagtgcacaggtattcttgaacagggccgctttgaaagagagaagctactcaacattcagcagcagttgacctgtagcttgcggaaggttgaggaagaaaaccaaggagctttagaaatgattaaacgtctgaaggaagaaaatgaaaaactgaatgagtttctagaactggaacggcataataataacatgatggccaaaactttggaagagtgtagagttaccttggaagggctaaaaatggagaatggatctttgaagtctcatttgcagggtgagaagcagaaagccacagaggccagtgctgtggagcagacggcagagagctgcgaagttcaagaaatgttgaaagtagcccgagcagagaaagatctactggaactgtcttgcaatgagctcagacaagaattactaaaggcaaacggtgaaattaaacatgtttccagtctgctggccaaggtggaaaaggattattcatacctgaaggagatatgtgatcaccaagccgaacagctgagcagaaccagcctaaagctgcaagaaaaagcatcagagagtgatgcagagatcaaagacatgaaagaaaccatatttgaattggaagatcaggtggaacagcaccgggctgtcaagttacacaataatcaactcatcagtgagctagaaagtagtgtgatcaagctggaggaacagaagtcagacctggagaggcagctgaagactctgaccaagcagatgaaggaggagaccgaggaatggaggcggttccaggcggatctgcagaccgcagtggtggtggccaatgacatcaagtgtgaggcccagcaggagctgcgcaccgtgaagaggaaactgctggaggaggaggagaagaatgcccggttgcagaaggagctgggggatgtgcagggccacggcagggtggtcaccagcagagccgcccctccctccctgggctctgtcagctagcagagcatttggtggaagaaagacagcccagctcttgccatgattgggagccgcagcccatctctagatgaaagggggaatgtgtagaggagaaattgcctctttataaagagcccagttgtctccttgtgacattctctgttctcagagtcattgccgtcgagtctctgctttttgtccacattttgggatcagcttactgcatgatcaaagatgatgtttccctctttttaacttttcctcagaagattgagctgtcttttatttggaggataaaatgaagttctgaaaaaaaaaaaaa

SEQ ID NO: 22499 - DNA, 4863 bp, Homo Sapiens
ggagatagcgcctgtcagtcggtgggtcggtcctcgcgccggccctccccctccccggtctccgggggaggcgcggtggagtccgcccccggggttctccgatgggggagaagcggcgacggcggcagtggagtaaccgagccggagcgtgagcggccccggtgccccgttccccacggaggccatgggcgacccagcccccgcccgcagcctggacgacatcgacctgtccgccctgcgggaccctgctgggatctttgagcttgtggaggtggtcggcaatggaacctacggacaggtgtacaagggtcggcatgtcaagacggggcagctggctgccatcaaggtcatggatgtcacggaggacgaggaggaagagatcaaacaggagatcaacatgctgaaaaagtactctcaccaccgcaacatcgccacctactacggagccttcatcaagaagagccccccgggaaacgatgaccagctctggctggtgatggagttctgtggtgctggttcagtgactgacctggtaaagaacacaaaaggcaacgccctgaaggaggactgtatcgcctatatctgcagggagatcctcaggggtctggcccatctccatgcccacaaggtgatccatcgagacatcaaggggcagaatgtgctgctgacagagaatgctgaggtcaagctagtggattttggggtgagtgctcagctggaccgcaccgtgggcagacggaacactttcattgggactccctactggatggctccagaggtcatcgcctgtgatgagaaccctgatgccacctatgattacaggagtgatatttggtctctaggaatcacagccatcgagatggcagagggagccccccctctgtgtgacatgcaccccatgcgagccctcttcctcattcctcggaaccctccgcccaggctcaagtccaagaagtggtctaagaagttcattgacttcattgacacatgtctcatcaagacttacctgagccgcccacccacggagcagctactgaagtttcccttcatccgggaccagcccacggagcggcaggtccgcatccagcttaaggaccacattgaccgatcccggaagaagcggggtgagaaagaggagacagaatatgagtacagcggcagcgaggaggaagatgacagccatggagaggaaggagagccaagctccatcatgaacgtgcctggagagtcgactctacgccgggagtttctccggctccagcaggaaaataagagcaactcagaggctttaaaacagcagcagcagctgcagcagcagcagcagcgagaccccgaggcacacatcaaacacctgctgcaccagcggcagcggcgcatagaggagcagaaggaggagcggcgccgcgtggaggagcaacagcggcgggagcgggagcagcggaagctgcaggagaaggagcagcagcggcggctggaggacatgcaggctctgcggcgggaggaggagcggcggcaggcggagcgcgagcaggaatacaagcggaagcagctggaggagcagcggcagtcagaacgtctccagaggcagctgcagcaggagcatgcctacctcaagtccctgcagcagcagcaacagcagcagcagcttcagaaacagcagcagcagcagctcctgcctggggacaggaagcccctgtaccattatggtcggggcatgaatcccgctgacaaaccagcctgggcccgagaggtagaagagagaacaaggatgaacaagcagcagaactctcccttggccaagagcaagccaggcagcacggggcctgagccccccatcccccaggcctccccagggcccccaggacccctttcccagactcctcctatgcagaggccggtggagccccaggagggaccgcacaagagcctggtggcacaccgggtcccactgaagccatatgcagcacctgtaccccgatcccagtccctgcaggaccagcccacccgaaacctggctgccttcccagcctcccatgaccccgaccctgccatccccgcacccactgccacgcccagtgcccgaggagctgtcatccgccagaattcagaccccacctctgaaggacctggccccagcccgaatcccccagcctgggtccgcccagataacgaggccccacccaaggtgcctcagaggacctcatctatcgccactgcccttaacaccagtggggccggagggtcccggccagcccaggcagtccgtgccagtaaccccgacctcaggaggagcgaccctggctgggaacgctcggacagcgtccttccagcctctcacgggcacctcccccaggctggctcactggagcggaaccgcgtgggagtctcctccaaaccggacagctcccctgtgctctcccctgggaataaagccaagcccgacgaccaccgctcacggccaggccggcccgcaagctataagcgagcaattggtgaggactttgtgttgctgaaagagcggactctggacgaggcccctcggcctcccaagaaggccatggactactcgtcgtccagcgaggaggtggaaagcagtgaggacgacgaggaggaaggcgaaggcgggccagcagaggggagcagagatacccctgggggccgcagcgatggggatacagacagcgtcagcaccatggtggtccacgacgtcgaggagatcaccgggacccagcccccatacgggggcggcaccatggtggtccagcgcacccctgaagaggagcggaacctgctgcatgctgacagcaatgggtacacaaacctgcctgacgtggtccagcccagccactcacccaccgagaacagcaaaggccaaagcccaccctcgaaggatgggagtggtgactaccagtctcgtgggctggtaaaggcccctggcaagagctcgttcacgatgtttgtggatctagggatctaccagcctggaggcagtggggacagcatccccatcacagccctagtgggtggagagggcactcggctcgaccagctgcagtacgacgtgaggaagggttctgtggtcaacgtgaatcccaccaacacccgggcccacagtgagacccctgagatccggaagtacaagaagcgattcaactccgagatcctctgtgcagccctttggggggtcaacctgctggtgggcacggagaacgggctgatgttgctggaccgaagtgggcagggcaaggtgtatggactcattgggcggcgacgcttccagcagatggatgtgctggaggggctcaacctgctcatcaccatctcagggaaaaggaacaaactgcgggtgtattacctgtcctggctccggaacaagattctgcacaatgacccagaagtggagaagaagcagggctggaccaccgtgggggacatggagggctgcgggcactaccgtgttgtgaaatacgagcggattaagttcctggtcatcgccctcaagagctccgtggaggtgtatgcctgggcccccaaaccctaccacaaattcatggccttcaagtcctttgccgacctcccccaccgccctctgctggtcgacctgacagtagaggaggggcagcggctcaaggtcatctatggctccagtgctggcttccatgctgtggatgtcgactcggggaacagctatgacatctacatccctgtgcacatccagagccagatcacgccccatgccatcatcttcctccccaacaccgacggcatggagatgctgctgtgctacgaggacgagggtgtctacgtcaacacgtacgggcgcatcattaaggatgtggtgctgcagtggggggagatgcctacttctgtggcctacatctgctccaaccagataatgggctggggtgagaaagccattgagatccgctctgtggagacgggccacctcgacggggtcttcatgcacaaacgagctcagaggctcaagttcctgtgtgagcggaatgacaaggtgttttttgcctcagtccgctctgggggcagcagccaagtttacttcatgactctgaaccgtaactgcatcatgaactggtgacggggccctgggctggggctgtcccacactggacccagctctccccctgcagccaggcttcccgggccgcccctctttcccctccctgggcttttgcttttactggtttgatttcactggagcctgctgggaacgtgacctctgacccctgatgctttcgtgatcacgtgaccatcctcttccccaacatgtcctcttcccaaaactgtgcctgtccccagcttctggggagggacacagcttccccttcccaggaattgagtgggcctagcccctccccccttttctccatttgagaggagagtgcttggggcttgaaccccttaccccactgctgctgactgggcagggccctggacccctttatttgcacgtcaggggagccggctccccccttgaatgtaccagaccctggggggggtcactgggccctagatttttggggggtcaccagccactccaggggcagggaccatttcttcattttctgaaagcactttaatgattccccttcccccaaactccagggaatggaggggggaccccgccagccaaaacattccccccattcccgacccccctctcctcttctagcccatgcccttccccggtggagggagggagcagggagccctcactctccacgccccttgcttgcatctgtatatagtgtgagcagcaagtaacccttctccctccccccccacccctcctcaatgtagtggccttggatatcctgtttgttaataaagacaattcaaccagct

SEQ ID NO: 22500 - DNA, 1749 bp, Homo Sapiens
acggatataagattgcgtgggttctgcctaaagctgaattcccagcgctttggcttctctgagttggggttgtgtataggggtcttcgaacagttccggaaccagccagcagcctttaattcttgggcggaccacggccggttctgtgttcttggctaagatgagcagccaccataccacctttccttttgaccctgagcggcgagtccggagtacgctgaagaaggtctttgggtttgactcttttaagacgcctttacaggagagtgcgaccatggctgtagtaaaaggtaacaaggacgtctttgtgtgcatgcccacaggggcaggaaaatccctatgctatcagctccctgctctgttggccaaaggcatcaccattgtagtctctcctctcattgctttgattcaggaccaagtggaccacttgctaaccctaaaggtacgagtaagttccctgaactcgaagctctctgcacaggaaaggaaggagctgcttgctgacctggagcgagaaaagccccagaccaagattctgtacatcaccccagagatggcagcttcatcctccttccagcccaccctgaactccctggtgtcccgccacctgctgtcttacttggtggtggatgaagctcattgtgtttcccaatgggggcatgactttcgtcctgactacttgcgtctgggtgccctgcgctcccgcctgggacatgccccttgtgtggctctgaccgccacagccaccccacaggtccaagaggacgtgtttgctgccctgcacctgaagaaaccagttgccatcttcaagactccctgcttccgggccaacctcttctatgatgtgcaattcaaggaactgatttctgatccctatgggaacctgaaggacttctgccttaaggctcttggacaggaggctgataaagggttatctggctgcggcattgtgtactgcaggactagagaggcttgtgaacagctggccatagagctcagctgcaggggtgtgaacgccaaggcttaccatgcagggctgaaggcctctgaaagaacgctggtgcagaacgactggatggaggagaaggtccctgtaattgttgcaaccattagttttgggatgggagtggataaagccaatgtcaggtttgtcgcccattggaatattgccaagtctatggctgggtactaccaggagtctggccgggctggcagggatgggaagccttcctggtgccgtctctattactccaggaatgaccgggaccaagtcagcttcctgatcaggaaggaagtagcaaaactccaggaaaagagaggaaacaaagcatctgataaagccactatcatggcctttgatgccctggtgaccttctgtgaagaactggggcgatggggcaggggccacgggaagagtctgagggctgcttggtgtagtcaggttgtgtccaggcatgcggagctgtgagtgcctgcaggagagacacccaggaggagtttttacattttggtctaaaaagctcttggattcatctcatctcatggaatgatcctgtcggatgacgctgacgtgattgcttcagacttagaggtgaataaattgaggtccagagaggtcacagtcacgaagctcatggtagactgaggccactaaacacccgtctcctgattttcagtggcgtcctcatttgcatacacctgggccatcttggtttttgcaagaaaaaagcgaggaaatcagagaaactc
